United States Patent Application Publication US 2013/0096032 A1 - sequence listing, part 16

SEQ ID NO: 517 - DNA, 98913 bp, Arabidopsis thaliana
gtccggtttcagataagttctccattctttttttaaaaatgattcactctaggtgagatttttctaatcaaatgattcatttggtagtgacatttcacaatttttatgtatattgtacaatttttcgcatcacaatttgttctctatgattcatcatttcactaattctataaccaaaaacaaagatgatgattcgagattgtttcagtttttattataaagaaaaaagtactctaagttggtatgttcttattgtcatctagatccaagcgtgatggaaattgagcctttttctttgattaggattggataagcattggaattgaaatgatatttatccaaataaaaatatacttatatacgtagtggttatgttgaaatgacttctctattacaaagtgtaatgtcactctaatattttatactagtctacatcacgaagaatacaaattgttttcttataatcgaatattaaccaattatccaaaacaaataattctaattcgattagttatggtggaagttggttgttgacaaatgacaagaatacgctttgacaaacatgcacaataaaaacttgtagggccaaaacagaaaagatgaataaattcaggggtctatttgttggaaatatgagaaatttaattttgtggcgttggagaaaggaacaagttggagctgctcgagtctttgtttttttggtcgcgttggcgggacagtctgtcatgcttgtgtttgcccctctgttttcgcttgtatttacgagttttgccattctagttttctgactattttgcccttcgacagtgacctttccgttgtgcttctatttcattatttttttagatcctatggtcaaactcttttcgtgtttatccatttacaaaagtctttgaatgttcttcttttaaacttttaaaaaggctccttgacctcataattaagtcgtacaagaattagctacagtattaagggttttattggttgattggatacataatgcgaatgcaacttgtggaagttgatagttatttaggtttattcggcagtttgtgtacataaataggtatatttgcaagaccattataactacttaactgacagtgtttgaaattggaaataacttttttttttcttttaaaaaacaaaattggaaataacaaaattggagaaggaaatattaaaccatataatatttgctatgtacaaatattatttataaaatattttatgtttttattatctcaatgatggtgaacatatgtcagatttttacattctgtcatatataattgtttttacaaaaccataggttaaaaaaaaccaatttttttcaacttcatgcttcttaggttaggctattaggttcttccttcaaaaatatttgcgggaagttgctctcaaatataggattgaagcatttttcatattcatgagtggatgaatccaaaaggtttcgagcctctagaggttttctgcatgttttcgttgggttgtcccatccgatgttcccattggtttattatactgtttttcttaaagttttgttaaattttattatgttctctccttgatttcttatattattagtgtaagtatcttccatatttagtatcgaggaatatattatctattttttttttggaaaaatttaaactgttttgtagatgaatatatcaaactatgttaaattttatgtattttccatatatgctaaaaaaaaattctcgtgcaaactgaattttatttaagaatttaagtctttacaaaaaaaggttttttagccacattagctgattttctgaatttgcttgaaactacgtgaacattgaagaagctacgtgatgtgctacactattacaattacggtttgtgaatataaagataattgattcaaattttgaaacccaaaaatctatatttagaagtaaactggcaatgttcgaacagaatagtcatgccgttgaccgctataaaaaaattttaaacagaatataattacatgtatattaagaagttcaaaaagaagctatttgattcatcttttttttaatatatttttaaaccaaaatattgatagaacaatagggaaaagctcgagtttaaatatgacctcgtgaatttgttttttgttgtgtttttgaattattgttaaattatattcaaaaaaagaaaaaaatgttttacagcttaatgaatacgatttcaaaaacaaattctaacaacacaattggaacttaagctcgtcttgtagcaaaccaaacttgaagatcctcttcatacttatggattcccctataccccgaattgtacttaaacgatttctcacatttttgtcgatcatcttgatctggtggttatggttgttcaccgtgtcttcttgcattcctctctctccaaattgagtgtaccgtattttgaaagatatataggagaatgtaaacttttgttttctcatgtacattatgttaaacttaaatatatattccatttatttttagtataaagtttttcaacaaaatcttgatgtaacaacatgagtactttagaatagatgaaaataaaactagcttataaaatacaaaatgtaaaaataatctaaaaatgatgtaaaacacaaaatataaaatacaaaacgtaaaaatgagacatcaatatattgttctgtgaactttatatatagattagttacaaataatctattgtaaatattttaagatagacaataaattaatactttttagtaaaacatacaactagttaataatctaacgaccaatataaatcaactgccaaaacaaaatatatgaaattatattttctcaaaagttaattggttgtcttaaaatgaagatgttgactctgagtctatgatattagtcaaaatgcattttaacttttatgtacattccttgtatactaaaatgtctaaaaacacggtattgaatttcatttattccgtattataaaaaattacaaaaaagcccttcaaaatatatggaaacaaaattgtaaaataactgtaaaaagtaaaattatggttttgagataccaatatatttttgtatgaaattttatccaaacaataaataaatattgtatttatttgttttaaaattatatatgatggaaaatgaatcaatatttgttgaaagttggcaaatggtagaaacctaacggctaagagaatacgacgacgcaaatgaactgttttgactaattttaggaaaaagataaaacggttctctttaacaaatttgtcgcgtttgaatacgacatcgttaaaaactatgttaaacattatatatatatactaaaaagttcaaaaaactataaaattttagttttctcatcctttttatctttaaattatcaatgatttgttgttgatagaccaataatagctcacactaaagtaatttaaattttgaacacacttaacctattatctgcacctaaactattttattctataagtagaatgctcgttccaacacctcatattgttcaaaatgctcgttcatttttagatcgtaattgtctaattattaatttataaaaattgacagctttccttttaaaaacaaaacaatacaggtttgactacaaatacacattttcgaacagatagatagagagagaaaaagaaacacaataaaacgcgcgtaaaaaggaaggctaatttagtctttttcgtcgtaactcccataacgagacaaaacaatcttaagtgttccctctcatcgtaaaagcttttctccttccttctatgtacagctgtaatggcaatatcgtaaataactcgtaacagaaagggcaattattgtcaacatttataatttaatttctcccaacttctcaaattccaccatttttcttcatcctctcctccataattgattttccttttttttgtttttccttcttgcaactaaaataaataaatttttagaaaccaaaaaaaaaattgtagagagagaaaaaaaaaactcagaggagagaaagagaagacgacgaagacgaccattttttttttttttgtcaagagagaagacggagacaacaatggcggaagcgaaggaggagaatagggagaaaaacgaagaagaagagagcgtaaagcttttcgtcggacaaattccgaaacatatgtcggaatctcaactcttaacattgtttcaagagttcgctgtcgttgacgaggtcaatatcatcaaggacaagattacacgcgcctctcgaggtttccttttctttttttttaatcttcttcacgcctctgttttcgatttttttttttataaagtttttgattggagaatgtggtgtttgattcgtgtgatttgttgagatttatttgaatttccgaaaccctaatctgtgtttttttttgttaatcttccgattttcaggatgttgttttctgctatgtccatcgagagaagaagcagataagttggtcaatgcttgccataacaagaagacattgcctggggtttgttttttttttgttttttttttcatttctctgactatttgttcttctttcagatgcttgaatgtgatttgatgttctttagtttttaattattggatttcctcattcgcacatttttttttttcgttgagaatctcgaggtttttcttaaaaaatgttattcttaaatctggtttttggaactgcattgttttggtttctgttggattccagaattggcaaattctgattttggatatatgttttgcacgaagcatttctttctgtttaggtgaacatcaatttcttttgcccgaatcagaatcagaatctttcgatttaagagtctgtttcgttggagtcttattgacattgttttggaattgtttcttcaaacccaagaaagtgcaatcaatggtaaaactaggaaattgctataatgagattaatgcgaaagaaacacttttggtttactctttaatagaagcaaaatgttagtttgatccttgttcttatggaaacctgaaaaatgttggcattagtgtttttttaccatggttgtttcagtgtgttcttcggccttttgactgtaacatttaggatgcttagatccttgtcaggtctctaactaactttttcttttggttgctcaggctaacagtctattgcaagtaaagtatgcagatggcgaattagaaaggctaggtaacgcgattccgtgctctatttcacccattttcattgttttatcatcaactgatggatgttgtattaatgtattctgcaatccagagcataagctatttgttggtatgcttccaaagaatgtctctgaagctgaagttcaatctttattctccaagtacgggaccataaaggatctacagattctaagaggtgctcaacaaacgagcaaaggttgaatctatctctgtgtcgctattgtgatctttggtttcactagtttgctttacctagttttgaccttttgtttgttgtcgatgtttaggctgtgcatttctgaagtatgagacaaaagaacaagctgtttccgccatggaatctatcaacggaaaacataaaatggaggtaattgcttttgctactttgaaaacttaccgtttgtaaatctgtagtgtgaaaattccatcatttttcttttggttttcttcttagggttcaactgttcctttagttgtcaaatgggcagacacagaacgagaaagacacacaagaagacttcaaaaggctcaatctcacatcgcccgactagggaacggtgatccaacaaatccctcattgtttggagcattacctatgggttatgtaccaccatataatggatatggttatcatgtaagcaagaaagcctaatactccgttagttcaagctgtataagatttgtctttatcaatcttgtaactaataaaattttcgtttccatttccatagcagcctcctggaacttatggttacatgctaccaccaattcagaaccaagctgcattttccaatatgattgcacaaccaaaccaaggtaataacaatgcattgcaaggaacatcgcctgactctgtgccgcctcgtttggcccgtagaaactttcctatgcctcctggaaactacatgggatctggttatcctgctatgcgaggtcatccttttccatttgcttatcccagaggaattgttagtcctcgccctctaagtagctctcctggatctatatcacctggcatgtcaacacctttaggcattggtttgagttctgtggttcaaaccgaaggttagtgtaattaagacctcttaatagttttcttctcttattcttttaagacctgaaagattattttggttgttcaggtccagaaggtgcaaatctgtttatctataacatacctcgggagttcggggatcaagaactcgcggctgcatttcaatctttcggtattgttctgagtgccaaggtttttgtagacaaagccactggtgtaagcaaatgtttcggtaagctctcttttgatctagtttttcctcttttaaaactggttcattgtgaaggtagaaagaaagcattcttttgctgttgctgttggttgcaggttttgttagctatgactcacaagccgcggcgcagaacgctattgacatgatgaatggtcgccatttaggcggtaagaaattgaaagtccagcttaagagagacagcaacaatggccaaccgagtagtaatccttccttaatctcctgaaagtgctaaaactcctcctctcttcaacttgaaagttcataacagaaaaaaacaaaaaacatattcgggcttatgggtcgacccggttcaaagatttggaccgatcttgaatggatgcatctgtatagatccaaatctcattgtgggtcaaaatgtcccatcaactcaaaagctccaaactggatcatctcttttctttttttttttaatctgcaaataacaatttgtaatttatgtttattattgaaactcatgtagaaattttatgatttattaacattaaattcattgaattcttcttctatcattttttaatgatctgttgttgtctttagagtttagaagaaagattcagtgttgttcaaaaataacagagaaatatcagattatctttgctacaaaaccaaacatcacaacaaacagaaacagacagacacacaaacatggagagggacgacaacaacaacaagaacagtcaacacagacaggttcagcccttgttgaaccctaaaatcagacttctcaccaacaatccctaaagaccctaacgaattggacaataatttctgtattgatttacagacacaaagctgtttttctgccttcttgtttcttctctgcagcagattgaacagaaactacatagaaatgaggttgtcactggtgaaagcgtgggaaatgcagaccaggcttgaatcttagtcgctagtgcttgagctcaaagtgttgcttttgttttctgtgaatgatacaagcggaaatgctttaggactccagtcttcagagatactggtgtttgaaactctagcagcattgttgttgagttgattcaagaagcatttctctattgaacataatgatccaatatcggtttcatcttcgtgggtagagtggcggctgagatgttcttgatgctgttctacttcctctacttcttcttcttctccgcattccgaatctgtggcttgtgattcacagctgacttccatgtcttgtgcattgtcagaatcagaatcagtttgagaattggatgagtgggatggagaatatccttctgatccggtagcattttcttcccgttcagctagtgtctttgtgataagagtcttaagcaagttcatcacttgaacagcatgcataagagccgttaatggatctgtcatctacagttagagaatgcaagaatcaaatgttagtaactactcagtgattcttattcattgaacaaaggttaactttgtttttacctgagtcatattaggagcaaaaaccatggctatattccttgcattcattttgttagactcttcttcttcaacaacatcagccataagatcaacagcccaattaagcaaagcagactcagttggcttcaactgcttaatgagttcaacggattcatcctcagtgttgcaattgagaacttcctcaggagaaagaccatcaagcactccacttggtaactctctaaaccaagctttaataagaccagccaaacaatgcacatcaatattctcaggtacaatacctctgtttagttggtctcttacatgttcctcttgactattctcagggtttatcctgaaaattccttcagcctacacaacaaaagcaagatatcaaattcagtctcctctcaacaaatttctcaacaaaattgattaccaattcccattaccttaagaccttgttgagaatagagtctctcctgcataagtaatagaatcgttgggacactgtttcctttctcatcataagaacattgcatcgattccgccgatacaccaaacacactcacactgcattaatcaaagagaatccaccattaaataagaagctacaatttcagatccagtttcagattctaaagcagtagtgaaattttgagagattaccttgcactagggactcgacatgggatctcaacttgaagctcgtgagggagaccaagaaagccatggaatcgatcgaatgttacatgagtgatgtgtcgaacatttgttggccaaccgatctccatgtgatgaacggcggacgaaatccctccgcctactccgccgtcgtcttgtctgttgtctacacggcaagaaaccacagatttacgcagcgccgttaagagaaactcaacaagagacagttgttgctgattctgctcttcttcttcttcctcctccgccgttgattttctccttcctccttttcctccgccgccgcaacctccgcctttagtcatcatcactagccccgtcattgagaactatgaaagattttcgcagcttctctctctctttctctctggactttgtgcttcttcttctctctctatggaagtgaatttgatttttgaaattctcgaaaaggtttctctttcttttttattcttttatgtgatttaatataatatatgtttggttttgaaatttttgtctttttggttggatttcaaagcaacggtccactcatttcaaaattttctccctctagggatattatttatctaatgtagcttttattggaatcacgttttaccccaaagaacttctctaaatctacgataatgccactcaatttaattggttgttggttgttgacgtggcgtttcatttatggatctacttgattttttgatttttttctttgtcaaattgacattttattttggatatataaatattttcactattaatattgaatccatgttttctctctcttttccctctttaaaatcttcgagagagagagaaagctgaaaatcactatgccgtccggaattcttttcggcttctgcctcttccgataaggattatcgtctagcaactactagttctttccggtgttggccaagttttgtccgacatcatttggctttcatagtgatgatgctcggctatgccgtcagcgctcttttgctgctttttgttttttcataaattagttttgttttcaataattctcatttgagatgtgttggtgataatgatagagcgattttcgcttctgttacttattatccaacctgtttttctttttgagtttagaagtgcaggaatcaaatcagagatttgagttgaagaacaaaagtgatttccgtcgcatattaacattgccttgagctgttgtttctctaattggagctttgattgttttaaccggtgaaaacccataagttttcatgtttgatttgttaatcgacgtcgaatcttcaccagaatcgatgtttgacggcaaaggatgaagtcgggaaaactttggattctcatccaatacgtgtattggtttctctacaatagaagacacgtggctttggatagagacaaaagataatacatttcttcttccatgttggtttctctgatgggctttagttgggcctaatatatttctgtagcttttgtgttatagggcattctatagcccaatgtaatatttatcttgctcaataaaattatccctcttgtgaaaaaaataaaaaaaattcactttttagattatttgtgatctatcattaaagttagtatacagatattttcatttcattttaaaaaatattttcagtttttattttgttaaacatatttgaaatttttattcacaactaaaactaagaaagttttttttttttgttgatactaattctttttattattatactaataaacttatttttctttttcatataaaataataataataaaccaaaatatttgttttttgtaatgtattattgggacaaaatttcatttgcaatgtaaagaccaattagatcacagtacgtgtgtatatttgtttttccttttttaccctttatgagcatagttaaccaaattttgttattaacaaaccggtttagcatacataaaaaaaagtttaagtcctccgccgctagggttcttgtgcgatgaagccgtctccgagaaatttgttacatgtgcgtcaatttcttttcagtttagattgaactaaacctattttactttattagatctagggatacgaaagatatggttttgatttttaacgattttatcattttcttccatgttcggtttctctgatgggctttagttgggcataatatatttctgtagcttttgtgttatggggcattccatagcccaatgtaatatttatcttgctcaattaaattatccctcttgtgaaaagaaaaaaaaaattcactttttaaattatttgtgatctatcattaaggttagtatacagatattttcatttcattttaaaaaatattttcagtttttattttgttaaacatatttgaaatttttattcacaacaaaaactaagaaagttttttttttttgttgatactaattctttttattattataataataaaattatttttctttttcatataaaataataacaataaaccaaaattttattttttttgtaatgtattgttgggataaatttcatttgcaatgtaaagaccaattagattacgatacgtgtgtatatttgttttttccttttttacctttaatgagcatagttaaccaaattttgttattaacaaaccggtttagcatacataaaaaggtgaagtcctccgccgctagggttcttgtgcgatgaagccgtctccgagaaatttgttacaggtgcgtcaatttcttttcagtttagattgaactacaactattttactctattagatctacggatacgaaatatatgtttttgatttttaacgattttatcattttcttacatcaatagtggaaaaatgagtcagacgttaagaatttttccgtcgcaaacttttcttcgaaattcaaatcatgtgatggaaaacatatctttagattatcaaagctacatatatttgtcatggatctcaaatttaaatcactaaattacaatagattttcaaatttatgtggttgttaatcagctgtggaagtttattaagtgttctaatcagaactataatggttgaaattggtatgcaatatctattattcatacttttgtttctagatcccatctaacaagaaacaatctattgatcgaagtaaaactcgatcgatgtctagatcggataaagaagcctcatcatcaaactatatgtctgaaacaattacgccatcaacgtcaaaacatatatctgaagtaagtattttcttctaaatgctcaatggtttactattttgatagttctagttgatcaattggtgaaataaatcttcatgagttttaaagtgactgttcgttttgctgtactcaatttgggctttaaaaaaagaagtaaaagctatgttgggctttaattaaacgatttagacccaaagaaaagaggtcacgtgtactctcacgtgattgtcttcatcgtttcaacaacatttggaaataaaatgttagggtttgaaattggtcgctggaatcaaataatccgataagccatagctgagttttcccttctactacaaagagcgaggctcagtgtcaatatatttagaaattaacctcattctttttactcatttaccgttatgccaccataccctgaagtagatttcactgcttttgattttcgtatcttcttctctgtcacataacctaacactataactcacggcgagacaaaattctagtcgctcttcattcaccggaaactagattcagtcactgttgcatattagtgacagtcatggttcgattgttgcagcctaaacacatggtacaagctgtgaacgctttgcattggcgaaactctgtggaatttcataagctgcttaaagataatggagatttctctatttgctttaactctgagcaagtgttaccacaaaaggtgcatttttaaacttgatttgctttttcagttttttgctattcatttgtagtaagtactgatgtttaggtttctttcagattagtgttgagaagatggtgaaaatgttacctcggcacctcattgcggtggttatgactcctaataaagatggaaagtctcgttatatactgtgtgggatcagactgttgcagacgttgtgtgacttaacacctcgtaatgctaaactcgagcaggttgttccatcttcatatgtggttttgagcttttaaagaattggactttatgcctccatggaacataatgtttgattcttttttttgtttgcatattgtgataggtcttgcttgacgatgtgaaattatcagcacagatgattgatctggtgatccttgtgataatagctcttggccgtaacagaaaggttcttttctgtagaatcctttttttgtctcttcctgtttctttttagagctgtataattcatgtccgttgcttgtttccaggaaagctgtaattcgaataaagaatcgttactagaggctacattggtggcttcttgtctccacctgtttcacgggtttatctctcctaactcccaagatcttgttctcgtcttgcttgcacacccaagggtatgaaactatgaccttatcataatgtgtttgaaatgccaatgtgaggaaaatatattaagaaaattacgcttatgctttgggatctgggtttctgctgccttgggattagtttgatctgattcttttttttttttcatctaggttgatgtgtttatagacagtgcttttggagctgttctcaatgttgtgatatctttgaaagcgaagttgctgtatagacaaactgactccccaaaaaagttaggcgcaagttctgtagaggaggttaacttccactgccaacaagctgaagctgctttgcagttccttcattctctatgccaacacaaaccctttagagaacgtgtcgctaaaaacaaggtttctctattgcttggtgtttgtacattaatcacgagttgttaataatttgttttgcttaattgatgattttatggaggacgaatctcagaattatgttttctggtattttctctcaggagctatgtggaaaaggtggcgttcttaggctagctcaatccatactatcactaactattacacctgaatttgttggagcaaccgtaactatagcttccacatctagaatgaaagcaaaagttctttcaattgtaagtctattgaaatttagcaatttttttctctatttactatctgcaactcataccaaagttcatgtgcctgcagttgcagcatctgtttgaagcggaaagtgtctcattccttgacgaggttgcaaatgcaggaaacttgcatttagccaaaactgttgcctcagaggttagtcctaattagggtctctgctctaaaatcgataggacgttttccttcttgattcgaaaggtttaccactgagtgacgcttctatttataaagattccatacaaattgacaatcttatttgttttgatacgttgtaactagtcatagaacaaacctcactgcaaaaagctcgtgttggctaagtgataatcagctctgctctagagtctaaacctacagtttcctaaatggcatatgttgttaaattgacattttgtacttttctgttcctcatttctctccaggatagtttatccatgtgaagttaagtgttgacctattcagtgatgatatatctgtaatataggttcttaaattattgaggcttggcctttctaaagcttccatggctactgcttctcctgactacccgatgggttttgtgctacttaacgctatgcgcttggctgacgtgctcactgatgactcaaattttcgatcttttttcactgaacattttgtaagtatcaagttattcctgcctctgccaaagtctcttgttttatttattgttttggcacatatgattcatacaatttatgagctgtcgtcggtatggttataaattaattgcgttactgaaattctgtaatttgttgtgtgacggatgttaaatctttctccagagcatggttctcagcgcggtattttgtctctctcatggagatttcttgtcaatgttgtgctcttctgatctttcttcaagggaggatgatgcgaatgttgattatgatctgtttaagtcagctggatggattctaagtgtattttcatcttctgggcaatcagtcacacctcaattcaagctcagtttacaaaataaccttaccatgtcttcatatgcacatcaacgaacatccttatttattaaaatgattgcgaatcttcactgtttcgttcccaacgtgtgccaaggtgatttttttgcccgccactatcttctgcatttccctgtatcatattgttggtttgccttcgtttgttagttactaagtgtattcgctgttaatatctgcagaacaggataggaaccgtttcattcagaatgttatgagtggattgcgaaaagatccttcaagcatattgattaagatgttaccaggctcttcatatactcctgtggcacagagaggcactggtgtttgcagaaacctaggtatgtatctctatcccgagacacatatattatttcttatatacacatgttttgctgatttggttttaatggatatttgtatatgtaggttctctgttgcgccatgcagaatccttgatccctagttccctcaacgaggaagattttctgcttttgaggtaacataaagcctcttcagtcattctacttttcacctatgactacattaaagttttgtagttctcgagctgtactattttatgtagccgttgatattatttttttccggtatattgtcttctgcagggtgttttgtgaccagttacagccgttaatccattccgagtttgaggaaagtcaagtacaggtgaaggtgaaaaagctttttgctctcttatacattggttttacaattctctggcttatctgtttagttacactgatacaagtaggtgtaacaaggttttactcatgtccatcgtatgttaaatttctacgtaagacagatcttttgctaaccttcaaatgttatgttgtactaggatattgaaggtaggggcgggaatttatctggtaagctaaaagagcttctgaatcttaacaatgaggaagcttcagaggattgtgatgtccgagttgaaggtgtgatgacaaagcaaggcgtgaacgaggagatagacacagttgaaaggttgaaagagagcgatgcagatgctagcaatcttgaaaccagtggttcagatacaagctctaacagagggaagggtctggttgaagagggagagttggttcagaatatgagcaagcgatttaaaggcagtgcatcaggagaggtgaaggaggatgagaaatctgaaaccttccttgtctttgagaagcagaagaagaaacggaagcgtagtattatgaatgctgatcaaatggggatgattgagaaggcgcttgctgaagaacctgatttgcagcggaattcagcttcgagacagttatgggctgataaaataagtcaaaaggtgagttcaagaattctactctttttaatttccaaccacgtattacgaacgatgcgctcgttgattacatgattttgcagggttcggaggttattacatcttcgcagctgaaaaactggtacttgcttttatttgttcctcttcgtcagctgcaaagagaatctcgtaatcactattcattatctgacattgaaagtttattatcaggctgaataaccgaaaagcgaaactagctcgagcaaacaagcaaacggggccagctcatgataataacagctcaggggatctaccggagagtcctggagatgaaaacacttggcagcagaaaccatcaacaccaattaaagatcaaactgtaacagaaaccccgaaaacaggagagaatctgatgagaacatcgtcatcatcagaagaagggataaagcaagggcaacaagtgaggcttatggatgagagaggagacgagatcgggaagggaacagtgttgagaacagacggtgaatggaacggtttaagcttggagacaagacagatatgtgtagttgatgtaatggagcttagtgagtcatatgatgggagcaaaaagatgatcccttatggatcagatgatgttgggaggactttcacagaggcgaattcaaggtttggagttatgagagtggcttgggatgtgaataagcttcagtattagactcagttgcattgaatttgaccagtaggtttttgatttttgtttatttttaactgtttagagattctcctctgttttgtgagctttgtctctctctctctgtggttatttacaggcaaaggttgagactttgagaggaaggtaataacagaaggaatagtttgacttttttaatctcagttagttgactttacagctatttaaagaaacaaattttaattgtttcgtgatttaaggagattaactatagtaaatttaagaagaaatcaattccataaagtagctaatgattatatttgaatatttaggtggtgttattcaattatggagttaaagtcaattctttaaactttagatttgttttctatattgtttttaaaaatatgtttgtatgaatttcaaaatctctgcaatatgtcatggatttcgattctaatgatttactcatgaaactccaaagaggtttcatttcaaatgaattaatatacaaggattttacaagatttttagttttgaataacactggattttaatgaaatatttaaaatcttaattgaataacactaaactttaaaatctattaagcatgatttacaaagatgagttccaataacactagattttaaaactggatttagaatcattagttgaataacagtggattagtgttggatttcaattctattaaaatccattaactaataacacccccttagataaattaccaataaggctacagcttatgcattattattaaatttgttgaaaatgtgtatagaattagaatgttcctctaaacgaaaattcaaatttcaaagtttcgataataaagtgttgaaatagaaatgcttttcttagaattgtctacacacagtatttaccagatataaaaaaaaataacaaagggtaatctagacaattcacatacatataaagccgttgactaaagaagaagactaaaagtccagctcagcgaaaacgccttttctatccgaagaaaactgtgtcctccaaaactcggcgaagcaaagatttttattttattttttcttctcttttaattcaaaaacaaaaaatagtctctgaaaaaaaaagaaaggtttttactttgtggagaagacagagtccgtccgtcgtaactcgccaccgttctccgccgtgaattcttcttactccttcgatctgaactttctacctagttctttcgtccagtgccgtagtctttccttctttgattcgctttctaggtttcgtcttctcatttctctgcttctggttcagtattttggctgttgcgggatcgatttatacccgtaaagtggtttccaatgggctcgaagccttggctacatccagctcctcagtataaaaccctagaaaccttttgggatgatgaagacgatgctcctggtcctagatgcgctcatacacttacggctgttgcagctactaagactcacggtcctcgtcttattctcttcggcggcgccaccgctattgagggagggagttcttccgttcctgggatcagtaagtttcccttattgaatttcagaatttgattttttttttgtttgtttggtttgatttgatctggagttgttctggttctggttttagggttagctggtgttaccaatacggtgcattcttatgatattctcactaggaagtggacaaggtaataaagacttcgtttttagtttttgagattttgttgtttggtttattattgttttcttgcaaatccacgttggtttgatggagagttgcattgtgaatttccggatttgtgcaggcttaaaccggctggtgagcctccgtctcctagggctgctcacgccgcagctgcagttggcaccatggtcgtttttcaggttatcttttgatcaattattcagattgtttattgtttctggcaaagcgcaaatgtgatagttttatggtcaattgtcattgttcatgtatgatatttacttatgtttgttctaaataacagggtggcattggaccggcggggcattctactgatgatctttacgttcttgacatgactaatgataagttcaagtggcacaggtgagagactctttataagtttcccagttcagtctctcttagctatctgttttattgatgtcaaaattatttcatttaatgcgtgttcagggtggtggttcaaggggatggtccaggccctcgctatggccatgttatggatttagtttctcagaggtatcttgttacagtcaccggaaatgatggtaagaatatgtctgttttactattctgtttttttttcttaaagaatagagatatcctaacaaaaatgtgtctttctgtgtatggaacagggaaacgagctctttctgacgcttgggcactggatacagctcagaaaccatatgtatggcagagattgaacccagatggtgaccgaccaagtgctagaatgttagtgattaagttgattttaatggttactgtagaacggttgttcttcaactgaattttcatattatgatttgtttgcataggtatgcttctggcagtgctcgttctgatggcatgtttttgctctgcgggggaagagacaccttgggggcggtatacctttttctccattaatctcttgtgcagaaattagtagactttttttttccaggatagggctagataaaatacagaaatctcgaattctagagctttgcttatcttgcaaggagatccgaattttaagatgttatgttttcaatcttcttgatgaatgctggcatattcccttatgtgttcgtgtgtctgcagccgttgggagatgcttatgggctactgatgcatagaaatggtcagtgggagtggactctggctccaggtgtagctccttctccaagatatcaacatgcagcggtaaaccaaatcttgctctaatttcaaaacatatggaaaaatagcttctgaagcgttgacttatactagtattccagaggactgcacattgtagctttagaaactgagttgactattgtttttcttctatatgatttgattgatgaggcatttgatttcatttacaaaaccatgctctaattttagccattgccataagttccttaattgtttttcttatcaggtttttgtaggtgcaagattacatgtcagtggtggtgtgctgagaggaggccgtgtaatagacgctgaagcatctgttgcaggtaatggtgatggtgagctaattctcgcaggttttgctcctcttgattttgatctttctaattgttgtggaatctttttttctcgcagtgcttgatactgctgccggtgtatggttggatagaaatgggcaagttacttctgcacgtggaagtaagggacaaatcgatcaagatccgtcttttgaacttatgcgacgctgtcgccatggcgcggcatcagttggtatccggatctatgtgcatggtggtctaagaggaggtaggcctgataatattccttttgtacaacaagatgccttagtttattgcagtacatatactttagttctgtagtttcacgtttcataatttaggtcaagttgaatcttaggaagtttttgtggtacacttacatctcttatagtttgaattaatgtctcaagtttatctatccttattctcagagtatgactattaccgtaattttatttccgcacagatgtgttacttgacgattttctagttgctgaaaattcaacattccagtcagacatcagttctcctttgctagcatcagatagaacccaacaaagttctactcccaggttttcttatgccgcacgacctccttcaggctctgaaccaagcttctccatgtctgagggactgaggtctatcccatttcctaccctcttttggtttgtgcttaactgtgtctagttgtttgagcatgacttatcttacttttctcctcaacaatatcagcttggatgaaaattcgttggagaaattgacggaggcttctgcagctgaagcagaggtagctagttctgtttggcgagctgcacaactaggagctggtactctggatgaagaaccctctacctctgatgccagctcgccaattgtagaatctactactgatggtaccgcaaatgaaggagatgtcaggcttcatccgagagctgtatgttaatacctaagaatattatacatttatctctttgtctcatgcgttggacatattggctgcttagtttgaaatacttcccaacatagtgtatgcttgaataactgttgtacctattcttttgcgtatttgattaccgaagtatctcatttgataggttgtggtagcaaaagagacggttggtagtctgggcggcatggtaagacagctaagcttggatcagtttcagaatgagagccgacggatggttcccatgaacaatagcgatgtgccacaacctaccaagaagttcacgagacagaagtctccgcaaggcctgcataaaaaggtatcattcttctgcaatcttctcatcctcctggacactgtccctgttaatatctctactaatgtgttgttgcttgcaggtcattgctgctttgttaagacctcgaaactggaaacctcctggcaataggaaatttttcttggattcttacgaagttggggaactctgttatgctgccgaacaaatatttatgcatgaacaaacggttcttcagctaaaggctcctatcaaagtatttggcgatctccatgggcaatttggcgatttaatgcgtttatttgatgaatatggatttccctcaacagctggagacatcacgtaagtttaagaaatcgattgaactttgtggagttttgctaaaaaaatatagtcactgaacgattaaacgtgtttgcctcaggtatattgactatttattcttgggagattacgttgaccggggacaacacagcctggagactataacgttgctgcttgcattgaaggcaagacggtgcctaatttcacatcaccaatattagtagtgtcattcaaaatgtgctttttggttttatggttctgagatattcctttgcagattgaatatccggagaatgttcacttgattcgtggaaaccacgaggctgctgacattaatgcactatttggtttccgtcttgaatgcatagaaagaatggtaaatccctctctgcagaaatattcatcgtgtttgtcgctagcttttctgcgtagactaagcctgctctgtacttttgccagggagagaatgatggcatctgggcgtggacaagatttaatcaactttttaattatcttcctcttgctgcactaatcgagaacaaaattatatgtatgcatggtggaattgggaggtcaatcagtacagtggaacagattgaaaagattgaaagacccataacaatggatgctggatcccttgttctaatggatttattatggtaatccatcctttgctgtcttgctttcatatcaatcactatttctaatatccccgagttaatgacatttttttaaagtacaggtctgatcctacagagaacgatagtatcgagggtttaagaccaaacgccagaggacctggccttgtcacgtttggggtaaatcacccctaattcgctcttattgtcgttttttattaatattgtttttaggggccaatcactgagggcgtagtcttgatactgcagcctgatagagtcacagaattctgtaagaggaataaactacagctaattatcagggcccatgaatgtgtgatggatggattcgaaagatttgcacagggacagttgattacgcttttctccgccacaaattactgcggtgaggcgaaacaaaacccgtcaaaacctcatcttgtatctatgattgtattcttggataggaaaaaacatcaagaaataaaacattgtgatacttttcttaaacaggaactgcgaacaatgcaggagctatattggtggttggcagaggattggtgattgttcccaagttaattcatcctcttccacctcccatcttatctccagagaactctccagaacattctggagacgacgcttggatgcaggtaacaacaactttgctacttctgtttcaaattaattcaaatccatacatcaactcttttactacatcataagaacacattctccaaaacaaaagcttgaaacttgtttcagccacaaaccgggtaacctgaccttagtgtaagagtctgtctttgtctttttcctagaaatatttggcctaaaccggaaacacataatagttttggaacaataaaagacattttcctagcatataccagtgaagcacataatgtctttgtttcagccacaaactgagcaacttgatcttagttggtagttatgtgatatggatagtcctaggagagtttatgtagctatatctttttttggctacgaaccagagacactgaaagtacacaatttatcttttgcaggagctgaatatccagagaccgccgactccaacacgaggcaggccacaaccagattttgacagaagctcgcttgcatacatctgaatctgattgcattcccggtttctgcctgcaactcatgaagtcaaccaatattggattttggtacaactttatacaagtatagtaagattttatgtttcaaaatttgcagtgttcatatactctgccgcacatgtgtaatataatccactataccaccagagagtgagaatggtatagtactatttttttgcttttcttctaaaaaactctttagtgagagatgatttatatttcttcaaacatagatttggtttttggaatgttaaaactacaacacaacaacatgaagttatacattcatacatacttctgattcaaaaggcagcgaaagcatggagagctgattgagctatacgtccagcttctgtctgaaagaagtgaagaaaatctgtgtattcaaagggtttgaatattcgtggatgttctttgtcgacaagttcttctggtgaatcaatgataactcctgtttttggaattgagaacagtccagttgaataccttgtcttttttcctgtcattatgacccggtgatatggagaatgcaatcgaccattcaaaagtgcctgcaacatcaacaagtatgattgattaacctttacttaaaaagagtgaaagaaatgttatctaggacttacacaaagagaatctccaaccataacaaggacagaatcttgagatggtttcactttgatccatttatcgtctttagtcttcacttccaaaccatcaacttgatactgatgaaggatcgtgatgatgttcttatccgtatgagagcgtaaacctaacttagtttcctcatcatcatcatcatcatcatcaggaggtgatgtatatttcatcaatcgcgtaaggtaatatgtagaattcagatgttcatcaatgtaattttctattccaaaactctccattatcattcttctcaccatcaaatccaattccactaattgctccgaaaacaggtgtatcgtctcactgtttcaaatgcaaaaatgtttcaaacacaaaattcttgtgttctataatcaacatgtaatgcgtataatcaagtgaaaactaaaaattttgtaatgcacattaaaaggcctaaatggattgacttcatgttcgtacctaatactcttgttcccatgatcaggccataactgttgagtaaagtcgttgactttctccaaaacattggcatcattgatccccaaactctcgtaaagattatgacaaagatatccatggaagggttttgaagacacgtttctctgtttggtcggaataggcaactcgaaaaggtcttccatagcttcaaaaacagatctattaagctccactgacaatttgtcaaaggaagcttcgaaacaaccgtagtcttctagagctttaaggacatcagctgtcacttcatcccactttgagcttcctggttttaggttttggtcagagaaatcgataaccgggagctgaaaagaaacagaaggaggaacaaagtctgaatccatttcttgattctgagaattttaaggctttttttgctttgtgattttggtttaaaagactaaaaatcatttttgttggaagaattctataagtagtagtttagacaaataaatgatgtaataattgagtttgttgacatttatggtaaccattaataacgaccgttacgttgctgcatacaggttgtatatgtgtgtcagtgtgtgtctgagattttttctttaaaatgatgataaatttgggctctcataccatgatagattttgggtttaacatgggctttcaaggatcggtggctctgataccatgataaaattcgatgagcgtaaagaacacataagtgtttaagcaacattataaatttataatatactcttataaaaataatattacaacttacaaatttataatatactcttataagaataatattacaacttacattctcttatatagatataggataaatataaatataaataatatattaagatataaagttaaactttttaaactctaatattaacacttattttctagaataatatcttcttgttatatcttgatcttttcatctcgaacatcgatctcgatcgatttctggttctccatatactaatagagattttttctctatctattttttttcttgctgtttttaaaaaaaaaatgttttaaaatcgatgatttttttttcttttttaatgcaaaactaagtagtcttttttaaaaaaatcccaaaatccgtaaacattctcctacgagatttcattgatttgaactattggaaacaaaaataatcctcttattattaaaagggaagtacaaattgaaaaatagacaaatttggcctcaatttcaatttcaattttggattttgtacacaagcattaagggtaatttggtcaactcaatctattaaagtttataggatccgcattttaaatttcgggtgggttagaagtaatggtgtcttaatcacggattcaagtacctaatcggatttagcatctaaagtagacaatcttaaccgttcaacaataattggtatctctacttcattttgctatctaaatatgagcatattccctcccaaagagaattataatcacacaaaaatatttcaaaaaaacacttataatcacaaaaaaaaattacaccacttttactattttacttttttgttactactttacttatatttaaattacatacacatttactaattaatacacatatttaaacacaataaaacacattattctaatcactaaatcattatttataaaaagttaaaaaaatatatatatatatatatatattttttataaatttacaatataacatataattaaatacttattaaaagatcatataggtccgcgcggttaaatcctagtcatagttggtaatgtgataccaataaagtctctaaaaatcttcatttttgcatagaaaaaaaaaactgatagtcctaggagtcaggagagtttaaggtgttatgcctatatataatacacgttgttattagctacgaaccaaacactgaagtgaacaatttatccgttgcggtagctgatcaatattcagaaacagcgaactccaacagattttgacagaagctcacttgcatatatctgaacctgattgcatttctggtttctgcttccaattcctgatgttataacaaacattggattttggtgcaactctatacaagtatagtacgattaatttatggttcaaagaatcaaaatttgtaatgttcatatataatctgccgcacatgtgtaattaatataaccagagaatgagaatgttactattattagcactttttttttattaatttgtttcttccatatctttcttttcttctaaaaaaaaactcctttagaacatctcaaacgaagagaatttttccattcttttagagcgtttttatgggttttttccattttaatgattagatttcaaaaaaaagttacaagagagcttttggtgtttttttttttgtttttcttactctaatggtaggctctcttaaaaaagttttctggaaaaaaagatatataaaattattttatttcatacaacttaatattattacaaagcataaaatattaaacatacattattttgaaatgctttaaaatagatgtgcataaaaaaaaaatagaataaaagaataacatatcacgataactcacaataacgtgaccatgactcatcggattttcacctaagctgcatgaaatcggaagcagatacgcgaaagcggaagcgtttggaagcatagaagcgtgtttttgaaaaaatttagaaagcgggtacatgtttgaaagcatcaaagcgagttgtttgaaaaaattagttttctttaattcaaaataaataagtcctaaatgattggtttcatatacctaatactcttgttcccatgatcaggccataatagttgagtaaagttactgactttctccaaaacattaagatcaacgatcccaaaactctggtgaagattatgacaaagatatccatgaaagcattgcgaatacacgtttctcagtttggtctgaatcggcaactcgaaaagctcttccatggcttcaacaacagagttcttaagctttacagacaatatatgtcaaaagaagcttcgaaacaaccgcagtcctctagaagcttcctggttttagggtttggttagagaaatcgataaccgggtccgggagctgaaaagatatagaacgaggaagaagagaatctgaatccattattttgattctgagaattttgaggttttttttttgctttatgattttggcctaaataattaaaagaatatttgtatggaagaattctgtaattagaagttagtatatgcgtttacggatggtacgttgctattatgcgtagatgtttatacatttaataaattatgcaatattcgcgtttgataaagatttatctctttatccaataaagagttaaaatatcaaagagttaaagagataaaaaaaaaaaagtttagaattgaggaaaagagataaaatatatataaccgtgtgatcatcttaaaataaaatgtctacatttttacttacctagctaaccactgttacaaccccatgttgataatgtctcttgtattacggcatatgttaattttaataaaacaattgaataatttcttaaattacataatacaagaagaagaaaaactaaataatgactgactatagaacaaaatttgtttaaactttaaacaatgattttcaattttctctttcgttcttagttgagatacctcttcaattctctgcaggtatgttatgtaaaaatatgttttagacttttagttaacaaaaagaaaaagaaacaaagaagacatgagccttgggctaaaaagcaaacattaaaagttctgggtcagttctaatatatagatcacgtcctttatgcgatcatgctttaaaggccgatcactgtttcttacattcctaagtcggcacttcttcactttttcctacgacatgaattgagaattgaagaccaaacgccaaaagacattttattcctctaattgtctcattttatcatttttttgggctattcaagaatatattatagcaaacgtacaagtcaaaaacttgatcgatcgtctcgtatttctgttatacattgtgataaaaaaaacttaacaatacctaaactgattaatcatcttccacctgcaatgttatcatattacagagacgacgtgtatgcagcaggtaaaacaaaagctctgatccaaagtaatggccaaatgatacagttggatccaaccgagataagtaaaaaaagattctatctttaaaatgggacctctctcctttttctcttcattattgctatggttcaaaacgtacaatcatcggcctcgctcggaatttaaatcatatacaatatgcttactaagtattattcacgtataagtaacaatatgcaactaaaggttttgggccacgaattacttacaataaaaaacttttgtaaactcaagttccaaatgtttagtaatataaattcacattttatctcaaaaaaaaagagaaaaagagaaaactttttatcaaaagagaaaagttaacttaagttataactcgttgagttgttcttcatcttgtacaacaataatgcccacacatcgtatggattgatattttctatgatgaaaataaacgattcaccaactttcctttttttgtatataaaatgtgaacttttaatagtatataccaactttccttcctctgtctattattattaagcatgtgtttgcttaaattaagcaaagcgacaaaaaaaaaacttaatacaatcacttgtgaataatttctctataaaatggggacccttcactattcttactcacacagaagagaaaaatctctagagctagcaaagtaaaaacaattaatataacagaaagtccaaaggtaattttcttatgcgtttcgaatgtttttttttcttattaattattgctactatctgctaacatctgcaaacgtttttcgattacaccaaaaagggaaagaagaatgggttcatgcagtcttcagcttccactcatcaatcttgcggacaaaaccctagaaccaggaagctcaaagtgggctgaagtgaggagtgatgtccgtaaagctctcgaagacttcggttgtttcgaagcttcatatgataaagtgtcattggagcttcaggaatcaattatgaaaaccatggaagagcttttcgcattgccagttgagaccaaacaacgaaacgtgtgccccaaaccttacgttggatatttgaatcataataatctctccgagagtttggggataagtaatgctaatattttggagaacatcaacgaatttactcaacaactatggcctcatggtgacggtaacgagaatatcaggtgaaaactcatatgtttttactattgtttagtaaaaatcatgttaatcttttttctctaaaaagtaaaatgttaaattcactctcaaatcgtatgaaaccaatgaactgaagacaaaaaaaaaaaattatctgaaaacaaattttctgcatattcatttaatttgtattttcttgttttcatatgaatcctcacacttttgtttttggttgaaaacagtaaaacgatccagttgtttgcggagaagttagtggaaatagatgtgatggtgagaagaatggtaatggagagctttggaatagaaaaatacattgatgaccatctaaagtctacggcgtatgcgactgatgaagtatattgcaccacctgagggtgatgctaatactactgttgacgataatgctgatcttcttgctaagcttaatattgttggtgttgaacctaatgttggtgttaaagttaatgccgatattagtgatgatgttaatgctaatgctagtgttaatgctggtgttggtgctaatgttaacgctgataccggtgttaatgataatcttaatgttgatgctaatgttgccgtcggtggtggcgttaatgctaatactgatcttggtgttggtgttaatgtcaattctaatgttgctgtgaatgctaaaactggtggtgatgatgttgaggctaatgatgataatgaggaaaagaagttgggtttaccttgtcatactgataaaaaccttttcacagtactttttcaacatgaaattgaaggtttggaggtaaagaccaaagatgagaagtggatcagagtgaaaccatccccgaatactttcattgttattgccggagattccctatgtgtaagttttttcatttcgttttttactttctatggcacacaaatattaacctttattcattcttcaaggttcatactagtctagttcggtcatgtggcaaacagtctcgaaaagtcgagctaagggtctttggccttttacaaaaattacatatgtgcatggatctataacttattttgattagaggcatatataactcaaaatttaaataaataatatagacaaacccatttctctagcaatcactttataatgctttaacttcataccaaatctcaattcttatgattttatttgctcttatcactttcaatgttggtcgatgcactactattgttttctcgtacataatcttcttgttcataatcatttacttggtgatgatgtaggctcttatgaatggtagaatcagggctccgtatcaccgagtaagagtgaccgagaaaaagaggacaagatacacagcagcaattttcacgtgtccaaaaccggactatgtcatagaggcaccaaaagaacttgtggacgagaagcatccacgtctcttcagaccttttgattaccgcgacttgtttacattctatcactcagaagctggtcgcaaaattcaatatactcttcaagcttattgtgccgtctccgaagcataattcaatgtgtgcgcttgattccgagtttcgacaatgtttggtgatttcaagttatcaaaaaccatgtggtatacgaaataagggcttttgattagttatgttattctgtttgtgtgataagtatgttttatggaggtccaagtctttgtgttgtatgaaaatcaataaagtatgtgtgcatgcatgcacatgcacatgtacaataatgtaataaattattgtgtttgttgacgttgacggcgccaaataataatagtgtttatagaatatattcgacatatatcaactttacgaaattaaattggctgcaccactataagtgaactagattttaatccgcggtataccgcgtgacgatttattttttaaaagtaatatatattaaaacttgcaaattttattcttataaaatatttatattttacagtttataattgttattaagtaacactataccacgaattcatgagacaattgttaaaaaactgaagtttttaacccctattaaaacagcatattaataatattttaaaattttataaatattgattcaaatacatccaccatataaccaattccaaaataaaacacgttctgtaatttctttacccgtcccgtgattttttttaaagtagtaatttttaaaatttaataattatttttcatatataaaagttttacaaattgtatcattctctaatacatttatattttatagtttaattttatatatagtaacattatacataccacataacatttttggttttatataatcttttctaaattaggatgatttgatatgtttaatattagtggtcttaaaaaataataaattaaagatttaacccgtattgaaacggtggattaattatattttacttttttattaatgttgattcaaaaacccgtccctccaaacccgtcttgccaaaaggctatttattttattaatattaattttattaatgatatgactctgaattataatctaaatattttagctaataacataggagtgcaccatatttatttaataggggaatgtatcatatgacccgaatacacttttatccaaatccaccaaaaaaatcttgcaaaaattgtatagagataagaaacgatagtcggttttgataaatataaaattagcaaatatattagttagtttaaattagttaaagaatacaaattgaaaaggtatattacactttattggaatatagtatcaaaacttatataacacagagatttgataaatttttaattgttgaatatttttttttgtgctaatttttatgtgattaagatttaattgatttcgtatataaaataataaattgacttatttgtttataatttggtaacatatagatatttgaatatttagtatattttgcttcagtttaggaaatctttgatgacccgtttttagatcgaatgagctctataatctatatattaacctacaatataccgcaggtagacttatattttagttaaactaaaaacttttattgtaaagatgattaaaaaatatatgatattattttatttgattttaaatgtatagtaaactgtgagttgtatatgttttgttgatattatctatattgtttagtgtttaagattatacacttgtagttcgattgttaatttaagagtttcacctgtagtataccatcttgtattaatatcgatctaaacccgtcaattctaggatttttcagcttgtattaaaaattgaatcacatctaatatgttattaattattgtagtatatataaattataaattttcaatataatatgtatgaaattgaatataaatatttcaaattatgacccgttactcagtagaaagttttcttaaatctatttttcaccgttataatattttttcatgtattgaacagtttatatttgtttttaaaaattcaaattatggcatatgcgaaaaaactctaattatttttttataatgatgatattatttttcagcaaaaatagaatcatataaagatgagaagtgaactataataattaataaaaaattaatatgataatttagatatcaaacataatttgttgattttaactggttatttttttggaaattaataatgtattttgtttttctaattaaattaaattaataaaaatttagatatcaaatcttatatgttgattttgaatggttattatttttggaaattaataatatatttcgttttttaattaaatttaattaattaaattagtatttgactttttaatcattaaagagataaattaatttactttttaaaattttatttctaatggcatacctatgtaattatttacaaaaattaaggttacatttaaaatatacttcccaaataatatagtaggattaacacatttttcataatttatattagaaaggaattataatatacttctttgaattttttgactaaaagtaatctaaactaaaaatagtacactcattaaacagttattaggttttctatgctgtatgacaaattttatttaattttaaaaaacaaaataagagtaagatacttcactaatcacttaattttatctcttaacgatactacgctatgtataaggtaattaagttttgtttttcatttttccataattatatttctaagctgacatgatacttcctagaaaacaatttatttcagttcacacaaattaaaaaacaattaatgattatttatacctacaccatttactcatactaaattctttctcataacaatgaagcaatagtgattctataaattcaaatattctcaataaatatttgttgatgtctacaatttattagtatagtacttagtaaaaatgcatagaaaaccaattttttatgtgataagaaaataatctttttttttctttttgaggaacttagagaaatttctttatgtttaaacaatgaaacatgattccataaaattttcaaattttctttaacaaaaaacaaatcttccaaatcttttgcaatggttagaatgttttacttgggttaagggatcagctatatgttaagcttatataacacaaatgtattgagacgctttgacggacataaaaggattcacccacttcccttcctctgtcttttcttaaattcacatgtgtttttatctaaagagccaacaaaaatctgaaaagcaagaaaactaataaccactctgttttaatgttgataagtttctctataattgggacactattgagcaactccaaattatatttagataaactaggagttaattatctcagtacccttcttcatttctttctcagcacggaataaaaatcctagagaaaacagttcgatcttatgagtataagataactttaagtattaatcttaaaaccttataatagtcatgattttatgacatatattgtaacattcatattgacattcacgctgagccggcatgtcatgattcgccttactaggcccatgaaattccacaaaaggcaccaaacaaagcggaatcttctaatgctagcctgcgaatataggtagtaggtatgaataaacaaacttttcagtaaggacagtctcttctattcacacattacagattacacgatacacaagaacaaaccaatcacaatcacccatatatacaacgtacaagacaaccaagaacgtgaaattcacactcaaaacaaaacaatcatccatcattatacacagtctttttttttgtattaatgttaagtttttttttggacaaaatattaatgttaagtattgatacaattttcacaaattttaaactgacgttacagaaaaatactttttattattattttaattaaaattagcgaaagctaaaaaaatatttcctaactcatctacaaatttagtgactcacaaattcaatcctgactcgtttagcctaatcatatcctatcatgtctcttaagcctaatcttacgcttgctcgcacgcaagtgatcagagagattataatgactatcttttgaaatatggggaaattaaatgggttaaacacctcttaattgtttttttaaaaaggttttgcatattctccctatgtgtgacgactatatattatacttcctccgtttttaatagttgatattttagaattgtacatacagattaaaaattaattaatttgattttttcttaactaaaacatcaattattaattatccaattacaattaaccaatgataaaacaacttacagaatataaagcgtaaaaaaaaaaattgtattgaaaactgaaacttcatataatttagaacaaaaaatttcctttcaaacatgaactctacggaaggagtaatagttaatgctagtattggtttctcaccagatttttttcttaaaacattctcctacgaaattgaactgatttgaaatatgaaaaatatatatttgttagtagttaagataccagtaaagtctataaaattcttcattttttttttgtaaaaaactggacaaaaaatgatatgtattaatcaaacctatgtttatatgcaataaacctatgttgtagttttttaattaaaagatattgtcattattttagctattttcaaacacaaaaaaaaaaaaatatagataacttgaaaatgtttagtaaaatctaactacaaaatgcccattttctatgtctattttcaataatatcccataatgttgtctattttgaaaaataccccatttatgtacaaatgactaaattacttttttagtaagagtagataatgaaaatgtgaatgttcctgccaaaaaaaaaaaaaacaaatttgcaccaaaacaattttcgcaacgtgcaaaattttccttaaaagtaatctcataatttatggtagaaccatgattccgcaatttttaaccgaaacgtgatctcactttttttggatcttccaaataattctcgcatgagatcttgcttgcgaaacattatacctttaaaactttataaaaaccttgtaaaacgattttacaaggtatttagaaagttatacaaaatatttaaaatctttgaattaactttgtaaaatttataactcatctcattaaagagttctttttaaaagaaaagcaaacgagcggaaaaacaaattagaagtagtactatacaccattctcattctctggtggtatatgcatgcacatgtgcagcagagtataaaggcttaccaaaatccaatgtttgttgacttcattaattggaagcagaaaccagaaatgcaatcaggttcagatgtgagaaatctattagagacaatcatagaaaatcagagaataaagtatcattcagcaaaagtgttctatatgttcaacgtctctgttcgacacaactattataacaacagtgtggtatcacacctctgttatatcatctctgtttgtaacatcggagactttaatttattggtatcatataattacataattaaataccaactatattagttgctaagtttgtggctgaaacaaagacatcatgctacacttttacatgctaggaaaatgtcttttattgttccagaactattaactatatcaatatgcgcttctggtttaggccacatgtttctaggaacaagaaaagacaatctcttacactgaggtcaggttatccggtttgtggctgaattaacgtcatgaaacaaaagaagtaatcaaagtgttgttacctatatacaaagacaaaattcaaacatatacctaaatgtttattacacaacataaacaccttatttcgtaagatagttgttgatactagttgaaacttgaaaccacgtccaaacattttgaagcgcacacctttatttcccagcagagacgccacaaaaagcttggagagtagatggagctctacgaccagcttctgtgtgatagaagttaaaaaggtcgacaaaatcaaagggtttgaaggcacgtggatgcttctcgtccacaagttcttttggtgaatctatgatataaccttcttttggattcgaaaacaatgctgctgcgtatctcgtcttctttttctctgttacccttactcggtgatacggtgaagggattctaccattcataagtgcctgccacaacaacaacatcactaggaatatgaaaattactcttcttcttttgtttttttaccaaaaacatgtagagtaaaatatttaggtcattaaatcttgactatgttgtattctaaaattaaagttatctgacaatccttatctaaatactataagttatagatcaacatatgtcatatacaaacagccaaagaccctcagctatataatactagctagaattgaaccttgacaaagaaagaatgttaatattttcacttgccaaattacgtaaagaaaaattagaacttacacatagagcatctcccgcaataacaatgacggtattaggagctggtttaactctgatccacttcccctctttggtcttcacctccaaaccatcaatttgatgctgataaattattccagtaaggcttttatcagtatgactaggtaagcccaactccgcatcaacattagcttcaacaccatgcatcaattacagtaaaaataatattagtattagtaacaatatcattaacataattagaatgaacattaacaccaatattatcatcactcatagtataactttttttttttaaaatatttttttttatctaatagtataattaaacattaagattaataccttctttggcaccaacgctagcattcccactaacagcaccaacgacccaagcagtagcatcaccattagcttcagcatcaagatcaccattaacattggtctcaacgttaatatcaacaccaacaccaatattaacactatcattgtcattaacatcatcaccaacatcgacattaactttaacaccaatactagcaccatcatcgttgacattagcatcaccatcggcattatcgttagcaccattatccacattagcaccaacagcagcagttatatcattatcaggccgtgctatatacttcatcaatcgcatacggtaatacgttgagttcaaatgttcatcaatgaagtattctatcccatagctctccagtattaatcttctcaccatcatatccagttctgctaatttctcagcatacagttggatcatcttactgtttttaaccaaaaaataaaattaaaactcgtaaggaaacaatcaaaacgcatgacgtgtgatagaaaaacaaaatgtagaaaaagggtcacttgtccaaggtaacatgctcattaacaagaattcaagaactatgtgttttagtaaattatatacaactaataagattttaggagcaatgtctttccaaaagtagagtattttttttggtaaacttcaaaagtagagttttcacatatacctgatactcttgttaccctcaggccatagttgttgagtaaattcgtgagctttctccaaaatattagcatccttgatcccaaaactctcggagagaccattatgagacaaatatccagtgaaaggtttcgggcacacatttctttgtttggcctctgtcggtaacgcaaaaagctcttgcatggccttcaaaaccgacccctgaagctccattgacacttgatcaattttggcttcgaaacaaccgtagtcttctaaagctttacggacatcactcctcactttaacccattttgagcttcctggttttagggtttggtccgagagacagatgagtggtagttgaggactgcatgaacccattcttctttcctttgtgccatcgaaatgttttgcagttgttagctttagacatagatgcaaaaaagtaattcaaaactcataagaaatttacctttcgaatatctcttgattgaaagaagaccaatttagttttctttgcactatggtttagttttccttgtcttctgtgctgatgagaaagaaatgatgaacgatcctatttatagagatttttattcactttagcaggtgccgtgggttgttgtgctcttcacttactgtattttggaagaaaacaatgtggatttaatgatacagtaaaataaacctctataaatcaatactcagccaattataaacactagtgtaaacaaaaaaaaattgttaatgaataatgtcacttggcggagaaaacaagatatacaaaaatgtcacttgtgggtttatgaattgtgaaggacaatttagttcgtcttgtctggtacaatccaatccaaaatttcatattagtttaggtttagatttttttagatatccaatccacctgtcctcaatttgcttacataaaaattggattttagttatttttccaccaactcaagaaaaccagaagaaatgaaataattaggtgacatttgttcttgtgtcttattacaacaaaagaaagagttcatgcaagttttttgtcgtatataacaaggtggcgaacagaaaaaaagggctgatatactatgaccacttgcacccactaggcccataatctagtttttcttgtcggcctatttccattatatattaggaagtaaaagagtacaacagttctatgtagaagttacatttaagagaaccaagagagtataagaagattccaagagaggagcttgttttgctaatgtatctgcgaagacattggcatttctacaaataagcttgcagctgttaggaggtaggcgccagagcaaggatatcttctttatgtcttggatatccaaatgcgcagctacagaagaagtccaatgcccatgtacttttttaagaggtctataaagagttgatgaatcttcacaaaataacatcctggtattgtaggcacttcacttggagcaatgcctccttgagggctattgcttctgcttctagggctgagtttgttggctcgatcgaggagcagcctttgaggatatatttcccgtgtgagtcagtcaaaatcaagcaaatgcccgctttgctatctgagtggccaataatctaatttagttaagttgttgtgcccttcacttactgtattttggaaagaaaaaacaatgtggatttaatgatacagtaaaacctccataattaatactcaacaaattagtaaacactagtaaagattaataaacacttttatgattttgagttaatccactataaaaactaacaccatctaatacgatgaaataatatttataaaattcctaagatcaatatataattctattaatatcatatactaataattatataagcttatgaaacaaaatgtggttctagtgtgattataaaattggaatcttctcggacctaggctatctcttatatattttctatttgttccaattgaaatagaaaaattgtgaattattctaaacgtaatactgtagtttatttccttacaatatttctttttcgagcgataccataatctcttcttagaatatcatactcaacattaaagataagagttataattttttctaaactcttaatttctgaacatgaatcagttttactcggattgttcagtagcttattaacatgcatgcattctattgtgtatcggagattattataaatcataactttaagtttataaaagttgtttgtagaagtagattcaactaattttttgaaaaatgcggactttaaacaaatttcttactttaaatatgtataggagtatttcttactttgatctctcaccttgctttaatggagagagtgtcgtgtcgtatacttccttatagtgcctcttgatggtctcattcctataaaacacatcattattagaaaagactgtgtgataagtagaatatggactacgaaacgaaaagtcataaaagaacaaaacctaatcagtaatcgctgaacctaaaagaccgtatatgcgatccaacctagcatatgatttaaattcacacacaaccaatcaaccaatttgaatggtttgctcaaacaaagattgaaagactaaagaaatgagcagacgatacggccaggttcgatgagattgactttaacaccattggttacgaatcgtttgaggaatatgtgtggtaaattcacaacgtttgattcattttcctttttgtctacatcatcttcaagataccttaaattaattgttgaaatgtctttcatgtaaatttgacctacaatatcccttagaaatctctagtatatcacttccatgagggtcttaacaccgagtacttgaccgttcaagatcacagtattctttttaaaaaaattaaagaaggagtatgatcaataatataaatcacattatgttcaaatctctgaagcgaatgtgacattttgttttgggaataaaagaaccatgataataacactagtcgaggaaatggttttaaaaataatcgtgaatgtggatatgatattagataagatcaggtcaatagaatcacgatcaagatcgagtagtttctttcaataatccatattctcaccagaaatgagaaaataaagatggtaacaaacaatagatatatctctcatctaaccaaaaaaataaaaataatagtgtgagtacgatatgagataaagtataaatattattgaaggctcttgaagagtttatatattatcgcctgtggaaactcaatttgaaatcaatttgaagttgggtgtcatgctgataaaaacctattcacagtaccttttcaacatgaaattgaagatttggaggtaatgaccaaattaaagatgagaagtggatcagagtgaaatcatctacgaatactttcattattatcgctggagattctctatgtgtaagctttcatttcctttttactttggcacaaatatattaaccattattcgttcttcgaggttcatgctaatctagtccggtcatgtcatatggcaaacggactcgaaaagtcgagctatgggtatttggcctttataaataacatatgtggatctataacttaattttgattaatagaggcataatataactcaaatattaaataaataatatagacaatccaactcaaatattaaataaataatatagacaatccaatttctctagcaatcactttgtaatgctttttatgattttatttgctcgcatcactttcaatataataatggctttttttattcttctttaaaaaaaaaaaaaatgttggtacactactgtttttattattctctttcagaatcttcttgttgaaaataaagagtaatcaatcatttacttggtgatattgcagacacttaggaaacggtagaactcgtgctccgtatcgccgagtaagagtagcaggaaaaagatgataagatacacagcagcaatatgagataatctggttttggacacgtgaaaattaacttttcacagcagcaatatgatatgattttcacgtatccaaaaccggactatatcatagaggcaccaaagaacttgtggacgagaagcatccacgtctcttcagacgacccgtagattaccgcgacttgtttaccttctatcactcagaagctggtcgtaaagttcaatctactcttcaagcttacatgtgtgcgcttgattccaagttttaacagagttaggtgattttaagtttgtcaaaaaccatgtagtaagaaaaaagggtttttgattagttgagtcatgtctgtttctgtgtgattcgtctttatatggatttttttggaggtctaagtctttgtgttgtatgaaaatcaatagagtatgtgtgcatgcatgcacatgcacatgtacaataatgtaataaattattgtatttgtatttgtatttgttgatggctccaaataataatagtgtttatggaatattctacacaggttggcgttccacgcaatcaagtgaacccatactttagggtatcaaaataaagaaaatgtacattttataaatttttcaaggctttttatgttttaagaaaaatattatacgcatttttttaataaattcatttttgttgagctttcttttcatgtttcgtgggatttaaacttgatgaaaacttatatttgttgtcaatgaatctaatttggtaacaattgggttttaaaaaatttaaaccttaaattgcttgcaaaatggaagacatcctaagactatattcatcagcgatatctagtacaatatatcaatattaaataaaagaaaaaatagaaaaagaggagagtgggagagagtcgtctctcgtttgagagactacgagaaaaacgtttcttacatgtggttttttataattagtcaagctgaaatacttattaatatgtttacacttaaaatttgtgttcacacataaatgagaaactaaaatcaagagaccatagatggtgatgctctaagatacggtgattttagttgcaaaattataaaaaaaaatctttaattaatcaagtaaatgtgttagctttgctatccattgaaataatttctggttgaaaaactcgattacgtgagtttgataaatgatattgaaggcaaaaatctaaacaatatatttacagaatgtttttttacttacaaactttttatgaaactaaaatatgttctataaaatttagtataaccgatcatatattactacattatttgtgattttataaaaaaaaatattataaggaaaagattttttatttgcgtagcacatttaaatatgccggaccggtcctgattcgaacttacgaaattaaatcggctgcacaactataagtgaattaactttttgtttttcaatttttcataatttatactaataaaaacgttgaaggataacacatacttctttaaataattttttgactagaagtaatctaaactacaaaatacactcattaaacagttattaggtttatgctgtatgacaaacttagagtaagatacttcactaatcatttaatttatatcaacgatacgacgctataagtcaataaaagaattaacttttttttctttttttttggaaatttttttagttgaaagataattcctagaaaataagttatatatttgagttttcatacaacttaaaaacagttaatgattagctatatacctatacttaatgctttctcatatctaattttgacaatctctctttttttttaatttttaatttaattttttcaccaaatactaccgtaccgtgctatatatcttggttgcttaattttgacaacctctctttttatgtatggtaatggaccacacatatccgctttgaaaagtggtccgaaggggaagacgtacggggctctcgacagctagcgaaggaaatgtagtttcttgccgtgattaaccttctttttaaggttttgtcgagaaatcataatcccgttatcgttaataaagttgttaatacccaaagataatttaagattaaaagcatgtctttgacacccaaaaaaaaaaaacacatagaagataaaaagcatgtcccgcaaaaatacaaatagaatattccttctttttaaggttgtcgagaaatcataatcactttatcgttaataaagctggtaatacgattaaaaagcatgtctcacaaaaatacaaatagaatattccttcttcttttttatttttgttgtcgagaaatcataatcactatcgttgtgatcaactaactgttttatatcgatcgacgatcgctcattacaaaaaaaaaaaaaaagtgaatgtttgtaccgaagttgtaacaataaataactaaggagtttggagagaacggagtagcttctttattaatgacgaacagaaaggcagtaattaacataatggaaaaccgtaagtacagaaacttagaaccgaaagtacaggttgaaaaactgatattaatggtcggaaaacctgaaaatacagaacggaaaaccagaaagtaagagataaagagataggcagcaattctctcttaaattctctgagtggtgacttaggttctggatcccccttcttagtagtatctcttcctattggcaaggagctgatctagggttctcttagtctctcttgcgatttctcctttttgcccttctgaatttatcgggctgggccgagccgtgatgggcagagctgtgatgggccgagtagtcattctgatgggccgttgttctgatgggccgttcttctttgttatgagctttcttgacttggtctatttgtgtttaggccgaattgggcatggagggcaaagcccgtatcccacaccgaatctaaataagaggaaacaaagaaaaaggagaaaaagaagaagaagatatgcagccaaatgggcttaaaccattaacataatgggaaagcctaacttaagcccaatacttcagctgtcaaataagaagagaaagcccaatactccaaattcggatcatatcacattatacatctaaatctgtttcacaattcaaaacatacatttggattttgactagtcgaagcctagtaattagtaattaaccatatccatgtctcagccaatcataaactaccacgtgggtgattaaattaattacagagccaaaacaaaattgtcgtttcttcaaatttcaaaaccagattgttctgtctcagaattcagaatcagtctctgatcttctccatgacgattccgtttcattgatcgatcaatcaaaatctcgccggagtttcttcccgccggcctgaatcatgcctctgcctatattcccgtcgcggttacagtgttcgtcttcatcgtcttcgtcgtcgtcgcgatcttcgttttttaggcctaagcttcgaatcgatccaagcttgaccttaattccaggcttatccaacgacgtcgggagactgattctctccttcgtcccttaccctcacatctctcgtatcaaatcaacctgtaaatcatggtacgctttcctctcttccaaaaccctaatttcactccgccatagcagagacaacagcaacaccaacaatctctcgcatctcctttgtatcttccctcaggatccttcgatttcgcctccttttctcttcgatcccgtgactctctcttggagatcgcttcctcttatgccttgtaaccctcacgtttacggtctctgcaatttcgtagctgtagctcttggtccttacgtttatgtcctcggtggctctgcttttgatactaggtcttatcctcttgatgttcctttgcctacttcttctgtgtttcgttacagcttcgtgaaatcggtttgggaacggttatctccgatgatgtctccgcgtggtagctttgcttgcgctgcgatgcctggttcttgtggtcggattattgtggcgggaggaggatcacggcacactctgtttggtgctgctggaagtagaatgagttctgtggagatgtatgatgttgagaaagatgagtggagagtaatgaatgaattgcctaggtttagagcaggatgtgttggtttcttggtggagaatgagaaggagaaggagaaggaggaggaagggagagagttttgggttatgggtggctatggcggatcgaggacggtttcggggattcttcctgttgatgagtactataaagacgcggtagtgatggatttgagagtagatggtggtgagaaatggagggtagttggagatatgtggggagaagaagagagacctaagctagggaagattgttgctgttgattgtgggaagcctgtgtttttcatgttggataaggattggattcttaggtatgagatgggtttgaatcgttggagaaaggagtcaagcgtgcctaagaaagctcattacgacaaaccggttggtttcgttgcactgaatggggaattacatgttatgattcttttggatggttataatctgatggatacaaggcatactagacaacagaggaaagctggatctttgatgattcatatgtatgatccaaagaagaagacttggagatcggttgtctcaaagccaccgttcaatcatcaacttgatttcaggaccacggttatgtgcaccatccgattgtagtaggtgtaaaaaactctcatcacacatcatctagaataaaatttggtgttcatgttgtgtgagctctgatgatgtttaggtattggttcgtttcttataccacttacatatgttaccacactgtctgtacaagttgaaaaacaaaaacaaaaaagaactgagtattctgtttatattgctaaagggtattctataaaaatgctctagcttgcgaacaatgcaacatttgcttcttctactctcgtttcaagttaatttcttcataacactaatcaaatccaagactttctgaatctctttttgactgtctatcacaattcagtttcgtggaaaaggtttttgtctcaagaaagaagacagtttcctaccataagcaagagtggttggtcactgaagaagacaagacagtctcttaccattagattattgtagcgtgatgtgttttgtttgtgctaccaaccagaaatactagcaactatcatactccacagaattgagattggttcaagtgtattatacattgatgatgaggttttgaattttgatcaaacaacacacaaaaatagtattgtagttggtttaagagcaatgacttggagtgatgaccagagttacttactcattgtagaaagtcaaacgtggcaacacagctttgcacgcttcattgacatacacgtcgacgaaaaaaccatatccgctcatcgagaaagtcggaatttttccgagaaaattcaaaagggcgaaaaaaagagcttttgcgtacagttttcgaattggtctccttcgtacgggtaaaatcagctcaaaaacctgacctttatttttctggttcttcacatttcccgatctgattttagagtcatagcttttctaaagttctcaatttgaactcatactgtttctgggttcttctttcgatgtctctggtgattttaacttttgtgctatttttaattcgatgctgaactgattagggttgatactgtttctggtcattattcactacgcagataaagacgacggctttgattttttttgtttggatttagggttttgtgatttctaatctctccttgtttattaaatctctcagtagattgattgtcaaattgaagattgatgaaactctgatatgatcgtaatcgtcgactgttttctttgattttagctcttcataattgggtttaaatggcaagagggttttaatagttttgacttacattgattgttaaacttaaattgatgattgatgaaactgaggtttggtcgtaatcgtcgattgttttctttgattttagctcttcatagtttggtttaagtgacaataaaggttttagcttcagagtgtggaatgtgttattgatgaaagttggaacatttttactggcttttacaggcaagctatggttcaagagaactatgaatgaaactgtggtgtaagagaatatcaatggttgttatctgctataatgttttttggaccaagtgagtttgatgctgatgaaatgggttatgcaatgagtagacttgagatagaatccgatctatgtgatactggaaaagacgtttgtggagttggtagtagtagtggtagtcacagatcaagtgaacatttggctgatctagaccatgaaatcagccaggttactaaattgaaatctagtcctcatcaacggtatagccgtgaagtccctgggagacatcagttacctgtgtctactgtgaggatgttggcaggtcgagaaagtaatttctctggaagaggaaggttttcagccgctgattgttgccatatgctaagcagatatttgcctacaaaaggtccttggcttgtagatcaaatggacagccgagcatatgtctctcagttttcaactgatggttctctctttattgcggggtttcaggtaaattcttcatcgtggtaattgttgtttatcagattagaaaacagatgatatgtctctagacatgtcccgggtttttttctgtctcctgagaaaagaaggattttctggatgaatcaatctacataccttgcattaatcaaatccttctttttcagggtagccgtattcggatttacaatgtagagaagggttggaaagttcaaaaggatattcttgcaaaaagcttgcgttggactgttactgatacttctctatcccctgatcagcgaaatctggtaagttttgtatctttcaactactactacttactcatgtttgattagaatttcccatatgatacttaatgcaaacttgacctcgattcagatcatatcttaatagtgatgcagagtgagtggttttgtctagtctttatggtctcttgttagatcaaaactctatgcttatattccaaagaaaggaataatgaattattgctacattgcaggtttacgcaagcatgtcacctattgttcacattgttgatgttggatccggttcaaccgagtctcatgcaaatgttacggtatggaacctcaatatgtgtttagtaagagtgtgaaagtaaacaatgctctgtgaatttagactctgaaaattctctgctttatttcaatgaaaacgatggcttatataatgccattacaaactggaatccctacaaagctgcgaactacttgaaccaacttaaactccataagactcaacaaacatttgaaagcaagactgaaacaagacttaatcaaacaagatagagttttttattagagcttggtatttttttctttattcacatgttttagtttctgttttaacatcttatcaatgaggttgaattaattaggtccatgtcttttgcaggagatccatgatggcttagacttctcttctgatgaagatggagggtactcttttggaatattctctgtgaaattttcaacagatggccgagaagttgttgctgggagcagtgatgattccatttatgtttatgaccttgaagcaaatcgagtttcactccggactgttgcacacacggtaaattcctttatcggttgaggcaatttctcctaagatttgtacctgtgtgtagatctacctgttgttagtggtaacgttatcgttttagcactgatagcattttctccatttctgcagtctgatgtaaatactgtgtgctttgctgatgaaagtgggaacctgattttatctggaagtgatgataatctctgcaaagtgagtgtctttgttgctgcaatagtacaataaatttcgggcctttataagaaaagttgtgacaggatcttgttaaaaaattcattacacgaataggtgtgggataggcgttgtttcattgggagagataagccagctggtgttttagtgggacacctcgaaggtgttacctttatcgatagccgtggagatggtcgctatttcatatcaaatggtaaagaccaaactatcaaattgtgggatatcagaaaaatgtcctcaagcgcacctgcaaggtaactattttcgatataaaactgtattcagccagtagcagtattggtcgcaatttgtttgttggtgtatcacaaagaattcgttaatgaaactaattgttctatattacaggcatgaggtgctaagaaactatgaatgggactacagatggatggattatcctactgaagcaagagatctaaagcacccactcgatcagtcagtgtcgacatataaaggtcactcagttttgcgtactctcatccgttgttacttctctccagcgcataggtctgtctctttttaagttccataatgtcccaagcctgacaaaggagaactctctttacttatatctctaattcttgtgttggcttcttttgttctttctgttgacagtactggccaaaagtacatctacacaggatcgaacgacagttccgtctacatatacgacttggtaaaccataaatcctcataaacacatttaagagacagtcaaatgaaaaagtgtagcactttatggtttatgtttcttaccaattggtgtgtgctgaattattgtctctgttttgaccaatcttggattcgtgatcctgttcttaggtaagtggagataaagtggcagtgctaaagcaccatagctcacctgtaagagactgtaattggcacccatattacccaacgcttataagctcttcgtgggacggagatcttgtgaagtgggaatttccggggagcggtgaggcgccgattatgagtaagaagagggttcgaaggagacatttctactactgatgcgtctctctacacatacatatggtctctataagttatatatgtaaaatgtagagaagaagatgatgatgaataatacaacacaagtgagaatcatcaaataaggcttaagttatagaaaaaaaaaaaaaaaagagaggctatggtgtgtgtctgtgtggaaagtgtcttgttgttgtgataaaaccatttttaaaaggttatatatattccaatggtatgcgatgtagtagtaacatataaacttttgtcatggtttggtttcagacattactttatagagtgaaaatgtattgtatgtttttattcatgttctcttttgatttaggaaatttatgaaatgacacttttattcagcattaccatcaaatgaaatctaacaaaaagtaataccattcataacattttattcgaagcatatgtataatgtgatgcaattaaagttgacatacatcatcattatcattttaccaattcacgaagtcaccaacgaataaacaaatcgtttttgttatctaccggagaaagacacgaaaaatcaaacaacttcttgaaattacgtctttaccctcgccactcgctgcactgcgttgtgggtctagttttctgcaaaccggctttaaccggacacggcgtctgtaccggtagcaccatacagttgtattgcagacacagcgagctgctcaccggaatatctgccgccgggctaatttgtattcccgtcaagaagttgtgttggaggtacagtgtttgaatattcgatgccaataaccgatccacgaagctaaccggaacttgaccggtgaaccggttattgttcaaatataggttctgtacgttggagagaagcggagaaagctcgccggagaatctgttgtagcttaaatcgacggttggtattgttacctgattcggcggttggatcacgccgtagaagaaattgcgttgtaattgaagattggtgatcgggaaggtgaagatctgaccggggattgcaccggtgaaccggtttaagctgagatcaaggtaattgagctggtttaatctgagtaaaacccggtatactggaccggttagctggttccaagcgagcgagagatattgtaacgacggcggaagagacgtcagagaaattataccggtgagattgttgcgcttgagatcgattcgggttaaggattgtgagaggaattgaggaattgatccgttcaagtgattgtgacatagaatcagattggatagctccggtaaggatccgattgacggagggatcgacccggttagctgattatagctcaaatcaagcgttttgagtccccgaagctcgcttagactcgctggaatctcaccggagatgaaattccgactgattgcgagaaatcgaagattctttgactgtgagattgtatgcggtaacgaacccatgatccgacccgggacgatagagagctccgttaaagcagagagttttccaatagccgggtcaatccgaccagataaaccgggtgaaccggctcttggatcaccgaggttaagcgcggttactttatcatcgtcacagtaaactcctgcgaagttacaaggatcagaggtgaaatcccatgaatcgaagaaattggaacctggcaaatcatcgagtgatttacgaatcgcttgcagagccaagaaatcaactgggacgatgatcgattccacgattaaaccgaatcgaagaagaagcagcaaaaccgaaaacagagtagcaaatctcattgtagccgttacagctttaaaaacagagactttataaaaaaaaacacaaaacagagacaagctttatagttgagaaatgggtcagaaagagaaagtaagggttcttgtgggagttttaatggcggattttgatactagtgacgtcaaatgactaaaaagggagggaaaatggaagatagataaaatggtttcttcaaagagaagtgtgactgtgtgagagagacaaaaagggtaatcaaaatggcttaagaaggaagcgaaatcaagagctgaatacactttcttcgtcttcctcttgcttttgttgtgcttttagtttctgagattttcttagggtggctttgtgaagaaaaggagtcataaatgctagtagtgagaagtgggttttagtttttacatttgtgattcgtttgtgtcagtgaaaaataaaaacaaatgtaattttatgtcgggaatatgcaacagggaaaacggctgtccgagccttaggttcggagtaacaggtcagcagcttcgagagaaaggagagcctagggtggttgttgactcgtggtggtggggtcgtgactcacgtgacatgtgtgtactttgggctttatgtctgttgacacgtcagctaactgtttttttttaacgcaagtttaattacttaaccctaataacaaaaatcttaggtttaggatgtgcgtataatgactgatgatcgataatattcttcatagcagagtttgtgtttttggtatacacaaaattttggtctgaatgtgttttcttcttaggctaaacttaaaattcgtatatcaatatagttgtttttaatttaatatcatatgttattgcatcggattagagtataagtggatctctagttttgtaaggaagccaagagagaacattccaagtgatcatagccaaagaagatctaaaattatggtcccatcgatagagagaatttgcacacctgttggaatgtgtgtttgtatcttctcagtcgtcatgatcacattgcaccgatgttctcaccaaattttatcaaaaaaacaaaaaacaaaaaactactatgagatctttgatgatgatgatcatggtgatgtcggtgatgatggtggtgatagagagctaatgagatgaatattagtgatgctatatgactagtcattttcactacatctgctgttttttctttatgctccacacttgctacacattacgaaaaacttacggcttctaataattacctttacaatgattacaaattcgacatatacaattatatgacatatagcagttaagtaatatgatctcaaagatacacggtatacttcttggattggagtagtctaataacaaattttcaacttagaacaatatattaagttgtgtgtatctatattaggacgcatcaaaccctatatttcatcatggttggaccgttttattcaatggccacacacaaagacgagctgatatctattttcaacaatcatttcctatatataaactaagatacatgttaatcatatccctaggagactaatgaactatatatacattataattcaaccatttgtgtattttgataaaggaagattattaattaaaagggttgattcatccacacgcagtgatgataaaaagcggcacatatggttgtgtattcataatctcttcatgaaaaaggcgtttttcttttcggccaaactcacgagagtacaatcaaactctaaaatggtgtatacaagtctttgcctcgttgatcattaaccaaaaattcatatcttaaaacatcaatggataaatggtcatatacaaatgtatatattaatggccaagagtcaagatagtgcacctactacaatgtaagtttaatggtataaacaaaagatgagttaaccgatgtgaaacaaacaatattataatcattagcacccttgaattgatagaattcagtgcatatcgagcggtaaactcaaaatattgaaagatagttaatcttggaaacaaatttagttcattcttttttgcggcgatttttttattataaaaaaaagtctggattgatgtttgtaatcaagtaacttatataagttttgcgaccatgttattatccaaaatacgtatgtgggttgttaatcgaaaaaaatggatgaagataaatgaattatacgattaattaatggataatttctattgtcctgttttgaccaactttgagttagacttctaagaccaattctaatgttaaaagtcaaactctactgcacaacgagcacagtagagttttaaaggaactctcatagaataaagcatagaatagtatgaataaaggtttttcttttgttttagatgtagatcaaaggccacatctaatgttaaaagtcaagtcctacagaattataatcatgcaagttcaacgaacatgtattgagtaggttgtttaggaaagtcttcttccatttattattgagggatatatagaaatgagcaaattgtgaagtcactctttacaagctgtgtataatttagatgtaaatagagcagtccaaagagataaaaccaaagcaaaaccttcattgccatattgattcaaaacccaagcgcttttacccgcgagcaaaacgagcctgaatcctcctctggattttggctcgacaagacgggcaatcttccatggcttccttctcatgaagctggttacatttagagcaaagaacctgatgggcacaaggcaagaatatcacactcatctcttcagacaaacacatcacacattccctctctcttttgattttcgactctgccccctgattattctcccatacttttgctgatgccatcgagtttgcctttgtgttggtggtatgattcattccactcttgttaccgtcattgtttccgtctatgccttttttcaaagcagctatcttcaagctgtctgacttgagtttcagctttgagatctcagtgtcaagtcttttgatgttctcaatgtagtatttcacatcgttctctgcttttgttttgatccgctcttcttctgcttttccgagttcttccagtttccctctctctttctttaatgcagctgcttgagcagtgagtttccccgtcgctgacttttcttgtttccaagtagcctgcaacttagtttcattagtcatcttgatgatagctaccacacttagactacaatcagttactagtacaatactatggttagttcttgatttaaagaacacggcacaagaagtataaaggtagactctcagatgtaaacatattatccctccaatttctctaattccttagaaatgaaatgattacctgaaaaaagaattgtagaggaaatgatatgatcagttgtcatacaataaattacagctccgaagacgagaagacctaaaacgtgcaaaggcattttgcctacaaaagagctaacctcaatttggttttggcgggtttttgccttggcaacttcttgctgcagccctgccaccttgtctctttgactcttgagctcttcctgcagtaaatttttttgcccttcccacgattgagaattcttcaacaatctttgcactctctcctttgcttctctacagctctcagcggactcggaagctcttatattagcagcttccctctctctctttaacagagattgttccagctcgagcctgcgaattgtgttgttagttctctcaagctggttggttgcgttattcaaggccaactccatttcagatctccttttaatagtgttttcttccaataactgcttctcttttctgaactcttctgcctcttctttctcttttcttagtgccttaagctctggttggtccttaagaagtctaacagtagcctgttttactttctgattagcccagtcagtccaatcctgcaattctttctgcagatctttcattcggggaactagctttaaaatcaattcatctcttttattccggggaatatatattcccagagttgcatcgtatgggattgcagcatagtaatctggtgctggtttcgtagacacagaaggcttttcttcaggctcagaaccggacttcttttctgaagctactggtgctggagcattattagcaggtaatgcagtaacatgctccttaacatctaatgcaggcgaatctgacttagtactgtttgagagagtgctgctactctcagctaaaggaattttcataacctctgttgtaatctttgatgaagaatttcttgcctgtgcggaaagtaaatcagaagctgatttgcctcttttctccacaaggaaaccaccaaactttgccgtcttatagccaccgcctttgctataagttctaatcttctccacgcatgatttctgccgtagcatggccatttcttttttggtgcggccttttcgacaagatactaatttttcatcagaaacagaagtcagggatgcacttttagtgccttcaccagaagcagtggaaacagaaaatacctcttttccaggtgttgctccactagcatgaggatttttggagttgtttacatttgcgaagttcccaaatttgactggctcactctgcttgctttgagtattggatactggagcctttgggttatctgcgtcactggattttggaggattacactcagcaactggagattccgatgatttactagcattggaaaccgaagagccctccaatccatctgcgtccacttcaaaagctttcaaaacattcaagtcacaaatcaacagcctccacatagcttcgtccgttgaaagcgatggtctaacctccctaacaagacttatcttctctaccaaactatacgcaacaagctgttgcaaatcctcaaacacatagtctctggaaccagcaacttttttgccactcttcaaaaaactcaaggtatcgttaacaatattagacacgagatcagttccaccacagtagaacctactgcttgaaatagctttgagaacaacatcctcactatacccacaatccataatctgattcattgcactacgaaagagcgtgagcaaatttgacgataatagtccttcaaggtgacaagcaaacggatcatcccatcccacagaatcagactcttcggctttcagctgcccgttggagtcattttcacacaaagggctttgagatttgaacgaatgtaactcatatcgagggaactcagtcaaagaagcagcattttgtggagaaggatcagctaactttctcttgttcttccttcctttatcttgcggtggtgacactgaagaagacgtccccactttcccaccattgacagcaccaaactcattcatttcttcttgcttctcaaccattaagcaataattccctgagattatgattgtttccaaattataaacacagagataacaaaaatgattcaataattcaagtattgaataagctttgagataatcccaaattccagtagcaaacttttcatgaaaacaccaaaacaatcggcaaaattccagaaactaattaaattcccagaacaaatcaacacaattccacacacgatttctcaaacatagcagctcaatcagaatgcaatcgaatcaggataaaaaaccaaatcgtttgatcattcaaccaaataacaaaacacggtgccgcaaactgaccggaaacgcaagaaaccgcgggaagaaaaaaagacgatcggaagagaattcgatgagagatagggattgatgaatatatatatatatatattaagagtgttgttgcagagagcgagagggcactgtgataaagagaacaagtgcgtggctacaagacgaagaaggagcccaacaaaattgatcgtgagcttttattttctttctttgggtaacacaaaagagggttggtgcttaggaaaaaaaaaatcataattactgatttgcccctgagggtattttagtcattacaatttctggtccatattgttctgatttcaacaacatgatgaacaaaagaatcgatgacaaggatggataagagagaatgctaatctgatcaacaaagaatctgttcgaaaattcaaagtaaatcattcattctcctctcatgatgatgatacatcaagacatgaagcttgttcttcgattcattgtctgtatttggaccttttctttgttgaactccgggtttatgcaaactcctcgtcgtcatcatcttcttcttcctcgtactcggaatcagattcctcctctctttcaggttgcatcaatgtattcatgtcaaaagaagatggatcagtttctacctcttctatatctattgtgtcgtagctcattctctgttcgaacttctcatctgaacagtttagcatccaagccaatgaacatttgattcccttcttgattatcttcttgtgtctcggctttaccgtggactcaagcccatacgtaaagaatgcggggaaatccacaaggtcttgaagaggtcttttcatttccttttggaagtactcaaagctgagtttcattattccgaggttcaaagccagaacctgaggacacccgattaccatttcccttgtttggtctatcgaaaatccacacttggtaaggaaatcaatgtgctttaacataggagactcgctgagactaacaaactgcggcattctctcgatcaaagagccaagatcctctggatttagatgaatggctgaacaaagtagcttcctctgtgtgtcgagcttaggtttaaggtcgattccgatgatttcaggatactgcgcaattatagaaggaagagatgtttctctgacattgaaatcttgcaggatttgcacgtttggtttcaccgtatcatccaattcaaacccgagtatgtgaggccgcttctctatcaacctagctgcagccagtctcggaataccaagaacctcgagatactccacgagaggcttaattatccgagctacccgcattcccaaaatctcagggtaccgtgttaaaatacccccaatctccctcctagctacacctataccaaccaaataagcgactgatgtgctcatagtcccttccagcttaaaccccaaaacttctggatacctctcaagcacccgaggtacatcactcggtttaatatccagtccttgaagatacttaaccaccggtgcaagatctataacaacgctagagtgaagaacctgcgggtatcttctaagaaactcagtgaaagtcgatttcctgacgcctagtttcccgagataatcaagaaccggaaccatgttcttcttcacgctacaaccaagaacaagagggtaattgttgatatcttcaatggtaagccctaacttgtgaagaaactcgacacgctctttcatcacatcagctgttacagggagttcaaggccatcaagctcatcaggaacaatcccaatcccacgcaagaactcataaaccttagcacgattagcagctttctccttattcatatctaacaaactaggacgactatacaaagacttagaatctcttcccttatccttatctctatccctatcccttcccgaagaagaagaagaacgagaagacctttctcttctcggtgaatccaaagaacgtgaagaaaatctccgatttgcaatagcgcattgaacagttagaccaattccagtcccaggtctcttcttgtggttgcataagttgccataagtggaatcagagagtgaacgagatctaacggcaaaaaaagatggtggctcaaagtgaactagcaaaaacccaggctttgtgaagccattacagaacctaatcttcattctttacctgcacaaaaacggaacaacactaaaatcgacgattatcaacgagaaaatcataccaattcggactaacccagacaattttacagtacaattagctcagaaaactccgaaaaaataccatcattcatgttcatgttaacatcaacgaaccaaaaaaccataacctaactagaagcaaaccacagaaactatggaataaggagaattggaccagcgtgtgattgaaatctcaccggagctgaggaaagatatcggagaagacgagggttttagaggagcgggtaaggttttttcctcatcacacaacaaagtcactctctttctccattgaaatgatttatccgaattattgacgttctcccccttatttcttatatttcccattattgccctatactatctgaaattatcacattaaaccaatacgtatatgattactttggatgtgatataaattaataaaaaaactatatatcatcaaaactttctcttaatatttctaaaattaattaattccctccttttatcttcaacattggattatcgaaaatgaaaaatagtattttctgactcttttttatagtatcgggtttaattcagaaatatataaagctttggggtctgtttcgaagtatctttactcttttaacagttctgagacttctaaagagaggaaaattagttcgtcgaagcatcgagaaaatgatcgtactttctgttggttccgcttcttcatctccgatcgtcgtcgtcttttccgtcgcgcttcttctgttctacttctctgaaacttctctaggagctccttgtcccatcaatggtgcgtttcgcctgttttcatccctactcgccattagattgtatctagttatattgtgaatgcagatttcatcttgtttatctatgtatcagtgatagaatctaaggtcttagttagctgtgaaatcgtatgtcctggtagaatcagatggaccaaaatgtgctgaacttgtgattgattttaactctaaattaggtttatggaggtgtttcagaatgcttcatagtgaatttggttgctgatatggtacagattcgctgcaatttcatcgatctgtagcttattagaggatccaaaatttgtttagaaatgcttacatagcttaaatacttagaaattgtgatgttaatactggttcttgactcttgaatggtgattctaggcttgccaatcgtgaggaatattagtgaccttcctcaggataactatggaagaccaggtctttcccacatgactgttgctggctccgtattgcatggaatgaaagaggtaatgttcaaagctgatagaggtttaaaactctttccattggtatccgctcggctcttatctgtgttttttcatggttggatgttcaggttgaaatatggcttcagacatttgctccaggttcagagacaccaattcacaggcactcctgtgaagaggtttttgttgtcctaaagggcagtggtactctgtatctcgctgaaacacatggaaatttccctgggaaaccaatcgaatttccaatctttgccaacagtacaattcatattccgatcaatgatgctcatcaggtatctctttctacctcccacatcgtttcagatgacttggctctttccttgattcttagagtttgaaatcctagattgttagagtttcccctttaattgtaatcttgattgagggcaaaagaaactccatgtaaggctgatgataaacaatccaatttcgtatgcaacagatgttagttgagcaaaaacatactattatgtttaagattgcttgagagtgttagaggtgccgcaggtcctatgtcacatgtagagacaattattagaaaactgaccttttcgctaacgttgtgtatattcttatgaatcagtgaaagatgacgttttcttctgctaaaataacttttgtgttatcttatgaaactagctcacaatcatctattacggttcttacaggtcaaaaacaccggtcatgaggacctgcaggtgttggttatcatatctcggccgcctattaaaatgtatgtaacatcctttttgaggaatttgcttatagatcattatgtgtagatgtatccttttactaatcgtttgtttttaaatagcttcatctacgaagactggtttatgccacacactgctgcaaggctgaagttcccttactattgggatgagcaatgcattcaagaatcacaaaaagacgagctttaaagcaaagtccgaggctaaaagcaagcacaacctttagatagtaaaatcatagttgaggttttgtgacactacgtagatactggtaaattggcaaggattttacatgaatgttgttgttaccagaaagtaaataaatgttcaatctttgatgttcttaagtaagtgagtcctattggtcatgaaaatatgtaagtgtgcacatcttgattgcatttgcgataaatttatagagtttcactcacttttattttcctcttctatattcaaatcatagctcttcgaagacaagaggacatcagaatcatagctttttttgtgtcttgtcttgatatatatatacctcttcgaagaagttgatgatgcagtcgtttattttgtctccatgtgagaaagtgatcaatgacactcacaaatctagtagtggctgaattggctcgatgttaaatgcaaactaacgaagtctcatcaaataataactcttcttcttgcatttgctttctttgcccctttctctcttcttccatctcaaatctgtctcttcaatattactattgggcttttggttagtctataatgggactcaaaataaggctttggcccacatcataaaagataaattcacaaatcaaaactaattttcagagtcttttgtcccacatcggtcaatctactcgttttgtgtttgtttatatattacacgaaacgatgtattcaacgtcgagctaagtaacaatagcttgtaacccatgtggggacattaagatggtgggacactggttcggttcctcggatcggttctgatgtgggcatgtttctgagctgcccagtccaagctgtgagtaattagtgttgagttgagcgaaggcttggctcatgcaggttctagagtcggagggtaatgcgtgaggctggcttcacagagcagcgactacttcccgcttacagcagtggacggatcacggtttagcgtcgctcagaaccactatggcctgctggtccgatctcatatgaaccaccatttttttccctcttttgatttttgttttccaaaactttctacgctttttgtttatattttaagagggaacaaaagcaaactttgaacaaagcaagagaatgactgattctctttcaatactctgtttttgtgtataagaaaatacccttcttgaggcagcttttactcaccttcctcttcaatcttcatcaactcgtttctcagttctttcacgttatcgttcattagttgcagagtgttttgacgcaattagtattttgattgtttttttggttaagtttttgagtaaagcaagagactttactgtctttctgccctgttttatcaacaaagattcaacatttgatcttcatacttgttgctgtaactagacattgaaaaataccaaaagaaatgtgaactagaccacccgatcgtaatgttttctagagaatgtacagagctaatttcgaaaagatgtaactcaagaagaaagctatgaacttacatgtcttagcatatttgaagaaagctatgaactttgaacaaagcaagaaaacttgaagaaagactaaaaactaggtatgagaaaagaggagactgcaaaaaggcacgagtctacggataatctcaattgtatcgccatcagcaacacggttccacttgaatgacttagtttcggtcaatggtaactcactgcttaccaagtgaaacgcttcgtgaggcagatttaactcacccctctcttgcatcttaaccagctctttcctcagttcttcgacgttatcatctgcgttaacctctacatgaatcatcctggtatcttcttgatatggcttcacatgtactgtaaacttcatcgggttggtcttgatcttcttttccacaggcgaatctgaatctctaaggacctctttggctgtgcctgacgttgaagcttgctcggtgggttgaaccacttgatttgttctgcctccaaccgccacagttgctgaatatttagggccaagtaactcatcaagtgaataagccggtagtgatgaatatatattgtggactctcctcgccatcaccctcgtgatctttttgctctccgatgaatcttgaatgccacagaactcttgtttcttatcatcaatttgttttgattgctcggtttgctcgttgctctgattagggtcagcatcaggagagatgcggagaaggagacgagattcgaagaggatcatgtaatcaatcttatgaagatcatcttcaagagccttgccatccaagtaaaggatttgtttcgaaacagggataccttgagacttctcgatcttctcttttatctctaacactgtttcgccgaaatcaatagtaatggagaacgatgagccagtctcagtatcgatgtacacgttcatcgttgtagtttcaagatcagtggagagagactaatgaggaagagagaaagagaaactgatgatttgtgacgagagtttgctaatttcgtgatttggcttaaatatcactagtcaaagaattctaaccgtcgatttctctccttactgatatgatccaacggttattagtcgcagagtgtttataagcaaattagtaatgtgatttttctttggttttagtttttgaataaagcaagaaactttactgtcttttgctctgttttgtcaataaagattctattgaggatatgattgatatcctagattgctactgtcatggatacacatatgtaaagtcgtatatattctcattcattacgttgatgtaccctagctactcactcttgtatatatattgtgattctcactatgtaatgaaatcatctcttctataaacatctatatggtatcaagagcttagatccataaaaaaataaaaaaaattaaaaaaaaatttttcctctttcttcgttctctctccttcaatggctactcacgctgaagaaatcgttctcgtcaacaccaacatcctcaacgtgaacatgagtaacgttaccaaactcaccagcactaactacctcatgtggagccgccaggttcatgcgctcttcgatggctatgaactcgccggttttctcgatggctctacacccatgccgcctgcaaccattggcacagatgcggttcctcgtgtcaatcccgactacactcgctggagaagacaagacaagctcatctacagtgcaatccttggagccatctctatgtccgtacaacctgcggtatctcgagccactacagcggctcagatctgggagacacttcgcaagatctatgcgaatccaagctatggtcatgtcactcaactccgtacgtagctgaagcaatggacgaagggtgccaaaaccatcgatgactatatgcaaggattcatcactagattcgatcaacttgcgcttcttggaaaacctatggaccatgacgagcaagtagaacgtgtgctggaaaatctgcctgatgattacaaaccagtgatagatcaaattgccgccaaagataccccaccgtctctcacagagatccatgagaggctgataaatcgagagagcaaacttcttgctttgaactcggcagaggtcgtaccaatcactgccaatgtcgttactcaccgcaacaccaacaccaaccgtaatcagaacaatcgtggagacaaccgcaactacaacaacaacaacaatcgctcaaactcttggcagccatcgtcttctggctctcgatccgataatcgccagcccaaaccctacttgggccgatgccaaatatgtagcgtgcaaggacacagtgccaaacgctgccctcaacttcatcaattccaatcaaccaccaatcaacagcaatcgacttctccgttcactccatggcagccccgcgccaatctcgctgtcaactctccatacaatgccaacaactggcttcttgacagcggagcaacccaccatatcacgtcggacttcaacaatctgtctttccatcaaccttacaccggtggtgatgatgttatgattgccgatggatccacaattcccataacacacactggttctgcctctctacctactagttctcgctcactagatcttaacaaagttctatatgttccaaatatacacaaaaacttaatctctgtgtatcgcttatgcaacactaatcgtgtctctgtggaattctttcctgcatcctttcaggtgaaggatctcaacacgggggtcccattactccaaggcaaaactaaagatgagttgtatgagtggcctattgcatcgtctcaagcggtatctatgtttgcgtctccatgctctaaagctactcattcttcatggcattcccgtctcggccatccttcattggcgattttaaattcagttatttccaatcattcacttccagttttaaacccctctcataaacttctttcttgctcagattgttttatcaataaaagtcataaagtgcctttttcaaattcaacaatcacttcgtctaaaccattggaatacatttattcggatgtgtggagttccccaattctttctattgataattatcgctattatgtcatctttgttgatcatttcacccgttatacatggttatatccattaaaacagaaatctcaagtgaaagatacgttcattatcttcaagagtcttgtggaaaatcgttttcaaacaaggattggtacactttattcagataatgggggcgaatttgtggtcttacgggattatttatcgcaacacgggatctctcatttcacctctccaccgcatactccagaacacaatggtctatcagaaagaaagcatcgtcacatagttgagatgggtctcaccttactctctcatgcctctgttcccaagacgtactggccgtatgctttttctgtggcagtttaccttataaatcggcttcccacaccgctacttcagcttcaatcgccgtttcagaaactttttggacaaccgccgaattatgagaagctcaaagtttttggatgtgcctgttatccatggttaagaccgtacaatcgtcacaagctagaagacaaatcaaaacaatgtgcattcatgggttattctcttactcaaagtgcttacttgtgtcttcacattcccactggcagactctacacatctcggcacgtgcagtttgacgaacggtgctttcccttctctacaacaaattttggtgtatccacgtcacaagaacagcgttctgattcagctccgaattggccatctcatacaactctacccacaacaccgttagttttgccggctcccccgtgtttgggtcctcaccttgatacgtcgcctcgtccaccgtcgtcgccgtctccactatgcaccactcaggtatcgtcttctaacttaccttcctcttcgatttcttctccctcttcctctgagcccactgctccaagtcataatgggccgcaacccacggcccagccacatcaaacacaaaactcaaattcaaatagcccaattttaaataacccaaatccaaacagcccaagtccaaatagcccaaatcaaaatagcccattaccacaaagcccaatctcatcaccccacataccaacaccttcgacgagtatctctgaaccaaactcgccgtcctcctcatcaacctctacgcctccgttacctcctgtgttacctgctccaccaattattcaagtcaacgctcaagctccggtcaatactcattcaatggctacaagggcaaaggatggcattagaaaacccaaccaaaagtactcttacgccacgtcactggctgcaaattcagaaccacgcacagcgatacaggcaatgaaagatgatcgttggagacaagcaatgggatcagaaataaatgctcaaatcggcaatcatacatgggatcttgtaccgcctccaccaccatctgtcacgatcgttggttgtcgttggatattcactaagaaattcaattcggatggctcactaaatcggtataaggcaaggcttgtcgccaaaggttacaatcaaagaccgggtcttgattatgcggaaacctttagtcctgtaatcaaatcaacttccattcgtatcgtcttgggtgtggctgttgatcgatcttggcctatccgtcaattggatgtcaataatgcatttctacagggtacacttaccgacgaagtatacatgtcgcaaccaccgggttttgttgataaagatcgtcctgattatgtctgccgcctcaggaaagctatttacgggctgaaacaagctcctagagcatggtatgttgaacttcggacttatttactaacggtgggttttgtgaattccatctcagatacgtcactttttgtgttgcaacgaggtcgatcaattatctatatgcttgtctatgttgacgacatattgatcacagggaatgacacggtcttgttaaaacatactctcgatgcattgtctcagcgtttttctgtcaaagaacatgaggatctacattattttctgggtattgaagcaaaacgagtcccacaaggtcttcacctcagccaacgtcggtacacacttgatcttctcgctcgcaccaatatgctaaccgcgaagccggtcgcaacaccaatggcaacatcaccaaagttgacattgcactccggtaccaaactgcctgacccgacagaatacagaggcatagtgggcagtttacaatatctagcattcactcgtcctgatctctcttatgcggtcaaccgtctgtcacaatatatgcatatgccgacagatgaccattggaatgccctgaaacgtgttctgcgatacttagctggaactccggatcatggcatatttcttaagaaaggcaacacattatcattacacgcatactctgatgcggattgggccggcgataccgatgactatgtctccactaatggctacattgtttatctcggtcatcatcccatctcttggtcctctaaaaagcagaaaggtgttgtgcgctcatctaccgaagctgaatacaggtcagtggcaaacacttcatctgagctacaatggatttgttccttattgacagaacttggtattcaattgtcacatccaccggtcatctattgtgacaatgtgggagcaacttatctatgtgccaatccggtgtttcattctcggatgaaacatatcgcgttggattatcacttcatccgtaaccaagttcaatctggtgcacttcgtgttgtccatgtctccactcatgatcaattagcagacactcttacaaagcctctgtcccgcgtcgcttttcagaacttctctcgcaagattggagtcatcaaagtccctccatcttgtgggggcgtattgaggatatgattgatatcctagattgctactgtcatggatacacatatgtaaagtcgtatatactctcattcattacgttgatgtaccctagctactcactcttgtatatatattgtgattctcactatgtaatgaaatcatctcttctataaacatctatagattcaacatttgatctttgtactagtgatacattgaagtagtaaaagaaatgtgaattagaatgtacacagagcttatagtaactcaacaagaacttatttctcttctttcagctcatattggtattacatgtgttaggatatttcagaaacctgtgaactttggaaaaagcaagaaaacttgaagaaagactaaaaccaataagaaaaagagtttaagatcgattagtgatcaaacgttcaaccacttgtgagtttaacatatccttgggaaatctgaatcgtatcaccgtaagcaacaccgttggtcaagaatgactgatcttcgtgtaatacagcctgcttatgcttgtgtattaagtaatacattccttgaggcagatttaactcacccctctcttgcatcttaaccagctctttcctcagttcttcaacgttatcatctgctgtaacctctacttgaatcatcctggtatatccatatggctgcaacattactatcatcttcatcgcaggcgagtctgtaaagttaatgacctcttcgactgagtctgacggcgaagattctctgtttttaacctcttgatccctgtttcttatgctcccaaccgccacagtcgacgaatctcgaggggcaagtaactcatcaagtgaatatgatggtcgtgatgatccattgtcgattctcttcgccaccactctcattaatggaggccgatcttgttgattcttactgaacttttccatagtcaaagcacttgattgtggcgataatggagaatcttgattgttaacgaactcatgaataggatttgatggtgttgatggagattggttggtttgaggcacttggttctgagtagggttatcgtcaggagagatggagagaaggatacgagagttgtgacgtatctggcatccaaacatattaagatggtcttgaagtaccttgcgtttgaagataagtatttgcttggaaacaggggtcccttgagtcatctcgatcttccgtttaatcattaacactgtgtcccagaaagaaacatcaatggtgaacgatgagccactctgattctcgatgatcacacttatcattgtatcaatggagactgatgaagagtgaatagagaaagagagagtctgaatagagaaggtgatgtcaacttgggactttttttgtaacgaaagtttcctcataatgtgttaactaatgacctattattttgcttatctttctctcaattttgctatttttgaaagagattttatctattgttctttgtcaacaaacgtgaaagataaaaaaattcaacaatcttgaaaaaaagtaaccaaaaatacaaaattttttttttttttttttggtaaaaggtgaaggaatacaacgacatggaaatcactaaaagcttaatgtggctttgaagagatgatgttgtgctataatctgattttgtttgaaaactagcaatgaaaggtaacattttgagaatatactgataataaaatcgtacacaaagtagaaaacacatgcctcgggggatgtaacaaacttaattctatctataaaacctgagttaacctaaactgaatttgaaagaacaaaaaaagaaacagaacagagaagaaacagagcattgcttagaaaaagaccaattccaagtttttttttctttttgctgaagaagtcgaataggattaacctacagtgatcacaggctcagaggtggatcctccagctggagaagaagaagcagcaggaggaagcggaagtaatcgcttcttctgcgcgcgtggaggcaaatgcttcacatgttttcttgagctattaacagaggcccatggtaagaaaacaccggtaccaccaccggttcccatcacattgggacttggtaatatcattggttgaaccggtggtggtgccatcatgaccattggaggacgtaggactccaagttttggcatcatgtcaattgaatgatcataaccattgaggaatggagttggtgtcatttggtagggttgccacattgtcatgacaccgtcgttgcgaggactgttgggttgtgaatggttatgatatgtgtcaggtcgaatacgaaagaatgtgatgcttactcttttgttttgtgatggacacattacatgtcttgccatgtctgcactgttccctctcatcaccaacaaagatctataaagatcaggtcaaacaatgttaatgaagcgaaaccgacctttttcttggagttaaagaaagaggtttttgatattatttttacccttgtttgagagagagtgtcaaaggtcctctgaagttgccttcgttgtcacttgagagaatgcgtccataggccattgttgattcagagaggacaagagtggagattggttgttctaagtgaggtggtttgaggaaaggctgtgagtattcaccctgaaaaagagtggcaatctcgaaggttaaagaaaagcggaaacataaaggaatggtgatccatggagatgtatatacctcttcaaagaagttgatgacacagccgttaggtctcttgtattctgggatgagtctccatgtgacaaagtgatcaatgacactctcaagaagtggtggaattggctcgatgttaactacaaaccaacaaaaactctaatcggtcaaagccatccacatggatcaaaccatttagactgaaacttgcggatcaagcgattccttaccagagttgttggtgtcgttagagttttcatccgccttgacatgaccaaagatggggacaccaagctgaatcagctctctcttgttccctttaatctgtttgttgaacagtataaagctctcacctgcattcatcttgtataagcaccggaaaactcttaaagcctataatgtgtttagcgtaagacaaagtcagtcacctgcaagcttcccgtttatgccagcttctcgtagttctgccacaaagtctaacaatttagatatctcatcttctttaagtaactcttcatacagctttagtcctttcacaacattcacctatatcaccacaacattaatttatcaataaccatatgcatatgtatgtctctcaaatcgaacttatcacactactcacagtgtggcctttgacttgttctttagcttggaaacctttgataggtttgatctcacatgaacgtgcatcacaatcttcatggctatggcatataatctgatgtgcagtatccgcaacaacagtttggtgaacatcctgatgagaacctatgtaacaaaaaccataaaattattcaagtttttgttcatacttaactacaaaaaaaattagttgaattagtgtttttaatcaattaattaatgtgagcttcgaatctttggctttagtgagaaacacatcgactaaagtaatgacagtaaatgtgatatttgattctcatggaccattctaaagaactactaatagtttccttgtaaaatgtatcagagaaagtcagagactttcaatgtagaagacatcaagacaagactacaaagtctactgtgttcgtccacgtgtctttacctaaacatgcgactttcaacacgagtaaattaaataccacacatcacgaagaaaaactcactagactggtaaaaagatctataccaaataaaaaaaacctttatagagttctgacttatttttatggccgtgaacaaaaagcaaaaagccaaaatgtgcgcgtgagtcgtgagggattcgaacattcgggacgagaagagaaaagttaaagggcggcacggagaatcgtggggaccataattgatgacgactcaagttttaattaaatccaacggctgctatgagctcaccattcgaagaagaaagaataaaaattgcaataaaatcatcacacgcgaatcaatgtgagattgatacctttgatgcgtttaacagttacatcaactagagcacaagacaacaaaattgttgcctactactactaccactaacacacacaaccacattgagaataggaatcctactactgtaatcttttaattccaaacgacatcgttatgacgtttttggtccatttttacattgttagaagtcagagaaactttttcagattatatgctttttcaacacaactacaatagatttgtacttttgtacgaattttcatgaaagtttgtgttaattttttattcttttaatatagtaataaggtctgattttatgattcgaaccctgttttaatatgtacgtactttgcataactaaagtaacactaatagttacgttacaattattttgtcctaaaaaattagtttcgtgtaaaagatcaaagttaagtgaagaaataaaaaattataaaccaactataaagccggcaacaaaatatattaataaattatacttagtcatataaatttataatatattatcttttcacacacgttaaaagtaactaacataaattaatttcttagttttcagcgaaatattcgtctttaactatatattatttttttattacaaaaatatataactaaaaagtttccaaacatggtattaaaaataccaggctgtgttagtcatttgattagtgtggaacataaaaaataaagatttctttttttagaaagaatcaggttaatttggtaaaattatttctaaaaatcgaatctctggcataatgatgcaacaaaatctcacgattgatatatatataaagaaaacaatttaaataaaaatagtagtaatactaattaagaattaaaagtcaaaattgtttagaatacatctcggatccagtagagggaaacacgtacttaaatcttgaaacttgaattagtctgagaaatatattctaaaatataaaatattgttattttcttctttaacaagaaatatatatatatatatatacaaaaaaaaacaactattttcaactcattctcataattgtaatgaagttttttaaaaaaaatcgtcaccaaccacagagagccagtttacacagtgaacagagaagaatcaaatgaccaaactttcaaagaatatgctttttcaaatgaacaaaagaacaataattatatgagaaaacctatcattgtttctggtaaaactatatagaaaattctggatccaagaaaaaaatatacttcttttgagaattgtgaagtttttttttacttacctgaatcagtgatatcactagttggtgaatcatcttcaacgtcttctacatctccgtttacgtcattctccgttactttctcgccgttaaaacactctttcttcacttcctcttcctccgtcgccaccacctctttcagatcttcctccgcctcctcctctgttttcttctgtttcagatcctccgctttcttagccgccactttctgaagctcgatcgctacttcagcgatggaatgatacttctgcatctgaagaacagggatccaattcagacgacggcgatggatcgccgcgaatacagcttcgtactccgatccagataccgcttcttcagctatccttagatgcgagcacatcgcgtcgattatcgcgtttgccgcagcgaattctcctctgaaccatgagatcaacgcatctttacctaatccttcggaaaccacagtcgccggaggaacttgaaccggaacgctcaccgccttcgccgtcgtgacgtaagcagggttgaaaccagtggctgatcgatctgtctggcgtgctggcgctgccgcaatcgtcatcggcgtagtatccggcgaagattcagttgttctctctttgatcgattattccgatcagtcggcggcggaaacagaaaaggctaaaatgggtttaaaatgtgggccgggtcgggtatagggtcgggtcgttgcacatgcaagtgtaatgagaaggttttttctgaggagagagtttggttccaatttatattgggagggatccgtacaggtgggagaggcttatggtgatgatgtggcactctcttgtagctgacgtggctaaacttctggcccctctttgcccgtttcttattccacagagttttcttttttgaaattgttttggacaaaagagtttaatttggtattatacaggaataatttgatgatgtttttgtgtggttaaattaggtagatggcaagatttgacgatgaaatttaaaaacaaataatgatgtttttgatcgccattaaatagtatattgatttttaattttttaataacttttatttaattattatcgaatatgtgatttttaaaaatatatataacatgctattttgttatgtggatgtctaatttaattacctagacgattatgttggtatataaacgtctactttatcaaatagatttctaacaaaacaaaatttaaacgtgaaatcacaaatcataatttttatgtgattttgcaatgttatttgatggagttaaaacttcaattttctcagattttaaaaatgtaaaagctatcaaacattagttttgtttttcttgtactctttatataagtttttttgtggggtcaaaatatgatgttatattattgaagaatacatgatagagaaaattataaaataaattatattttattattaatgaaataagaataaaatgtataatatgtaaaggattttttttagttgcgttttgaaaaaaaagaaaattggtttcttacactttagatgtaaaacaccaaataatttgaaatagaaagaaatctctaaaactttttataaagaaaagacagaatctgatggaatatgttgtaagcattagcgtgcaattaagcctaggttaaaaagctgtattagttgtattcacttcttgtaaaattggtaagttaatttaagttctttcaaaaagttgtgacatggtatgcatttttggggttgatgtttacgcacaatagttccttgggacaacaaaagaacggcgctgaacaaaagagttatcttgccgtatcacataaaatgacttccaattatgtatttattctgaactataaaagtactaatatcgttttctttatctataatcaaacgattccaagtaacatctaatccttgtcatttgttgtggttaactttgatcaaaattgtggtggaatgatttgaactttatggttctaaacttttaaaacaataaacgcctataaatttagttgatacttaaacttttcaacgagttttaataatgtataaagattgatgtttaccataaatctaacatttcaatgcatcatttatgaataatataattttttcaaaatgctattaaatagaaaatgttaatttataatttaaataattttttttcaaaatgctattaaatagaaaattttaatttatgaatgatttgtgtcaaatattactatcagaattttatgaaaatcaacttatatacacaccagattattttccattttgtactcattctatattatttttgttgctatatattattcttctacaattggtataagcagctaatattttttattctgtttgcaacatattttagtgaattttaaacatagaaatatgtataagacattgatcgtttggtgttatgtgttaatatttttgaactttacaccaaccaaactcatgagtcatgatgtcaatgtccatgtccatgaggcccgtggaagatgatctaagagatgacgcataaagtaataataatcaaattgtttttgtacctctaagatattaattaattagtctaagagcttcttctactattatcgttgttcttatttgacttctccttttgtttacaagtcaattcactaatagttgaaaaagctcccttctacgtgattagttgaaaacattaaatatgatagttacaaaatagaaaaaaaaaaaaatagaagattccgatccgtgattagtaagtattgatccgtggtttgttgtttcgcatgaaatttttgttgaaaaaagtttcgataaaacttgtttatctagtagtcataaatctaaaaatatgtgaatttcgttttaattagcgttgaaaaaaatgttgaattagaatttagatggtgttgactagaaaaacattgaattttatggtgagactaaattattatcaccaatccataaagagcaaaaaggttaagtagcctcttggcaaaaaggtaaagaatcaatgaatgatgggttagaccaacgaaatgtaaaattatgggaccggaatgaaaagtctacgaaaatggtggggtgaggtaaaatttgggcctacatcgtccagatttgtgggtcgccgaaacagcaccaccctctaacatcagtagattcccttttccactacctatggcacacacacaaaagaggtatggggttaactcacgaacccttagtgacccataaaagtggtgctcattgtttttcataagaaagtttctgatcatgatccatgaagaaatgctcactcgtattttgttgatcggatcttctatttctagatacagataaacttttaagacagtaaattatcacacaagttcactggataaatttgtatgtagccactagccacataaatagtataaaatttggggtatttgtgtatttggacactttaaattctaaccaactctttgagtttgagacattcttttgggagtatttgtctaaactagcatgttattgattacattattaccctctcaaaattgaatatttactcttccaccattttatatttgtctaaactagcatgctactccattctctcaacatgctttctattttaacatttcttgctactgaagagaaatgagaaaataggggttttcaccctttcttgtggcgttactcgatcgctaacactcgaattggtgaaagctcatgggcaaaagattcatttgtcgcgacaacgagaccaacactcaaatgcatataattttgtgttacaatcgcatttcgaagttgtgaaaacatatagtatcttgtcattttcagtcatttaaaataaggcgccaaccagctttttttattattattgttttaacgaaatttattttcttcgaattttatttaatggtttgtccagttttaatttatatacgtctttgaattcttagacatgcatatcaatctgttagaaattcacaaagctttatttatagaattaattatggatttgccatttttggataacatttataaatttccttttttataaaatttgtggattttatattttttcaagctataaaattgtgatttaacatatgttttattcgttatatttgagtttagtcgattacagttgttcttatggtttattctttggtataaaatacgtattttcgccaaaaaaatcctaaatacatacatttttaagtgttacaaaatgacaaatacatcaaaatttagtaaaaatggcaatttaatttttttttgatgaaaaatgtaaaatcaacaataatcctttatttatatttgtaaactcggtttttccaacataaactaacctcttgtctatatcttattatataaagtatggttttcaaagttgctaactcataagattgtgccacgtgtcaagttaaacgatcagatgtttacatgtgtcattcaaaatttaacttttttattgtctaaaaaaaatagaaaatcttaaaaagtaaacaaatttacatatactaatttatatgtctatatcaatacttatatgaaacacaaacttaacatttaataataagatatttataaacaattaacataaattcaacaaaaggaaaattaacaaatttgtctttaacttatgtaatcataagtgaaaatagaacattttgagaaaaatagcttagcttataggatttaacttttcaattatttttatttattaattttaacttatttaatattaatttgcatgatgtaaaattaacttacgagattacgacatatatagaaactatattttcaacaatgtttggtttctaaatacttttgtggatttctttttttattattattaattcttagccctaggcgtttgggtattcgggtcgggtatttcgggttcgggtttttgggtttagaagtttaggacccgttcgggtaatttaagattttgggtcgggttcggtttaggttcgggttcgggttcgggttcgggttcgggttcgagtttatttatatattaaaatatcaaattttgtgtgcagatctattaaattacttgaaaatttcaaaaattcccaaaacaacacaagtagttttgcttgaatatatctaaaaatacacaaaaagaactaaaaaatctaaaaaaatcctaatattttctatatataagtataatacttatatttgagatatgtttggatatctattcgggttcgggttcgagtttttcgagttttgaagtttagatccgtccgagtatttgaaaatttcgggtacacacgtctaaatatgtgggccttatctagtaaatttatattagttgacaaacagacaaaaatactaaacaaacgatgcaaaacaaaatagttattttttatatccagtaaaatatagtagtatatacaccaattaattaaatgtacgaatatatattttatttattaactaatattaaaattcacttttcattaggaagtaaagttctttttctgagagaatattgtttacatgtgaattagactgtaatgaggtttttatattcttctaactttgatcggagttttagctatctaaatggagtaagtcttttaagaagcctttttcccccattaatatattatttctttattgaaataatttaaacatgtcgaatatgtggatatcgcattattcgtgtatagatagagataccctccttccatgtgagaaaatggtccaaccaagtaaaagctagcttatattttgtttattatgaaccttttatatactataatgcacaataattaacttatgaatcattaagtattgattggcgtaaagcttataattataatgtattcatggaatatgagccaccggctctacaagaagaaagatagtatcgaagaatcgtttctctcttttcgtaaatggcaaagaataatttatctcgagaatgaggaatataaacaatgactttataatataagtattatactatattatgtataatttaatattgtgtaaactatatataaagtccttttacagcatttaaatatagatatttattgacacactagtgcaacaatggaaatatcttgaattgattaaaaaaagttgttatctatacaatatgaaactctttgtatatcttaggtgcaaaactatttgataatataccgatacatagtataacgatattattggataatcctccaaaactcagctttttgtctcgaaacttaagttataacaaagttaattgaaaataatgagacagtactagagatgtatgataaaccaattaaagttgaaaaagttatattcttatttagctttgccgtcaaaaggtacgataaatggaaaatatgctcttgtcttctgagcctcaaaaccttaagaagattcttacatatcttacatgtcaaagtaaagagatagttggtaacacattcccatgtggtccggaaaacaaaagcttcctttattgttttggaatattaatcagcaactgtgtagtagtattctatgttgcatacgtaaaacatataaataacattataatcatattagtttgaataatagattctaataaaagatgatgtatctttagcctagtgatacgtctaatgatcttaattaaacttgtttaatgtaatgagttaacactcaatattaacaaacaaaaacttcatattctggactacgtatgttatacatatttcaaatatacatcaattgtctattctcaacttattatttatagtctctttgttttcttgacaaattattggtcatatttttctttcacatggttccgaaggttacgttttcatgtatatatacatttgtaaaaaaagtatatatataacatttgtacaaaaagcataaaaaaattaaaatgtttatcccgattgctttttgtttgtcacatcaatatttagtgctctaaatattttggttgagtcacgaaactgtaaattaaaatcgttgaagttgctcaattatatatacgtcaccgaagttgttgtatattaacattgcatgctaaaatatatttcagatgtttaggacacataatgcattttccgtaaaataaagcttaaaaataaattaaaatatggttttataagacactattttatcttcttttttttttttttttttttttttttttttttttgccaaacccctattttatctttttatcttttgaaattttttatgatgtatctatgaaaatgatttgtgactaatgcaccgaggcttcatatgatttcattaatcacatcccatataaaatcacgggttatgttcataatttgtttattcaatattagactactatgtgaacttttagtgaattcacttttttttttatccaatcaaacctctggtttcagaatttagtttccagttttaaacttttttcttgagacgtaaaagctctcatgctttgttgatgatgtagtggtggagaatcgtgatcttcaacactttcatgtaaaaaggcttcatcatcgttaatggcatcttgggtttactcttggctgaatataaaaaagaaataataggattgatatagactctatatattaagaaataaagtaagacagtccacggcaacgcatgtgattataggaaccactatcatgcaacgacgtggatcagtgggaaccgttgctttcgaaagcataagagagacatcaattaattacaaagaaattgtgtaaacacatttatatatatcagtgacatttgagattggttttgacaaagatatacaacttctctcccgacataaatgtctacaagaatacgcaagttaatcatatttggagctctttcatctatagttgtagacaatttgtacactctattagggagttctagacttttgatgaatagaaacattttcagaatttgctttatttttttaatataggaatgtgaatattattttaaatgattcgtttcaaactttggatatatagtcatgtattcttataactagaaacttcgggtatttgggtaaaattttcgattatttggatacaaattcgggtattgggtaaaatttcgggtatttggatataaaccgatctgaaaccgattggatccgaaccgaatccgaaccgagattttctatttaccctattgggtcctagaatagcatatccgacatatccgtattcgaccgattattacccaaacccgaccagcatacctgaataccaagccgtaatttagatatgcaatttataaaggctaaaaaatcgtgaaaaaccattgtgatatattataaattattttttgggagccctaaaaacattacatattttggaagctcgagacaaaagcctttcttttttttaaccctttaggcacggttatatgaatcatatgacatgtaatatagcagtttgtaatagtaccgtcatattgtttaaccttcaaattcaaatatgcatgatttatgttcttgacaaaaatatgtatatttatgcaaaattaaatattcatctataacgatcatattatctatactgttaattttaaaaggatcatatcatctatactgttaatttttaagtgatttttttttataatttggatcccattttatttgctcttaaaaactttggatatacttgatagctttttaacaaacaaaaataaaataaaaagtacttcgagcccacgtaaaatcgaataaacaaaaatttaatttgttgaacaagttggtgttttgaactaaggcccaataatagtaagaatactaaaatgggcttaagccgggtcgtcggatcgggtttaagaaaaaacagggtcgaggtttcaagagaaacccttgttactcaggcgactaaaaccccaaatctcatttgtgtgttcgcctttctctcgtacaagtcaaaatggcgtccgttgttcttcgaaaccctagctcgaagcgccttgttccattctcttcccagatctactctcgctgtggtgcttccgttacttcctcttactcgatctctcattctatcggtggagatgatctctcttcctctaccttcggaacctcctccttctggagatccatggccacttttactcgaaagttagttttctttccattttttgcttctttttccctcttcagatcggaaagttggaaaactggttggtgattctgattgtgattgctctgcttatgtaattgctcttgtggcagtaaacctcatgtaaatgttggaactattgggcatgttgatcatggcaagaccactttaactgctgcaatcacaaaggtacttcttttgtgtatattggttacatgaaacttattgtcaaagaatctgttttttttttaagttgatattgtgatcttacttatgttgcaggttcttgctgaggagggcaaagctaaagctattgcctttgatgaaattgataaagctcctgaagagaagaagagaggaattactattgccacggtctgtgttatctttatgtatcattttctcatttttctaattagattttgttcgtttacttgatgttacttggttctgtaggctcatgtggagtatgaaactgcaaagcgtcactatgctcatgtggattgccctggacacgcagattatgttaaagtaagaaaccgatatacttttttactttcatataagataggtgttaacaatagtcggattcttggaacttaaagtatgctgctccttggtgtatatcattttaacgctgcaaacattacatgttacacattttcttgaaactctgactccaatctatttatcaatgatcacggttttgaactatgataactagaagggttattctctatgcaagcatcataatctagtatttgtcaattgtatagtggagtaacatgcatcagtatacgggtttcctttgaaaatactttggtaaacagttgagcctcactgcttctgttgctaactttcagaatatgattactggagctgcgcaaatggatggcggaattcttgtggtttcaggaccagatggacccatgccgcagacaaaggaacatattctacttgcacgccaggtttggattattaaaccatgaacacttgaagctactcagtggagctaggttctttgccacaatttgaaaattatgcaatgttccacaggttggtgttccctcacttgtgtgcttcttgaacaaagttgatgtggtggatgaccctgagctcttggagcttgtcgagatggaactacgtggtttgtagatttttaatgtcacagaacttcttctttcagcatatgaagtatgtatacgcttgctcacatcaactcttgtctctatacagagctcctcagcttctacaagtttcctggggatgatattcccatcatccgaggatctgctctgtccgcattacagggcaccaatgatgaaattggaaggcaagctatattaaagctgatggatgctgttgatgaatatatacctgaccctgttcgcgtccttgacaagcctttcttgatgccaattgaagatgttttctcaattcaagtacacttagtctacatccttgttgttttctgattcactctttaaaaaaaaaaaaacagttctgatacatttctttttcttaaagggacgtggaactgttgcaaccggtcgtatcgaacagggagtcattaaagtgggtgaagaagttgagatattgggtttacgtgaggtgagagtgcataaatattgtgtttgtactgccaaactggtgttttctggggggctattacaattaagcattttctttagcataactgcaagatttgattttcaggggggtgttccactgaaatcgactgtaactggggttgagatgttcaagaagattttggataatggacaggtaaagccaatatcaaaagattacaaagacaagttctgggcatgtaagatactgatcaaaccttggcttctattatgctaggctggtgataatgtaggacttcttctgcgtgggctaaagagagaagacattcagcgtggaatggtaagcttaggcatccttacgacgaaaaccaactttactgaaaaccaactgaactaaagtttaatcctctgcttttacgtattaggtgattgctaagcctggttcatgcaagacatacaagaagtttgaagcagagatttacgtgctcacaaaggatgaaggtggacgtcacactgcatttttctctaactacaggcctcagttttacttgaggactgcagatatcactggcaaagtggaattacccgaaaacgtgaagatggttatgcctggtgacaatgtcacagctgttttcgagttaatcatgcctgtcccactcgaaacaggtaaaacaatcttacagaaactctcttttggtacttgaagttggatttctgattcttttccttcacgtctcgtcttctggaaacaggtcaaagatttgccttaagggaaggaggtagaacagttggagctggtgttgtatcaaaagtgatgacctaaactactcaaaagcacattcttctccttcgttctctaggaatccatcaatttcgagatttttctttttgtctttttgctgctttgagatttctttgggtagatcaaataaacagagagaaacttaatttatgtttccaatgagaaagattagggcagagggcacgaaacgtctatttctttttgatgcttcctactttgtgaaactttcaaaaagccacttccaattctttctcaccttcgtggtttgtcaagtatttgtttttatttctttaaaccaaaatcatgaattttcgattattaaattaagttgaccagaaatgaaatatttatttcatgtttagcaaatcttttgctcaagtatgcttcctcttatgatgctatgctagattgtagtgctcactcttgtggtgagagacaagcttgtatgtaacattagattttgtactgatactacttttttaggttccacactcccaatttagatttaggaactagttatattgttgaaaagaaaataaatgtcgtcgttccctctagttattatttatgtttgtgttacaacttccattacaagaaggggtcaaacaacgcaaataggacgagcatagtagacgaaatatgcaaactactgatttaccagtacaagcagggtcgtcaacgcgaggctctgatttcattctcttcacacaattaaagtttcatggcccttactttaccatatgttcaaaccgaagaacatcattgttgtgtgacttgatcgaaaagctactgaagaaattatgactgtttttttaggttgtaattcgccacaggttggtattccatcacttgtgtgcttcttgaacaaaattgatatggtggaggatgaagaaatgttggagcttgtagtgatggaacaaacgcattcttgcaaaacatttattctcttcaaaattcttcacctcttaatcttaggttctaccacataatatcatctttcacatttacagctactaaacaagttttagtcatttacaaacgaccttttagaagctttccatggagtagtaaatcaagatttttacctctcaccccgatttttcaacatgcaaacctaagcgcaaacaccgcgattaccgttgcagctctgtagtaaacctccttcatacttctctccacactgtttatgatttcgtcatctttcaaacttgaacatggcttgttcgctttcctattgacatgaacaatcacctccctgagtctattcacagcccatgacagtattaccaaactcaaaccaagcccagtgtcgaagaacttatttgcgcaaaagggtacacgccttgaagcaaggctacatacgacagaaaagagcacagcgattccagttccagcagcagtgatagagaactgagtcagaagctctgagagctctccacatgatttctgtaaagagagtactgttgtgtgtttgtgtcgatgatcattgcctatcattaaagagagaaggctctcgtaagcgtggagatgatttcttttgtataggtccctctctttagcttttcgcttcgtgttgtgtttccttggtgacttgagcctgcttttctcaggacttgttcgaatgaaaaaaagaatacgaatatgagaacactaacaacacaaaagtaagtagttatagaagcaagtagcgatgagattatattacctcttcaaaggtgctagcactgtaactgctttcagcttagccggtgtaaatacgtcactttcaaacctgcttagaaaaacagtgaaaggttttaacaccgagaaatcaacgcaacacaagcgagcataaatctgggcgatggattttacctctgaaagtgtgggataagcggtgagagctgtctccattttgttgttgaattccttgacaaattgaactcggaagcaatagaaagtagatcattcaactcaggattgctacttgaagagaacagaacatgaccattcgatcgcacagagaactctggattctccatcatatccctaacgagatccaaaaccggtttccctaattcttgattcaagtaaagaacagaggaagtatcatacggtcgtagctgagaactggatttcatagactcaaactccatcaattcatttaacagcgacatatcgaatcctttttccttgaactcctctgactgagacagaagaaactccatcaccttttcttgtcttgcaaacttatcagcgattccaaagctcaaaatcagagattctggtgccgtctctgtatcaaccataaagcaagttcatgtaaattaacgaactgattgcagaaaggttcattattaactgataaaaccagaagcagtaattgagccttaccatgaacatccatgagcagaggtttcatcatggctgaatcaatctccacgaattggctaaatgaagaaaccggtttccatggttccaagagttctgtattcagattgaaggagcttgcaggtatgatctcttgtcttgctccgggattcaccagatgagaccggctattctgctgattcattcattgacaataacagaatcaaaacaagagccatcaaatccaacaaaacgcagacgcaaaaaacgcaaatcaaagatgctaactttacatgaacctatataaactgaatcattcaaatcatcaaatccaacaagatgtacacgaaagacaccaactttacacgaacccagataaactgaagcattcaagtcatgaaattcaaccagatgtagacgaaagacaccaattttacaggaacccagataacagaagcaaccaaattatcaaaaatccaatatgaaaatgaaatgatgactctgaagaattagttaccttgatgatttcggtgttgcagaggtcttgaggaagaccaaggccagggattgaataaccatgagaagtcatgaagcaaagcttgatcattttttggttgttgtagctgaagagaaagaaacaaagttcaatcctttcgaagaaaacttggttcttctcttctcttgttcgttaaaaatccatgggtaaagaagaagaagaagaagaaacaaagcttatcgctaagacttcacctacgccgcagaaatgagatttaagaatcttctggatttttggctgggaccgaagaagaagacagtttaattcttaagatttttttgaggcttagaattattcaattaacaaaactaaacccgactctatgtcgacccaaaggaacaaataacaactctttgacccaactagtacaccttaataacaaactttggccaacattgtttgcaaaaagagacacttctttcgattttcatttgttttacggtaatatacttagtaacacgaatttgcccctctcaatttcatccttctctttcgctccctttggcatgctttctctctctctctttttctttttcttctccattttagttacttaatattagatatttcgtttattttatatataattatttacttaaaaaaaacaacggataaatcttaaaatataagaaaaattaaatattaatttattatataaaaatagataaattatattatattaagtaactcaaataataagagagaaaagtagaaaaaatacaaacacacgttcaaaataaaaaggaaacaagtgatttttataaaataaatttatttcaccaactaaaatttatttttttcgttcataacttcaccgctcatttattgtgttgttcatataaagaattaatcacagtttgtgacaattaaagataagtgtgggaggtccctaataactgtgtgaaatgaaaaatacgagacaccaattataaaagaagaaaaagcaccacactaataataaaaagaaaatagagtgtcttgaaggttgctctagtcatggttccccatgccatctcaccttatttcttcttctttgaacatctccaacaatggccctcattttaaagggggcacaccctcaaaatgaagatttgagggtcacttactccaatggtatacccacaaatttattttaattttttgaagtatttacattataatcctcaatttttaacaataatcagttatagtgataaaactttcacaaataaatataacacatatattatagaaacaattatgccaaacaagatttaaaaaaaaaactccatataataatataatattatatataaattaaaaaaaaaacataaaaaaaaacataaaatgatttataaaattacaaaattactctatataaatatttccaaaatgctcccatatatgatcactcaatgcatttcaaagtgataaattagtctctttattttttatctgtagattataagataaaaattgttgaaatcttgtctgttcatttaaccccgtttcaactgttggcggtggcatcaatcttgaatctctaatcagtgcattgatatcatgttcatcctcaattattatgttatgcattataatgcaagctgtcattatatcatgcaatacttctttgttccagtaacatgacgatcatgctatgatagcaaacttcgattgtaagactccaaacgcacgttcaacatcttttcggcatgcttcttgttatgagatgtctctcttgattttttgaaagaaagtgcatcaactagaagcaaggattatgagatggctcaattgcgtatgcaaaatcaagcaaaaaaattagctctaaaagaaatagggaaggaaaataaaatattgctaacacgtttaagcgatattgatgatagtaatacatgtgaatttatacgatctgaacaagcaagaatcatacaaaaaagaaatcaagaacaacaacaacctccgattccatcaaatgtttatggacaatattttggtgatcttggaggttcaggatcaaatttacctgaatattaatattgcattacgaatttaattttttattagttatgttttaatgtaattttttcaagtgttaatttattttgtgtgtttatgtatttatttatcattgtaatgttaattttaatttgtgttgaaatgctcagtgtactattattgttgtatttgttttttatatttaaataattttcatttatttaaatttatatgaatatatttgaaatagttgactttaatagaattatttgtaaggaatataaagtacaaagactaaaatgaaataagagaaatattttgagggtgtgaatagtgccatgagggtttgaagggttgttggagttagagttaaaaacccctcaaatttgagggtttgagggtctgttggagatgcttttagatctagagatttttttttctctctagtttgtttgtaagatctttttaatttatagtgtttcgtaagatctttctagtacaatcaatttactggtttttgtcatcggtgatgaagtgtaatttatccattctttctattattttttctttgacatcgtagttttttcttttctcctttttttagacattgtagttttttaatatatgtcaccttaattgaattatttgtttgattttgttaaggttggtaaattatcattgataacgaagtttgtcgagatggtaatggcccaagggctgcgtatgacagaaattctagggagcataagagagaaattgacattgatggtcgaagatggatgttgaagagagagagagaaaaatatacaaacacacgttcaaaataaataggaaacaagtgatttttacaaaataagtttatctcaccaaccaaaatttatttatttttttgcccataactctacagctcatttattgtgttgttcatctagagaattaatcacaatgtgtgacattaaagataaatgtgggaaagtattattaactgtgtgaaatgaaaatcacgagacaccaattataaaagaagaaaaagtgttacaataccacaccaataataaaaggaaaatagagtgtcttgaaggttgctctatcacggttccccatgtcacctcacatttttcatctttttaaatctagagattttatttctttctagtttatttgtaagatcttcctagtttatagtttttcttaagatctttctagtccttaaacatcttatcaagataaatcttcatcctctcatcctagttcaaacgcctgaatatagtacaatgaatatattggttttcgtcatcggcgatgaagggtaatttatcccctctttctattaatttttctttgacatcgtaggttttttctattctcttttcttagacattgtaattttttcatatatatcatcttaattgaattgtttgctaaattttgttagggtttgtaaatcatcattggtaacgaagtttgcgaatgataatgacccaagagctacgtatgacaggaatcctagggggcataagatagaaattgacattgatggtcgaagatggatgtttaaggtaacgaagttatatatgtagagagagagagaggcaaaaaaaaaaaaaacatgttcaaaataaataggaaacaagtggttttataaaataagtttatttcaccagccaacgtttattttttttgcccataaccccacaactcatttattgtgctgttcatctagaaatttaatcacagtgtatgacgattaaagataaatgtgggagggtactaatatctgtgtgaaatgaaaaacacgagacactaataataaaagaagaaaaagggttctaacaccacactaataataaaaggaaaagagagtgttttgaaggttgctctagtgtttttttttaataaaagaagaaaaagggttctaacaccacactaataataaaaggaaaagagagtgtcacggttccctatgtcatctcacattttttcatcttcttagatgtagagatttttttttctttctagtttgtttgtaagatctttctagtttattttttcgtaagatctctctagtccttaaaattcttctcaagattaatactcatcgtctcagcctagttcaaacgcctgaagggtaaattatccattctttctatgattttttctttgacatcatagtttttttctattctcttttcttacgcattgttgtttttcatatatatcatcttaattgaattgttttttttattttgttagggttggtaaatcatcattggtaacgaaatttgccgaggataatggcccaatggctgcatatgacatgaattctagaaagagagagaggggtatggtctttagttgggggtataggggtaataacacaagggtaaaaaacttcaaaagttaaaagtgtgggaaaatgtaaatgaagtttaaaaagtatgttaaagcgtaattgttcctattatttatactcaagtatttcgtatttagagaatattgccctctaagacacttttttaaaaacatttaacgtgttacaacacttaaaaaggaccagacactttgcattctcaaatttactattataccttaaaaccgatttttgatctgtaaatcaaaccaaacccatttttcctaaaccaaatgcagttgactctcaccaatttaccttcatctctcccacgactttacagtttcccaaatccagtaaaaaaaaactaatttacattttctcgatcaatgttcatcgtcttcggcagttttgtcaatgctcctccgattagttaaggtaagtacaaaatatggttagtttaaaaatatatatatatattaaatttggtaattaaataattaatttcgttttgtaatttttttttttgtagataatgtttttttcaagaattaatgttatttaggatccgaacacaattaaaccggataataacccgacccatcaaatcctatcctagatccgaatagaatcaaaccgggtaatatccgacccaaatgaattaaaaggaattaaagctcaaaatcccctacaaaaatgtatatgtagatttttcagaatttcaaaaaaaaagaattttgtaacaaataataaatatacatacatatatggtatgttttgacaaagctttaactaacaactgtatgaaacaacaattacacatccaaaggacccaatttttgtaccccaacatctacaacaatgacacttaacaaacatcatgaaacaaaatgcctggaccgttacaacagtagtaagagatgcgagctacattaacctaggagagtcattgttggctacaggagtggttgtagcagagctactagcttctgagttgtatcgggtcgtaccttgagaagtcctcttggtccttacaagagggttactttcctcctcatcgactacccgtggtcggtcaaaatcattgcctttaaaaaccggatgcacgtaagcatctttcagatattccttgaggtttagattcggttcagttgctttttctagtgtatccttcaccattgcttcctgttaaatatattcaatcccaaaaaatcagttgaaacatttgtatacaagtcttttttttgcagcaagagcttttgactcatcacctgtaaaggaaattttgagaaggccgattcaaaccgtcctgcgcagtatctgtaaaaccaaaaggttaagataggctgagggagaagcagagctgttacttttgcaaatttctttgtgctgagcagacccatcatcagaagctgtgatattattagacatatgatcaaacgtctatgcacgtcaggccagtatctagccccgctctcatatttctggtcgtagacattaataaccttgcagcagtagataagacatattaacattattgcatatattgcaggtatgctttagaagaacactatgatatttttagcttttaaggtacctgatgccgaaaaacaacgtatgcgaaagcaaagaagacgataatgaatggaaggagaattggcgcaacagcagcgtatacgaggcctagcaagaaatagaactgaatccgtggttcagatgttgcaaagtccagatgacctggatccattgcttgctgcctgtcttgttctgtcttaaccaaaaacgtgtttttcaggtgaaagatgactaatggaaccactctgagtatctcagctgctatgccagcccaaccatcgaccatgatatatgtgatgaaaaatgtggccttcattgggattgacacaccaactgttttcgggatcctaagtaaaaagagaaagaagaggaggtcaatagatgttctcatgtgttatcggtcggaaattctcaccaagtacttactcggttggtggttgctcaaggaaagatttaagctgctgaaacgctgtcccggtaatgatgcttccaagaaagacattgacaataatgaaccagaaatacttttcagctgatcttctatctaaataggacagcgatgtatatccttcaatttgtgacattgtcatcagaatagttggaagtatgatgagaaaaatctttaacgctattcctggaagaaacccttggattacagactttacagtcttcctgcatatgaacaaaagatgaatggcatgagcgaaaagttccaaggcaacagtcaagaacaaatttctgtttatcataaaacggggactaacatttctatcacgggtttcaagaaagggagaactttttggatcccttcaaggttggcaagagactgaacaaatgctataggaatcatgaagcagaaaataagaaaaaacagtgcaactgttgtgagcaatcttcttattgagagctcaacatatggaatagcgagattatcccagaaaacatcgcgtggttcgggagcccattccgtcaaccagattgtgggattgtggcattgctgtgtttgagcacaaacagctgttccccaccgtgatctgaaggaaacaaatgctgccggcatgatagccttaggatcgttcatgatcttttctctttctacagcttcctgtgtatgtaaagaattacgaatgcacttataattaagatgaaaatggtatgaagattacttctacaggtgagtacatacttgctcagccagaatatccatctttgaagtgtagaagtcaattgcatcaactgtagttccccaaaaacctccataacctgtctatataataaattaaataactaccgacgagaattgaattcatgataagcatgaaattcaaagagtcattttgctgaaacattacacgagagctatatggtcaaaggttaaaatagtcttgcaacagaagtacctttgttgttggtctacttgatggcttcctctcgaatttattctcgtagtacgtcaaccaattttgcatagcttttctctgtgcgactaattttgcaaggtcatttgcattgtacactacctgggaacatcaaataagaaaacgcatgacatactcaagtgaagaaactaaataattctgaataccactctattagtggttttcgagatattgttgatgaatttactttcagccagctaaagaaacgtacctgatggcaaagataatgatctggatgatttacacaaaagaagtgctcaacatgctcgtttactgattcatcaggatctggaggaacatttcttacaagtacctgcaaaagcgaagatggcaatacttcaaagaacaaacatgagtagcaagaatcaggtcaccgattcaaatttcagaaactactaaaaaagtgatatatctatcttgtatggggtatgtaaaatgctgttatgatcactaataaccattttccttaaagcatacatacatagaggcatcactcccaaatatattatgtttgcaagatctttgttcaaggaaaagagaagtaagtttctacatatcggtaaagataaacacaacagatagaataactcacagtgagttgatcaggacgacgactttctgctgctagatgtctcaatctcatattagccacagccttatattccatatataatatgtagcaagtccagaatgtaatcacgtatgtcatagttatatgtgcccaaaacctggaaccaagaaacttccagccgtcttagttgataaaatagaaagctgcacaataccatcacacactttgtaaaaaagaaaccctttttattgacagagtctgtaacttgcagataacaacagtccaccaaacttagcaaggtgctaacatataccctgaactgagagaaagcagtagtgaataatacctcggcgatcctggtggaacatttgatattgacagcttatcgacgttactgaatgtcaagtcatcgatattttctagagtttctccagtccaattgacaggaaccaaaactccaaaagcaagtagtgttatcggaacgaacattttcaatctgaaaaaccaacagaacaacctaagaaaca

SEQ ID NO: 518 - DNA, 136335 bp, Arabidopsis thaliana
gaattccgctgcaaatcaggttcttcagcaagcgccttctcaatcatccccatttgatcagcattcataatactacgcttccgtttcttcttctgcttctcaaagacaaggaaggtttcagatttctcatcctccttcacctctcctgatgcactgcctttaaatcgcttgctcatattctgaaccaactctccctcttcaaccagacccttccctctgttagagcttgtatctgaaccactggtttcaagattgctagcatctgcatcgctctctttcaacctttcaactgtgtctatctcctcgttcacgccttgctttgtcatcacaccttcaactcggacatcacaatcctctgaagcttcctcattgttaagattcagaagctcttttagcttaccagataaattcccgcccctaccttcaatatcctagtacaacataacatttgaaggttagcaaaagatctgtcttacgtagaaatttaacatacgatggacatgagtaaaaccttgttacacctacttgtatcagtgtaactaaacagataagccagagaattgtaaaaccaatgtataagagagcaaaaagctttttcaccttcacctgtacttgactttcctcaaactcggaatggattaacggctgtaactggtcacaaaacaccctgcagaagacaatataccggaaaaaaataatatcaacggctacataaaatagtacagctcgagaactacaaaactttaatgtagtcataggtgaaaagtagaatgactgaagaggctttatgttacctcaaaagcagaaaatcttcctcgttgagggaactagggatcaaggattctgcatggcgcaacagagaacctacatatacaaatatccattaaaaccaaatcagcaaaacatgtgtatataagaaataatatatgtgtctcgggatagagatacatacctaggtttctgcaaacaccagtgcctctctgtgccacaggagtatatgaagagcctggtaacatcttaatcaatatgcttgaaggatcttttcgcaatccactcataacattctgaatgaaacggttcctatcctgttctgcagatattaacagcgaatacacttagtaactaacaaacgaaggcaaaccaacaatatgatacagggaaatgcagaagatagtggcgggcaaaaaaatcaccttggcacacgttgggaacgaaacagtgaagattcgcaatcattttaataaataaggatgttcgttgatgtgcatatgaagacatggtaaggttattttgtaaactgagcttgaattgaggtgtgactgattgcccagaagatgaaaatacacttagaatccatccagctgacttaaacagatcataatcaacattcgcatcatcctcccttgaagaaagatcagaagagcacaacattgacaagaaatctccatgagagagacaaaataccgcgctgagaaccatgctctggagaaagatttaacatccgtcacacaacaaattacagaatttcagtaacgcaattaatttataaccataccgacgacagctcataaattgtatgaatcatatgtgccaaaacaataaataaaacaagagactttggcagaggcaggaataacttgatacttacaaaatgttcagtgaaaaaagatcgaaaatttgagtcatcagtgagcacgtcagccaagcgcatagcgttaagtagcacaaaacccatcgggtagtcaggagaagcagtagccatggaagctttagaaaggccaagcctcaataatttaagaacctatattacagatatatcatcactgaataggtcaacacttaacttcacatggataaactatcctggagagaaatgaggaacagaaaagtacaaaatgtcaatttaacaacatatgccatttaggaaactgtaggtttagactctagagcagagctgattatcacttagccaacacgagctttttgcagtgaggtttgttctatgactagttacaacgtatcaaaacaaataagattgtcaatttgtatggaatctttataaatagaagcgtcactcagtggtaaacctttcgaatcaagaaggaaaacgtcctatcgattttagagcagagaccctaattaggactaacctctgaggcaacagttttggctaaatgcaagtttcctgcatttgcaacctcgtcaaggaatgagacactttccgcttcaaacagatgctgcaactgcaggcacatgaactttggtatgagttgcagatagtaaatagagaaaaaaattgctaaatttcaatagacttacaattgaaagaacttttgctttcattctagatgtggaagctatagttacggttgctccaacaaattcaggtgtaatagttagtgatagtatggattgagctagcctaagaacgccaccttttccacatagctcctgagagaaaataccagaaaacataattctgagattcgtcctccataaaatcatcaattaagcaaaacaaattattaacaactcgtgattaatgtacaaacaccaagcaatagagaaaccttgtttttagcgacacgttctctaaagggtttgtgttggcatagagaatgaaggaactgcaaagcagcttcagcttgttggcagtggaagttaacctcctctacagaacttgcgcctaacttttttggggagtcagtttgtctatacagcaacttcgctttcaaagatatcacaacattgagaacagctccaaaagcactgtctataaacacatcaacctagatgaaaaaaaaaaaagaatcagatcaaactaatcccaaggcagcagaaacccagatcccaaagcataagcgtaattttcttaatatattttcctcacattggcatttcaaacacattatgataaggtcatagtttcatacccttgggtgtgcaagcaagacgagaacaagatcttgggagttaggagagataaacccgtgaaacaggtggagacaagaagccaccaatgtagcctctagtaacgattctttattcgaattacagctttcctggaaacaagcaacggacatgaattatacagctctaaaaagaaacaggaagagacaaaaaaaggattctacagaaaagaacctttctgttacggccaagagctattatcacaaggatcaccagatcaatcatctgtgctgataatttcacatcgtcaagcaagacctatcacaatatgcaaacaaaaaaaagaatcaaacattatgttccatggaggcataaagtccaattctttaaaagctcaaaaccacatatgaagatggaacaacctgctcgagtttagcattacgaggtgttaagtcacacaacgtctgcaacagtctgatcccacacagtatataacgagactttccatctttattaggagtcataaccaccgcaatgaggtgccgaggtaacattttcaccatcttctcaacactaatctgaaagaaacctaaacatcagtacttactacaaatgaatagcaaaaaactgaaaaagcaaatcaagtttaaaaatgcaccttttgtggtaacacttgctcagagttaaagcaaatagagaaatctccattatctttaagcagcttatgaaattccacagagtttcgccaatgcaaagcgttcacagcttgtaccatgtgtttaggctgcaacaatcgaaccatgactgtcactaatatgcaacagtgactgaatctagtttccggtgaatgaagagcgactagaattttgtctcgccgtgagttatagtgttaggttatgtgacagagaagaagatacgaaaatcaaaagcagtgaaatctacttcagggtatggtggcataacggtaaatgagtaaaaagaatgaggttaatttctaaatatattgacactgagcctcgctctttgtagtagaagggaaaactcagctatggcttatcggattatttgattccagcgaccaatttcaaaccctaacattttatttccaaatgttgttgaaacgatgaagacaatcacgtgagagtacacgtgacctcttttctttgggtctaaatcgtttaattaaagcccaacatagcttttacttctttttttaaagcccaaattgagtacagcaaaacgaacagtcactttaaaactcatgaagatttatttcaccaattgatcaactagaactatcaaaatagtaaaccattgagcatttagaagaaaatacttacttcagatatatgttttgacgttgatggcgtaattgtttcagacatatagtttgatgatgaggcttctttatccgatctagacatcgatcgagttttacttcgatcaatagattgtttcttgttagatgggatctagaaacaaaagtatgaataatagatattgcataccaatttcaaccattatagttctgattagaacacttaataaacttccacagctgattaacaaccacataaatttgaaaatctattgtaatttagtgatttaaatttgagatccatgacaaatatatgtagctttgataatctaaagatatgttttccatcacatgatttgaatttcgaagaaaagtttgcgacggaaaaattcttaacgtctgactcatttttccactattgatgtaagaaaatgataaaatcgttaaaaatcaaaaacatatatttcgtatccgtagatctaatagagtaaaatagttgtagttcaatctaaactgaaaagaaattgacgcacctgtaacaaatttctcggagacggcttcatcgcacaagaaccctagcggcggaggacttcacctttttatgtatgctaaaccggtttgttaataacaaaatttggttaactatgctcattaaaggtaaaaaaggaaaaaacaaatatacacacgtatcgtaatctaattggtctttacattgcaaatgaaatttatcccaacaatacattacaaaaaaaataaaattttggtttattgttattattttatatgaaaaagaaaaataattttattattataataataaaaagaattagtatcaacaaaaaaaaaaaactttcttagtttttgttgtgaataaaaatttcaaatatgtttaacaaaataaaaactgaaaatattttttaaaatgaaatgaaaatatctgtatactaaccttaatgatagatcacaaataatttaaaaagtgaattttttttttcttttcacaagagggataatttaattgagcaagataaatattacattgggctatggaatgccccataacacaaaagctacagaaatatattatgcccaactaaagcccatcagagaaaccgaacatggaagaaaatgataaaatcgttaaaaatcaaaaccatatctttcgtatccctagatctaataaagtaaaataggtttagttcaatctaaactgaaaagaaattgacgcacatgtaacaaatttctcggagacggcttcatcgcacaagaaccctagcggcggaggacttaaacttttttttatgtatgctaaaccggtttgttaataacaaaatttggttaactatgctcataaagggtaaaaaaggaaaaacaaatatacacacgtactgtgatctaattggtctttacattgcaaatgaaattttgtcccaataatacattacaaaaaacaaatattttggtttattattattattttatatgaaaaagaaaaataagtttattagtataataataaaaagaattagtatcaacaaaaaaaaaaaactttcttagttttagttgtgaataaaaatttcaaatatgtttaacaaaataaaaactgaaaatattttttaaaatgaaatgaaaatatctgtatactaactttaatgatagatcacaaataatctaaaaagtgaattttttttatttttttcacaagagggataattttattgagcaagataaatattacattgggctatagaatgccctataacacaaaagctacagaaatatattaggcccaactaaagcccatcagagaaaccaacatggaagaagaaatgtattatcttttgtctctatccaaagccacgtgtcttctattgtagagaaaccaatacacgtattggatgagaatccaaagttttcccgacttcatcctttgccgtcaaacatcgattctggtgaagattcgacgtcgattaacaaatcaaacatgaaaacttatgggttttcaccggttaaaacaatcaaagctccaattagagaaacaacagctcaaggcaatgttaatatgcgacggaaatcacttttgttcttcaactcaaatctctgatttgattcctgcacttctaaactcaaaaagaaaaacaggttggataataagtaacagaagcgaaaatcgctctatcattatcaccaacacatctcaaatgagaattattgaaaacaaaactaatttatgaaaaaacaaaaagcagcaaaagagcgctgacggcatagccgagcatcatcactatgaaagccaaatgatgtcggacaaaacttggccaacaccggaaagaactagtagttgctagacgataatccttatcggaagaggcagaagccgaaaagaattccggacggcatagtgattttcagctttctctctctctcgaagattttaaagagggaaaagagagagaaaacatggattcaatattaatagtgaaaatatttatatatccaaaataaaatgtcaatttgacaaagaaaaaaatcaaaaaatcaagtagatccataaatgaaacgccacgtcaacaaccaacaaccaattaaattgagtggcattatcgtagatttagagaagttctttggggtaaaacgtgattccaataaaagctacattagataaataatatccctagagggagaaaattttgaaatgagtggaccgttgctttgaaatccaaccaaaaagacaaaaatttcaaaaccaaacatatattatattaaatcacataaaagaataaaaaagaaagagaaaccttttcgagaatttcaaaaatcaaattcacttccatagagagagaagaagaagcacaaagtccagagagaaagagagagagaagctgcgaaaatctttcatagttctcaatgacggggctagtgatgatgactaaaggcggaggttgcggcggcggaggaaaaggaggaaggagaaaatcaacggcggaggaggaagaagaagaagagcagaatcagcaacaactgtctcttgttgagtttctcttaacggcgctgcgtaaatctgtggtttcttgccgtgtagacaacagacaagacgacggcggagtaggcggagggatttcgtccgccgttcatcacatggagatcggttggccaacaaatgttcgacacatcactcatgtaacattcgatcgattccatggctttcttggtctccctcacgagcttcaagttgagatcccatgtcgagtccctagtgcaaggtaatctctcaaaatttcactactgctttagaatctgaaactggatctgaaattgtagcttcttatttaatggtggattctctttgattaatgcagtgtgagtgtgtttggtgtatcggcggaatcgatgcaatgttcttatgatgagaaaggaaacagtgtcccaacgattctattacttatgcaggagagactctattctcaacaaggtcttaaggtaatgggaattggtaatcaattttgttgagaaatttgttgagaggagactgaatttgatatcttgcttttgttgtgtaggctgaaggaattttcaggataaaccctgagaatagtcaagaggaacatgtaagagaccaactaaacagaggtattgtacctgagaatattgatgtgcattgtttggctggtcttattaaagcttggtttagagagttaccaagtggagtgcttgatggtctttctcctgaggaagttctcaattgcaacactgaggatgaatccgttgaactcattaagcagttgaagccaactgagtctgctttgcttaattgggctgttgatcttatggctgatgttgttgaagaagaagagtctaacaaaatgaatgcaaggaatatagccatggtttttgctcctaatatgactcaggtaaaaacaaagttaacctttgttcaatgaataagaatcactgagtagttactaacatttgattcttgcattctctaactgtagatgacagatccattaacggctcttatgcatgctgttcaagtgatgaacttgcttaagactcttatcacaaagacactagctgaacgggaagaaaatgctaccggatcagaaggatattctccatcccactcatccaattctcaaactgattctgattctgacaatgcacaagacatggaagtcagctgtgaatcacaagccacagattcggaatgcggagaagaagaagaagtagaggaagtagaacagcatcaagaacatctcagccgccactctacccacgaagatgaaaccgatattggatcattatgttcaatagagaaatgcttcttgaatcaactcaacaacaatgctgctagagtttcaaacaccagtatctctgaagactggagtcctaaagcatttccgcttgtatcattcacagaaaacaaaagcaacactttgagctcaagcactagcgactaagattcaagcctggtctgcatttcccacgctttcaccagtgacaacctcatttctatgtagtttctgttcaatctgctgcagagaagaaacaagaaggcagaaaaacagctttgtgtctgtaaatcaatacagaaattattgtccaattcgttagggtctttagggattgttggtgagaagtctgattttagggttcaacaagggctgaacctgtctgtgttgactgttcttgttgttgttgtcgtccctctccatgtttgtgtgtctgtctgtttctgtttgttgtgatgtttggttttgtagcaaagataatctgatatttctctgttatttttgaacaacactgaatctttcttctaaactctaaagacaacaacagatcattaaaaaatgatagaagaagaattcaatgaatttaatgttaataaatcataaaatttctacatgagtttcaataataaacataaattacaaattgttatttgcagattaaaaaaaaaaagaaaagagatgatccagtttggagcttttgagttgatgggacattttgacccacaatgagatttggatctatacagatgcatccattcaagatcggtccaaatctttgaaccgggtcgacccataagcccgaatatgttttttgtttttttctgttatgaactttcaagttgaagagaggaggagttttagcactttcaggagattaaggaaggattactactcggttggccattgttgctgtctctcttaagctggactttcaatttcttaccgcctaaatggcgaccattcatcatgtcaatagcgttctgcgccgcggcttgtgagtcatagctaacaaaacctgcaaccaacagcaacagcaaaagaatgctttctttctaccttcacaatgaaccagttttaaaagaggaaaaactagatcaaaagagagcttaccgaaacatttgcttacaccagtggctttgtctacaaaaaccttggcactcagaacaataccgaaagattgaaatgcagccgcgagttcttgatccccgaactcccgaggtatgttatagataaacagatttgcaccttctggacctgaacaaccaaaataatctttcaggtcttaaaagaataagagaagaaaactattaagaggtcttaattacactaaccttcggtttgaaccacagaactcaaaccaatgcctaaaggtgttgacatgccaggtgatatagatccaggagagctacttagagggcgaggactaacaattcctctgggataagcaaatggaaaaggatgacctcgcatagcaggataaccagatcccatgtagtttccaggaggcataggaaagtttctacgggccaaacgaggcggcacagagtcaggcgatgttccttgcaatgcattgttattaccttggtttggttgtgcaatcatattggaaaatgcagcttggttctgaattggtggtagcatgtaaccataagttccaggaggctgctatggaaatggaaacgaaaattttattagttacaagattgataaagacaaatcttatacagcttgaactaacggagtattaggctttcttgcttacatgataaccatatccattatatggtggtacataacccataggtaatgctccaaacaatgagggatttgttggatcaccgttccctagtcgggcgatgtgagattgagccttttgaagtcttcttgtgtgtctttctcgttctgtgtctgcccatttgacaactaaaggaacagttgaaccctaagaagaaaaccaaaagaaaaatgatggaattttcacactacagatttacaaacggtaagttttcaaagtagcaaaagcaattacctccattttatgttttccgttgatagattccatggcggaaacagcttgttcttttgtctcatacttcagaaatgcacagcctaaacatcgacaacaaacaaaaggtcaaaactaggtaaagcaaactagtgaaaccaaagatcacaatagcgacacagagatagattcaacctttgctcgtttgttgagcacctcttagaatctgtagatcctttatggtcccgtacttggagaataaagattgaacttcagcttcagagacattctttggaagcataccaacaaatagcttatgctctggattgcagaatacattaatacaacatccatcagttgatgataaaacaatgaaaatgggtgaaatagagcacggaatcgcgttacctagcctttctaattcgccatctgcatactttacttgcaatagactgttagcctgagcaaccaaaagaaaaagttagttagagacctgacaaggatctaagcatcctaaatgttacagtcaaaaggccgaagaacacactgaaacaaccatggtaaaaaaacactaatgccaacatttttcaggtttccataagaacaaggatcaaactaacattttgcttctattaaagagtaaaccaaaagtgtttctttcgcattaatctcattatagcaatttcctagttttaccattgattgcactttcttgggtttgaagaaacaattccaaaacaatgtcaataagactccaacgaaacagactcttaaatcgaaagattctgattctgattcgggcaaaagaaattgatgttcacctaaacagaaagaaatgcttcgtgcaaaacatatatccaaaatcagaatttgccaattctggaatccaacagaaaccaaaacaatgcagttccaaaaaccagatttaagaataacattttttaagaaaaacctcgagattctcaacgaaaaaaaaaaatgtgcgaatgaggaaatccaataattaaaaactaaagaacatcaaatcacattcaagcatctgaaagaagaacaaatagtcagagaaatgaaaaaaaaaacaaaaaaaaaacaaaccccaggcaatgtcttcttgttatggcaagcattgaccaacttatctgcttcttctctcgatggacatagcagaaaacaacatcctgaaaatcggaagattaacaaaaaaaaacacagattagggtttcggaaattcaaataaatctcaacaaatcacacgaatcaaacaccacattctccaatcaaaaactttataaaaaaaaaaatcgaaaacagaggcgtgaagaagattaaaaaaaaagaaaaggaaacctcgagaggcgcgtgtaatcttgtccttgatgatattgacctcgtcaacgacagcgaactcttgaaacaatgttaagagttgagattccgacatatgtttcggaatttgtccgacgaaaagctttacgctctcttcttcttcgtttttctccctattctcctccttcgcttccgccattgttgtctccgtcttctctcttgacaaaaaaaaaaaaaatggtcgtcttcgtcgtcttctctttctctcctctgagttttttttttctctctctacaattttttttttggtttctaaaaatttatttattttagttgcaagaaggaaaaacaaaaaaaaggaaaatcaattatggaggagaggatgaagaaaaatggtggaatttgagaagttgggagaaattaaattataaatgttgacaataattgccctttctgttacgagttatttacgatattgccattacagctgtacatagaaggaaggagaaaagcttttacgatgagagggaacacttaagattgttttgtctcgttatgggagttacgacgaaaaagactaaattagccttcctttttacgcgcgttttattgtgtttctttttctctctctatctatctgttcgaaaatgtgtatttgtagtcaaacctgtattgttttgtttttaaaaggaaagctgtcaatttttataaattaataattagacaattacgatctaaaaatgaacgagcattttgaacaatatgaggtgttggaacgagcattctacttatagaataaaatagtttaggtgcagataataggttaagtgtgttcaaaatttaaattactttagtgtgagctattattggtctatcaacaacaaatcattgataatttaaagataaaaaggatgagaaaactaaaattttatagttttttgaactttttagtatatatatataatgtttaacatagtttttaacgatgtcgtattcaaacgcgacaaatttgttaaagagaaccgttttatctttttcctaaaattagtcaaaacagttcatttgcgtcgtcgtattctcttagccgttaggtttctaccatttgccaactttcaacaaatattgattcattttccatcatatataattttaaaacaaataaatacaatatttatttattgtttggataaaatttcatacaaaaatatattggtatctcaaaaccataattttactttttacagttattttacaattttgtttccatatattttgaagggcttttttgtaattttttataatacggaataaatgaaattcaataccgtgtttttagacattttagtatacaaggaatgtacataaaagttaaaatgcattttgactaatatcatagactcagagtcaacatcttcattttaagacaaccaattaacttttgagaaaatataatttcatatattttgttttggcagttgatttatattggtcgttagattattaactagttgtatgttttactaaaaagtattaatttattgtctatcttaaaatatttacaatagattatttgtaactaatctatatataaagttcacagaacaatatattgatgtctcatttttacgttttgtattttatattttgtgttttacatcatttttagattatttttacattttgtattttataagctagttttattttcatctattctaaagtactcatgttgttacatcaagattttgttgaaaaactttatactaaaaataaatggaatatatatttaagtttaacataatgtacatgagaaaacaaaagtttacattctcctatatatctttcaaaatacggtacactcaatttggagagagaggaatgcaagaagacacggtgaacaaccataaccaccagatcaagatgatcgacaaaaatgtgagaaatcgtttaagtacaattcggggtataggggaatccataagtatgaagaggatcttcaagtttggtttgctacaagacgagcttaagttccaattgtgttgttagaatttgtttttgaaatcgtattcattaagctgtaaaacatttttttctttttttgaatataatttaacaataattcaaaaacacaacaaaaaacaaattcacgaggtcatatttaaactcgagcttttccctattgttctatcaatattttggtttaaaaatatattaaaaaaaagatgaatcaaatagcttctttttgaacttcttaatatacatgtaattatattctgtttaaaatttttttatagcggtcaacggcatgactattctgttcgaacattgccagtttacttctaaatatagatttttgggtttcaaaatttgaatcaattatctttatattcacaaaccgtaattgtaatagtgtagcacatcacgtagcttcttcaatgttcacgtagtttcaagcaaattcagaaaatcagctaatgtggctaaaaaacctttttttgtaaagacttaaattcttaaataaaattcagtttgcacgagaatttttttttagcatatatggaaaatacataaaatttaacatagtttgatatattcatctacaaaacagtttaaatttttccaaaaaaaaaatagataatatattcctcgatactaaatatggaagatacttacactaataatataagaaatcaaggagagaacataataaaatttaacaaaactttaagaaaaacagtataataaaccaatgggaacatcggatgggacaacccaacgaaaacatgcagaaaacctctagaggctcgaaaccttttggattcatccactcatgaatatgaaaaatgcttcaatcctatatttgagagcaacttcccgcaaatatttttgaaggaagaacctaatagcctaacctaagaagcatgaagttgaaaaaaattggttttttttaacctatggttttgtaaaaacaattatatatgacagaatgtaaaaatctgacatatgttcaccatcattgagataataaaaacataaaatattttataaataatatttgtacatagcaaatattatatggtttaatatttccttctccaattttgttatttccaattttgttttttaaaagaaaaaaaaaagttatttccaatttcaaacactgtcagttaagtagttataatggtcttgcaaatatacctatttatgtacacaaactgccgaataaacctaaataactatcaacttccacaagttgcattcgcattatgtatccaatcaaccaataaaacccttaatactgtagctaattcttgtacgacttaattatgaggtcaaggagcctttttaaaagtttaaaagaagaacattcaaagacttttgtaaatggataaacacgaaaagagtttgaccataggatctaaaaaaataatgaaatagaagcacaacggaaaggtcactgtcgaagggcaaaatagtcagaaaactagaatggcaaaactcgtaaatacaagcgaaaacagaggggcaaacacaagcatgacagactgtcccgccaacgcgaccaaaaaaacaaagactcgagcagctccaacttgttcctttctccaacgccacaaaattaaatttctcatatttccaacaaatagacccctgaatttattcatcttttctgttttggccctacaagtttttattgtgcatgtttgtcaaagcgtattcttgtcatttgtcaacaaccaacttccaccataactaatcgaattagaattatttgttttggataattggttaatattcgattataagaaaacaatttgtattcttcgtgatgtagactagtataaaatattagagtgacattacactttgtaatagagaagtcatttcaacataaccactacgtatataagtatatttttatttggataaatatcatttcaattccaatgcttatccaatcctaatcaaagaaaaaggctcaatttccatcacgcttggatctagatgacaataagaacataccaacttagagtacttttttctttataataaaaactgaaacaatctcgaatcatcatctttgtttttggttatagaattagtgaaatgatgaatcatagagaacaaattgtgatgcgaaaaattgtacaatatacataaaaattgtgaaatgtcactaccaaatgaatcatttgattagaaaaatctcacctagagtgaatcatttttaaaaaaagaatggagaacttatctgaaaccggacaagcttggcacgaacaggtcagtggctacattgtgtgaagtccagcgagtgatctaagcttctcgcatagtatgaacgtgatcatcgtttgtggcccgagccgtgcgaaaattgcaaagcctctgtgtcaagtaagaaaacataatacatttttatttatttatgtactacgaattatataaatatatcttcatgaacaagacggtttttttttcttcaccctttgtaaagtgccagaggaccttctttgcgaacaacctgaaatatcatactcgttaacgatcaacgcaagcaaacaagcaatgctcagtgagaatgtattaatagaagggcttgaaaacattaccttgtaaccgcaatgaaacccgtttctgtaggttttggtgctttcagaaccttgctgcaacatcaagcgggttttaatcatgtccatgggtgcggttatcagtgtgcttactaaacctgcaaccacacttgagcttcattcctcaagtgctaaagtaagttagtttttgacgcttcaattgatttttgtctgaaaaagaaacagcagtaattactgctaaacttttaccacaaatgaagatgaaacccttcttctaaagaagttcgtttaaccagaatctgcaattacaagaaaatttagaagctgaagtgttagaatcaataaatggttgagaagcaggattacttgacaatttctcaatttcaaaacagatcatggaaattacttcatggtttttaaaaagtggaaaatagtagtcttagaatatgacccgtttggcttcatcatatgttgcaagctgtgaggcagttagtgctgcagctctaaccatggcaggaccaactcctttccataaagctcctatgccttctttagagactatttcccgcacttctgcaatgggaactgcgtttggattcatctgcaaccttacctaacgaaatgcaaaatgaaatgtgtcttaaaaaccgaaaaagagatctaatgaacagaataaaaccaatacttgaggtttcatctaccttaacaacttcaacagggttagttaatgcagtggaaaacgccccggcgaatgcgcctgatgctatcttgaccaagacattggtagatccaaatgcccaatcaaaagaaaccttggtgggttcatataatcccaatctaagacctccgtaaagcactgatctagtgagagcaggagtcaaccccaagtataaagacctacgcccttcattcttcatcagttgaagaaagattccagtctgaaaaaagacatttcaaaaatacaaatgtaagttaagttaacacatccccagtaacatcaataggagcagttctctagaacattattaccattccaattaacggacctctttggccgacatgctgcatctgcaatctcactttcactacatctggacaacgaaaacgacaagaataacacatttaagaagagtgtgatggaaagagaaccattttcttctcagtccttaaaccttaaaatgccacattatgtaccatagtagttgagcagagacatacttatacactgacctactacaagagctagaacatacagctacattatccaaatatcactatcgaagatcgaagaaagttgaaaatccatcacaagtgctagaaaacatccacagaaaacacctatctgcagcaaattgcagcatatcaaatccaaaattggagccaacggttctaattcaaacccaaaattggactactcatacaaaactatgagtgaagaagaaggcatcaggatctaaccgagaggatgagtcacgccagtggccaatgcgacggagattccgctaatgccaaaatgagacaccacctttgaaaacggcggaatcagattctgtggcttcctcaattcttcattcccttcaacaactacacaaattccgcgacatttcagccaaattattgaaatataaacaaaaatgcagaaatataatctcgaactttatactaaatggagaaaactcaacaccttcatgttttagtttatgcgaaagcaaatcaaaagattcgatgatcttgggattgaaattgaggcatatacagagagcaaaaagatccgacgaacctgggattgaagtcaccggcggggagatatctccgatcattttgttttttccgttattctttcttgggaaatggtctgtttatacgtcgtgtgaaacgacgtcgctttcagagataattctccagttattgatagccgttagatatcataaatgaatctggaccgtcggatgatatcattcttttttttattaaagtaggcgaaaagtaaattcgactccctctttgcactttcttcttcccgtcgctaccgaaagcttctgtctctctcactcgcagggttctctggaactttctgaacgatgccgaggtatagggtttaagatcctcagagttatactactgatacatagatagttacgtagttcgagattaggttttttaattacttgtttgattttgattttcgcaggtattactgtgattattgcgatacttatctcactcacgattccgtaagtttcctcctctttgttttattgtcttccctagtaatcgtgaactcgttttaggtgatgaattcgatctccggaggtgtctattaggtttccgatttggattctagtttaaaaccagtatgctatttacatatgtatatcacgctggttcccttcttgcctttgactggatttagctcaatttagtacttggaatcatggttttgtggttaagctgaaattctactatacgagttcgatttttgttttgtgaagtgaacttagatccaatttttgttaccaatttatagttgcattatgttatctatggttttgatgtttttgtgtttgattaagaatgtaatcatgtttcacggattgtattgtaccgtcttctcgtattagtaaagttttatatttgatattttttcagccatcagtaaggaagcagcacaatgctggttacaaacacaaggtacataaagaagagttcttttgtgtggttgtatacatggttttccttaatgtatgttaagagtttgatgatctttttcaggcgaatgtgagaatatactatcagcaatttgaggaacaacaaacccaaagtttgattgatcagagaattaaggaacatcttggccaaactggagggtatcaacaggttggtgctgtgtttaatcagcatatgcttgcaagacctcgccctcccatgatgctaccacctggaagtatgcctatgggtatgcgacctcctgttctgcctagacccatgatgcctcctcaaggtaatttctgttattaaattagtttcccgcttgctgtgcggattcaacattcgaaagttttagtaggtaactttcatagtaatctttagaaaagactacagatgaaatagagtataataaagaacgtcatccatataggtgatttgagaaacttgacattgcatgaaactttaggcagctgatgaatatgagctttggttgtcacttgctgtgtatcatgactcttcagacccttacgaaatagatttcattcatttaaatcatgtcactcaaacatcgattagtaggtttcatacatagatattcacatcctttttttccccacaactgtttgaagtgaaatgtaatattgtacatttgcaggttatatgcctcctccaggagtaccacagatgatggcaccgcctggtgctcctctacctccacctccacaaaatggtattctgaggccaccaggaatggctcccataccaggtcaaggtggcggaccaccaggaatggctcccataccaggtcaaggtggcggaccacctcccaattataatggactacctcctcctcctccttatcatacaaatccagctgctccaccaagtggtaatttcaacaatccaaacctcaacaatccgaatcccagtgctgaatctcctgaaagcaatgagtagagttagtaggtctgaatgaatcatttttctcctgccaaaaaattctcagagctcttgtttaacacaatatcctaccttttctactccaatttttatgaagaggtttagaactaacgtatgtgaaatgagttttatgtgttagatgattgtatccattagagtcatgaaaaggaaaatctgaggtttcttatctctaaaacaaactggtttatgaaagatttattaaaaggcttcattcattcattgcttgtaccaatcagtagtagaaagaagtagacatgctgctgtaaacttatgtatttctttggttccttttctctgaaattgagaagagacagtgcctgaaacaagagaggaatccaaaaattgtaaggagatttgcgtttgaccaatttatgttctatccattaacgttgattggttcgtagttacacaaacacacactacaattataatctctgattttggtgataatgcgttgcaaacctggcatattccagtttctgaatcacgattccattcagtaaaagctcagaggtgaaaattacagctcctacattacagttgttaatggaaagatgacattaattaacttctaattgttctttcttagtaattttcatagtgtaaaattggcattgacggttaccttgattaacgaaaggaagacagaaatctcgatcttctttgcaagaaagaatcaacacatcttctggaaagtttctatcctctgcagcaattatctcacttgcctccactacctgataaaggaactcataaacaaccatcctgaagaagtgctaagatgtctatgaaacaaaatctctcaggtgaagtgagttgttcgtacctgcccttgagtcatctttactaaatcagtaatcatacctctgcttggtttaatgctgggggtgatgcagactttaaacccctatgaataaatgtgaagttatatgatttcagatattcatgaacaaaggatcttttgaagctctgataaaagctcaaatgagatagattgtgaccttaagaaggggatgctgcttcgcacgggccaaagatgtaagcaagcagaacccgtctttttcctttttgatatcccttaaaatgtaactcttctcatctatcaagcatcttgtttgtgcacagctctcgagccatataggcgtaacaacaaatttaccaagagctatggcttccaacatattccttgtccgagcaaatctgtctgctatgaaatgtgttgaatctgctgatgaagatgccggagaaattccgagtcgaaccattatctatggaagacacgagtgatcaattacaaccaatatgacgtagtatatacttacactgttaaaattgataaaaaggaggctagaactataaccttcttctgctgcttgactgtttcatcatccagattctggctgaataagactcgaacatgtgccaagtttcttcgtttccttaagtctttccacacgaagtcacctattttaccaggtcctccaaggctcgtagtaagctccttctgaaggaataacctggggaaatctttattgcaagggctttcatgacttccgtcatatattttccttggagaagcatgatatgcaacattcaagtcaatgactcctgattggcaagaagaggcttgtcttgtcccacttaacgatcctcgtaagctgcttgacaaagtgttggtttcacttctgtctttaactaaactagcaccccaagatctcctaggtgggacgtgatgtctttgcataagacgtgatcttttggctctgggatgcctccattcacataagttgagaagacatgttttaacagagacgttagctctggttctctcttcattggtgaattttctcttcttcttagagtttctttccctgtgtggagcagcactaaacagaccattcaatttgtctctttcaggttcaccctcaatggtatcattgttccttctagaaagattactaacttgatccctcatttctgatacactcccaggaattgggtctgattcacaagcttcttctgtagtacagggagcatacactaaagcactcattgcttcagcagcaatttgagtgttaataccaatgtcaataaagtcttcctcgggttccaagggctcctttggcgccttatcctccaactgagcatccttctgtgagataaacataatgccctcactcaaacccgatgcttgttccatcttgagatgctttgcagaactgttcttcataactctttgtgtgggatgacttgagacttttctaatatcacacggatccctagatcgtttcttcactccaaaatcatcacctgcaacctgatcttctcttatcttggagcatgtaatacttgcacgagtgactggagaggttttagggtcactcacatcacactgatcactactccaatcaaagacactcattttcctggttggacttctgctcataattcttttggccagagattgacatccttttgcacctgatacaggagatgacttccttctgcaactattaaccgggagatcaactggagacaaatttagatctttgtccatcaaaaagtggtcaacaaaaccaagggcatctgcttgtgttgactctcctggttcttgagaatccaaaaaatcaagccctggaccatggctactagcagtaatccgcaatgaaccttggaaaccggtcactgtatcacaatttgattcttgcttgccttgaagaaagagatgtagtaagatttatctgagttaatacaaagaagaagatagaggcaacataacaacacaaggatatgtttacctgtttgacattcgtgatcatttgatccatcagactccaaaagtatatctccagctttcgggcttagctccggcaaacacatcggctcaccagcagcgacacttccatcttcatcatcactatcatccaccaccacttggtcgagaccgtaacattcctggttcagtgattcctcgtcaccacaatttccgttatctactagctccgtatcgtcgtagagcacttgaaatggggtttcaagtaacgagctattaagtactaatgcttcatcaatcgcctctgtatcttcaatttccccacatcccaaaatccgattaacctcaaaccctaagagaatccagaaatgaaattggtactacgaatctatcacctcaaaaatctacaattatcagcaagaaaaagaaaatgtaaatgaatcgtaatctcaaaactcactatgatccgaagaagctgaaggagactgcaaatcggaggcgaaatcttcggtttccataagattgaccatcgaaactcgaatttcaatgctgtccaagaagaaatggaatcgctagaagctcccgattcgtatacggttggaatcagagaagaaaccctagaggttccattggtgctttagtcgaggtgattggcgggagagagacgagtacagagctgtgtcgaatggttttgaaaagctcagttccgtgaaacgatattttagttactatatatatttaattatgtcaaacgatacatcaaatagggcatttggtctagtggtatgattctcgcttagggtgcgagaggtcccgagttcaattctcggaatgcccctctattatcttttgttttttgggacttgaaaattcttacctcattttcttctcagtatttccactatgttcttatccctttaatcttcttcacctatgttgcaggaaaaaaaaagattatatattatgtcttctagaaggaaaccaaactacttattcgacacctcataaatgctttgctatttttctactctttgtgtgcgatttggtgaagaatctttgagaatttggtcaaatgaacatttaagaatgttacaatttatcgacatgtcaaagattggtaacactttggttttcttttccatcccatgaatgtgaacttgcttacttaaaatatttaactgtaattttataacattactttacgatattaattaatttagatttaccagcaacacatggtattaggattgtgtacctttgtaattgttgatatatgagtcacttgttctaagaacacatttcattactttggattttgaaattctaagttgaaaatctttgttttattttcttggctagatttgatgcgtgtcataatctaatccaatttgaaaatatgtaatatgttgtataaaaagttaatatgccaacaaaaggatagatcttagttggtggaatcaacaccattagatatcaaattggtcgtatgcaatgtttctgtataatatatcatttgtctactgaataatatatatcataatgttaattgttagctttctgtcgggttatgaagatggtattggtaggtacgttgtataacataagaattgaaaacgtaaatattattcattagtagacagctcataataagcacacccacacatgcatgccacaagcaatagaggttttttaaaaggttttcttcttttaacaaaagaaaggcctttctttgatttcaaattttcaatgatattaatattgcaataaaataccatgatataacatattttagatttatattaatgatttatgaccccaaaagaaaaaatatattaattaaaatatgtagttcaacaataacctcagcctatatggctattatacaatcttgttttgggaagaaatcaacacatgcttatgaacttttatgttcctttttttgtcttcattagcaaaagataaagggatcaagccttttttacaaacacttgcatgctagtatgcttcaggttcaatcaccgccccattagattctctctccctctctaaagaccacacctttatgttccctctatatctatataagacgcaaacacagggaccattctcttcaaagacgagaaattataagttaggaaacgacaaagaccgatctatatatatatctcggagcaatatagctagcacaaacatgtttcagattgggtcaagctccttctctatatatacttctgatccatttctgcagatttaacaatgacctctcttttgttctaacttttcttttctatgtatgaaatagaaaaaacgcattattcaagaatgtgagcaagaacttccttatcaagggaatatcctcatcctcatcatctcattcaacttcaaggcaagtaccatcttaatctcaaaatctgaataaaaatattcattgtaagttgggataaaggccatatgtattctgtttatatgtgaatgacagggatatacaaagtaatttgctattacaagttggtttctctgatttgtcttcttccacaaatcttatcttgaagttagaaagcttttactctttccaccagctaagaaatgtcaaatatgagagtcttaccaaatactaatacctaatctatagttgttatgttataggaagctagaaggtaaagtagcactcatcactggaggagcaagtgggattggcaaagcaacagccggaaaattcatcagtcatggagccaaagttatcattgccgatatccaaccgcagattgggcgagaaaccgagcaagaactcggtcccagttgtgcttacttcccatgcgatgtgaccaaagaatcagacattgctaacgcagttgacttcgctgtctcgctccatacaaagctcgacattatgtacaacaatgctggtattccctgcaaaacgcctcctagtatcgttgatcttgatctcaatgttttcgacaaggtaatgatccataagaacatgtgaaagaacaaatgtgtggagcatttggttttatctgatcttatttttcttatgttctgcaggtaatcaacacaaatgtccgtggagtcatggcaggaatcaaacatgctgctcgtgtgatgatcccgcgtaactctggatccatcatttgtgcagggagtgtcacggggatgatgggcggtttagcccaacatacttacagcgtctcaaaatccgctgttatcggaattgtaagatcaacagcttcagaactatgcaagcacaggatccgggtcaactgcatttctccttttgcgatcacaacatcattcgtgatggatgagatgcgacagatttaccccggtgttgatgactcaaggctgatccagatagtgcagagtacaggagtgttaaatggagaggtttgtgaaccaaccgatgtagctaatgcagcggtgtatctcgcttccgatgattcaaagtatgtaaatgggcataatctggtggtagatggaggattcacaactgtaaagacgttagatttccctgcacctgaccaagtgaagtaacaaaactcataatatacaaagaaaactgttcttgaaacttcaagtgaactagactgcactagactagactagactaggccggtttctattctgtcaacaatcaaatttatagctgcattagcggatgtgaaagctccatggaagctttcttggtatgaaatggaagttaaatcttgagccatcttcaacaaaatctctcccatgtcactttctttctctagcagtgaactatagtaagactttgcagctacttcactgatctccacattggttggctcagggcaatactcatcatccaaccatttgtgcaaagttactctcaaccattcagattcctgatcaaacatttcacaatcagcaatctaaaaaatcataccatactatcaaagcaagcgactttttctctgttttctcataaattaagcaaattttaacaagaaacagaggaaccctaaatcagcattcgagtaagcaatgttggggaaatttgaaatcagaagcagaagaattgcaaaaccctgaagtcaattgcttgaaaaaaattgaaattgacgtttaatggaagcgagaaagcacctcaatggctctagaagggagcaaccactcttctggaatcgtgagggcttgtacggctgattctgagtcttcttctccttcatggatcgacgattgagacttttggagtttcaaagacggaaatttcggcgcagatgttatcggaaagctgactgatcttctccgaatcgtcgccggaaagctgactgatcttctccgaatcgtcgccgggaaatcaaggtgtttggttaatgataaaggatgtgactttacgacgtttcgagttacggaagagcaaacccacgaactcattcttcgtctcgtggtctatctacacttcacttcactgattatcacaaaaggctctctttggtggctgcaattgaaatttgagcgaggaagataagatgacgtcatattttacattaaaataatgctcgtgacgtggctatcttatacgacgacgtttcattgcatcatgaactcatattgaattccaagtttgtttccaacattccatattcaaagattaaaaaatgtacatagataagagttttgagttttgacccccaaagaaaaaaaaagttgagataaaacgaaatcttttagtacatatcatcaaaatatctaaaacgaaaacattatgagaaaatagtaacgaaatcttttagtacatatcacccaacctccaataggatcatgagaaaatagtaaacaaaaacgcaaaaggtgataagaaaatatttcccaattgaattggaagcaaaagcaaaccctaactaaatttgcaagcaaccgagtcactacttctttcttctccttgtaaactctgttttcttctctaagtatctccaactcttccttcattgtctcatcaccatcgtcaaattcaacaatttggtctttttcagtttcagcttcaacatcagacgactctgtttcttcacacacttccgatcggatctcgtcgcatgatgatgagttatggctgtccgaattcagagaagaggttttgatcaagagatcatgcttctgcgccaaagagcgatgtgaacggtataattcctcgagcaattcaatgagctttggcttattctcgtaattaatctttgctcgtttcatcaaggaatctccttcatcttcaacctcatcaatcacgctcagcatttcctttgtctttgaatcaagctctgttattttatgttacaacaaccaaattagtaagagagcttttgcgattagggttagaacttgaaaaaacgtagaaagataagtttttgagttaccagagagagtagagttaagccaaggcgaggaatttgatgtgttgtgatttgcaccaatccaccaccattttgatgtctcacccatcgtcttcacttgtaattttgcacctacttcaagatttttgacagtttaattaatgcaaatagagatttcaagggtgacgtatcaatcctcttttctctctttggcctctctctctttatggtttaaaggtggtgtgttagagcatgtccattggttagtttcttaaaaggaatccttaacattttataatactaaattttgataattttatagtttaggattgttgatgaatccttacagtttttaatgtccaatggtagaatctttaaatgagtttttttaaaaataaaaaaatatttttgatataattataatttgatataacttaataattcttacaaataaaaattatcaaagcttcagcagccaaagctttttttgctgatgatgtggtaaatctttgctaaaacagtttaaaatgctttctcgacattggtggcttcaagagcagatgtttccaagaaagagagactttctgtcttagctagaatctgaccatcttcctcagctatcgttcttattctctgtgttgttctgttctttcattaagtttcttccatcttcctcttcatggttgttgttgctgcaactgtcttcactactaccacagatgcttgaaaacatatgtgtactaactttactatttcgtgccaagtcctgcatttgaagtgacactattatcgtcaagcaaaacatcataaaacatcaattcaaagtgtcgtcctcttaggtacagattgaactacaatggttatatttcgccaaaagtaatagggaactcatgcacaagaacaagtgagagcaaaaaaaaatcagagaaagacagtctcgagttctcgattccatcacacattcttataaggaagcttcaaaggaatgtacactacaatggtgagcttaaggcatcatttccacatagaaaatcttaaagcaatgttacattgatcacattataaaagaactcaaacacagtgagacatcactaaaacttctcagaggttatcattctttcaagaatacattaactaacaagaaaaataaaactaattaagagggtttcagaacactttaacatgtgaccgtctcagaaccaaatcatcatccccacccaaatcattcaaaatctctttatcaacaatctcatcaaacccacctttctccattaactcaggcacgtgatcgttaagtgacgacataggagcctcatctggtccattaaacacaccatctcctccattgccaagctgtaaaacagaacaaaatttagcttaacgaaatcgaaggaaaagagtagcaagtttgatgataaaatgtaggagaaatatacatgtgattcaacatcgtcatatctttccctcagaccttacatagctctcttccacatcctcatcatcaaaccttagcaactaaaacaaaattgtatacttaagattcattccggaacaaaatttcagagtcaaacttgaacacatagtagaacaagtctcagatcaaaacagacttgtaatcgagtgaaatttcaagcatataaccacatatattaaccctaaattgctgattagatgactcgaaaccatcatcaaataatcctcacatgaatacagagagattcttaccatgagaaagagattggagcaaagagactgtctcccaatttcatgatcgatacaccatagtttcttatcaaatcgattcaaatcgcctgatttcgtcgttagagtaaccaaagaaaagagataggagaagaggaaagaaaaacacgcggagcatgatttttttttgttttgcctaaattttcatccttagaagcaaccacgtttgagtttctaaacacttctaaaaaacctaaaattaggatcgatcctaataattttgttgggtttttctttaattttgggcttttattctttaggatttcagataagaagcccattagaaacactgatggacatagtcttagtacttggactatatattgaattaattcataattgagatatacatggaaaaactaaactattgatgaaaaaaataaaatgaaaaaactaaactatgcaaccgtttgaagaatggaaaaactaaactatatcaaggaaaataaacagtttcttctttcataggtgatattcataaaagtcattaagaaaattttaatattatttataatgtttgtttaatatatatatatatatatatatttttctttcttttcgcaaatgcgaccaatctgaggatgtcacgtcagatgatacttatatcaaaaacatcactggactgatattgatcaaggtcattctaattattttatcaatataaaaataatttttggacttgtgatattctataaatatcacctatgtacatgatctaacgaacaagagattgaggagatggatgatgtaactccagacgaacttgaggctgtgtcagtattgttacgactaccaaaccctgttttctttgatcaagaagaagaagaagaagacgaagaagaagaatatgatgaagaatccgtatgtgaggatgatttggaagtaaaatcgtgtatgcaaacaaatgaaaataagggtaagaagagaaaagtcgctgaggtagacaattccgaagaaaccctagagtgcatgcgcggttgggagacactaggccgaaaagtaatcctccgagaagtattgtccgtgatccagatgctatgggagcttgcagcaaaccaatgtgaaagcagttgatggatagcgacgtgaaggacaaccaatacaggctcatgttagggaaggagccggtgaaaaagatgatggatgctctgggaaaaacagagaaacttgggactaaagggcttaatgtttcggtgtatggaccaaacggagagaatcataagatggtgttgaagatatggattaagggcacacctgttttgacgtcgggatggaagaatttcgtgaagagttataagctcgagaaacatgttgattttctcactatttggatgtttaggcacaaaaagactcgggagatttgcttcgctattgattccactaggtttcctgtaaagggtacgctgagtaaaaggatcttgcaggaagtcttcaagaatccataatagggtttcatttcatactttcatgtgcatgtgagtgttttcagggtttttccttttcttttgtatctctttaagaacatcattattggttgtttcttagattagttcttagactaggagcatctcattttctttatattaataaagggagttttcaggttttacaaacatgaaatcgattatatagttttgtaaacaaataaaaatagcactataaacggaattgtactcacagagtcacaggctttccggaaactacttaaagcttagaactcaggcaatctaagaaacagattatgtaagtccaccaatctaagtttagaaaatttcatgatccatatttaacacgattcgtgttacggcaagtaattaactttggttttgagtctcaaaacatcttggttcattattcttgaaaatttctaaacattttggattgagttttgttgttaattttttctctttagtttgtctatccaatacatcctgctgtttaggagaaagacggataatatgagaattggtagaaggaaaactgtatttactcatgactcataaaagggaaacaaagataacataagacttccacattacatagaccctagttaacaccttccacttgagagtttttctaaacctctgcattatgattcaaccagagattcaataccaaacaaacatcatcattgttatcaacaaccaaaatccttgataatgtcaaattcttgatcatcatcatcatcatcaaaaaccaaaccatcctacaaaatgatggaagcaataacatttataagaatatgatctcactaacatttatggacatataaacaaacattaagagtgccttagaatcaacagccgaagatccatgacaccactttcttcagaagagttacatctggaaattaaataaagacatgattttgttccttttggctgaaaccttctacttgggttagatactcttagacactttaggcaaaacctcacaaaactccaccttgccgtagtgtcgaatcctttacttcacctttctagattccttgagttccatcttggtccctgagatcttctcaggattgtgatactttgaaaagctccttatctgcttgaagcattctccctgttgtcactttagtgatattctcagcttgataagctttttcactcctaacaaccttgaataccaactctgcaatcatttctcctatgacttgcctgctggtatcaaccccctttaatcttcttaagcatactatgatcttgaccagagtagactcactcttagaatcacaataaacttcaacaatggcttgttgaaaaccatcttctgcaaacagctttctcatcctgtttactacttgtgtttcttctgcaaaactgaaaacaacagcctcttgaacctttgttctcctgtgacttatgatttcacctgctgtgaattcaattagaagaaatgatattcttttgtcttgatcagtttcataaacagatttacagtcacttttcaccttaggactattttgctctttgctgtttaaacagacctgcagcttctttgtgtccttctcactgccagcacagagtcatcttgttgactacccatgaagcttcttataacacctgcagggcacgaatttgcaggtctgattcttatcatgatgttcttttcagcttttcatcatgtttgagatgcacttctcagcttgtaagaacctctcttgtctattcttactttttacctctgacacacactggtttctcttctactttgaagcttagactgttctgctgtcaagacttgacttcttctgcatactccacaactttcagtccagattctttgtgagtattgatttgtcagttgtcactgacctcggatcaaaacttggcatatacatgtatgatataggaattatttctagtcattaacgttttcgaaaatacacacataaaacaaagcagtatttttacagacttaaaataattattttatcgattaaaaagttgattttttttttaataatataaatggaaaacctaagtataaaaggaattgatttgctagaaagaaggaaaaaaacaaaccctaaaaatatatagattcttcagcaaggtaagatagagagaacgtgagagatcgatcatggcgaattcaacaggtaaaccgacaagttcaacacaagaagatgaagaagctacctcggctacagaaatattagcacaattgatgcaagatattatagatcgtgaagaggatatagatgatgaagacgatatagatgacgaggttatagatgatgaagactatgaggttgcgtcccttccattattacaagaaagccaagctaatcaaaagcagtctagggagagggaagaagaaactgaaaaaaatcaacctaagaggtttaagaaacagaacatgatgaaaataaatatccatgacttttcagaagaaactctgaggttaattgaggtatggtacgaagctgaactcgatccacaagatatattcggcgataatgaggtgacgaggctattcagcagaccgataaagaagcagttgatgtcgagcgatgtcgataaagatcaatgcatgctcatgttatcgaaggagcaagtgaaggagaagatgcttccttttctagaagattcagagaatccggtaaaggggattgatgtttcggtgtatggaccagacgggaaagttcaacagatggagttcaagatgtggaatggggataaaacacctgtgttaacttcagggtggaagcagtttgtggaagattatggtctttcgatgacttgtgattttgtcactgtttggatgtttaggcacataaagactcgaaagctttgctttgctattcactacgttaaattttctttaagagattaatttatcgagtgggatgatcttgaagactgctttcttgaatccaaattaggatttttgaggtttttgtttctttctttttctgtgttaactagtggaactaccagggtattaactagggtttgcttccctattcggtctacaaggatcttgaagactgctttcttgaatccaaattagggtttttgaggtttttgcttctttctttttcctgcgtttttgttaccaggatattaattaggatttgcttcgctattcggtctacaatgatcttaaacatagataattgatatttgataaggtaccaaaatgatggatcatatatggtcgtcactggtcagagaatatatgcacattatatggtcgtagctccaacgtttaatttgatctaaactatgtatgtatcaaggttataaaatattgcaccacacaagctttttacttacaatgtgaaatcaatgtaaaaaccgttctatacacatattaatctcacaattacagcgactaaacaatacaaaaatcacaagcaagattccaagagggaaaaaaactggagaaacaaagaataagacaaaaccaaacaaccaacacaagaagaagcaaaatcagttgtaagaagaagaagagagccaagggtggttaagtgcctcgagagctgttggacgtctcaaaggattgatctcaagtagagtccttacaaaatctaagaacaattcatcactaacttgtagttgttcttccaagcttgattcttctgtgattatgtattcaatctcattgctctcctaaatcaagaataatgcgtcacattcaagcaataactctcaagtatttttggttatattaagaaaaattacctcgtttaagtggtagagatcatactctttggtgaagtatttatgtgtctcttgacctttctttagcatctctgtttcgataggacctaaaactgcaacaatcctagccaatatcatcgctactgcttcgtttggaaacagaacctgatacacacatacatatatacacattgatacatttgtgttactagtttctttgatatgtgggataaaacatacagataagacttttgatggaatctagacagtacctcaccagagcagagttctgctacaatacacccaagagaccacaaatcgatcttttcgtcatatggaagcccgagaatcacttcaggagctctataagaccgtgattgtacatacaagcacaagttatcagagcggaaacaactacttccaagatcgatgatttttaccgcgcatcttttgtaactctttatcagtatattgcttgattaaaaaaaatgccctttttccaacttaaaactgcatcgttcgttaaaacttaaaacttaggaatgggattttagtaaccaaacatcatgcaatagccacaaaaagatgtccgtgggcttattgggcaagcccaatatcatgaattctgatatgcagatcctaaaactattgcggtgcttttcataatgtatctaactctacggtggttctctgtgaaaaagatgaaactataagggtataataacaatttaaaataaggtcggcgattcccacttcagacttcagagtgtcgcctccaatttcaattagggttcctactttcttctcctttctcgtaacttgatcaaatctgcttactgtggagttatacaccttgaagagtctcgcgataatgaagaaattctatcaaaatgctgatcatgagactgataaatccaaatcggcggagacgaagaagaggaagaacatgaggagattaggaggcggtggtctttctctccaaacttttgccaacatgaaatcggaaaataatcgctataacccttctttgatcagtaagagattcttctctctacccaacttgaaaaaaagtttcctttttgattgtaacttgtcatcctcttgcttcgaacttaagctagtactcgaggattaggaggaactatatcaagatttaagattaggctgatgttaagaatgctacgatgtgattattgactatgtttaccctgcttctctctacccaacttgaaaaaaagtttcctttttgattgtaacttctcatcctcttgcttcgaacgtaagctagtactcgatgattaggaggaactatattaagatttaagattaggctgatgttaagaataagaatgcttcgatgtggttattgattatgtttcctttggtgttaggcatcagaagagaactatttggagttcctttaatggtgtatagtttcacagtttgtgttttctaatcagattaggcttaagctagtactcgaggattaggaggaactataataagattaggctgatgttgaggatgctacgatgtggttattgactatgttaccctgcttctctccacccaacttgaaaaaaagtttcctttttgattgtaacttctcatcctcttgcttcaaacttaagctagtactcgatgattaggaggaactatattaagatttaagatcaggctgatgttaagaatgctacgatgtggttattgattatgtttcctttggtgttaggcatcagaagagaactatttggagttcctttaatggtgtatagtttcacagtttgtgttttctaatcagattaggcttgaagtaagattgaatgagtgttcttttgtgctcactttcagaaaagcaaaaagagttctacaagaatgcaaagtatgtgagcaagtttaggaagtcgttgaagcagcagaacattcctgataagaatgagactggagagactagtaaggtaggtgatgatgatgatgatgataagcggaagggtaaatctaataagagaattggtgtagaggatttgtacaagcagacaagagaagagatggagagagtaaggaaggagagagaggcaatgtttcaggcgaagaaggaagcgaaagaagaggctgaatctaggaggaaagaagcaaaggggaaaatgttgaggaagactcgacatggtcagcctgtaatgaaatacagaattgagcatcttcttgaatccatcaagaaatctgccggaatcaacgaaatcgcctaacttgtgcgggttgatacagtgcagatgaagaacccagtgaggagaagttgctggtgttgcggaggctcaaagcagaaaccttgttgtcactcagatactgacctttttcttcccggagatattatgttacactactgcttatactttgagagatgctttgcggcaacatatgtagttttttgctaggccttaccgtttagctcatgattttagatgtttctttacaaacttcttttactataaatcttataaaatgataattttattccaaacacaaggttttgtttgtttaacagagtacaagctatgaaatgcttctatcactgatattctaatatcttagtaaaaacaatatgaaagggaacaaatggaaggtgaatctctcccacaacaatgtctgcaaaaactgaagatggaaaggaaaatatgactgaagcagcaagtttactttatggctagatgtgaaactccattctcaggattcttgtgtatcgtccacacaaattcaggcgtatccattctcggtcctgcgactgttctgtatatgtatatcctctcaactggagagctctcaggtcttgactctggaggatgttcatcaatgacttcgacattgagccttggcattttctgacttagaagcttgcaagcaccaaaacttacaaagcaagatgacatccaaagggatcgcatggtctctagcttggcagcgtgctccagtagtgcagtgtctccaaaagggcagtctcgtatctcaagcttctttaaactctcacagcccgacaacaagtgatgaagcatcaaatcactgtccccagcaaatgctattgatagcatcctaaccttcttggcatgtttcccaatgtatttgaaggccttgtcagagagaagaccagagacggagagccgtcgaagatccctgcatccctcagctatggctttgaatcctttatcaagtggctcatttgttttgtaatcaggagcaaatggctctatcacacagagacggaagcacttgagattcggacgttttcttgctatggtaaacaaagctgcgtttgtgaactggacacagaagtagagaacagactcaagctttcgacagcctttagacacaaagaccaggccttgttccgtcagaggtatgttggttgcatcaagatctggctcagatggaaacaccctcagttctcgcagttccttgcaatatgaggcaacagcttcaagacctttgtcctcaatcaagtccatcacctaccaaaaaatgtctcactagtaagaaccaacataaatgggatactcactcaaagagtcttgaaaaatgtaaaatactcacccatagcttctgcagtttcgagcatcgcctaagaagctcaacaagatcaggcattcggacagtagcgtagctcaagttcaacgaggtaagaccaggacagacagaataaagagctggaagatattcagggaggacatcccagagaccagataagctctgaagttgcttacagtttgaaaaagcttctgataactttgaaaacgcttcaggtttcaattgagctgcgaaagaacctgtgccgagctcagtcagttgtggagcacaacgaagtaagctaacgagtccatctagagtcacagctggattcaacttcaaagacttcaagtttggagatctgctcacaagacgctctaaatccgagattttaacctcagaatctaaacaagagaagtcaagagagaccaaagaagttgaactctctggaaaatagctaagccaatctcctcctaaatcttcaacaatacactctcgtagttccaacactctcaagttcctatattgaaaatcagacaacaacaaaaaacaaaccaaagctacttactactatgagatataacttgcagccaaagaaaagattgtttttgtatttggttggaaccgaacctgcaagtagctgcaatagcagcgataccatcagtagagaaaccttcacaagaagtcaacacaaggactttaaaatccttaaacgaagcagcaattttctctaagcactcatcagtcaccaccatcctcttcattctgatctcttcaagagacgaacttttcgccgccatagcttcaatccacggccaagcataaccaccccaaccatcaggaacgagattatagtcagcgaagtgtggcttccccttcaaagtcaaagatctcatctccgggaaccgtcgtgtaaccgcagcaggactgaccgcgtaacagtttccgacaaagactcgcttcctagtcttccgttctgtctcaaaccatgacttgcagaccagagaaacagagttccggtcctcgttggaatcaatgaaggagaggatatgttccaacaccttaggtgggaatcggagacccatcagaaacagagtgagagagagagaggggggaagaaatgaagaaaaaggtttgagattttgattcgatatgagtgtgatctaaatcgaaagattgaagcttttgatatatataaacagagcaagtggaagacaagaaagagtatgacaagacaagagaatcgaaggagacagtgtccatgtgagaccattaataaagttgagcttgcacccatgtgagcctactgtgtatagctcactaatataattagtttccttaatcataattagtttactctgtgatccatcacatgtaagtctgtgtgagaactcgtggatctaatcatttatggtattacccagttcacacatgatgtcagattcgttaattagtattttacttatgcttcagtttcaaagtaaaaatatattttatctttggtaccaaatatcaattcatattgttaccaatcaaatgttacaactgaatctcttcaaacaatcaacgtttttggacgtgaaaaacatttttatgattaaagcttcgaatggcaactcattatcaaaacggtacagtttatacagttttgacaattatcatttacaaaaagaatttcaaaaacgttacaatttttttttattttcaatttttttatacagtttttttttacagttttgcattattctataacagtttaccgcgtcagttaacaacttatcgctctagctaacagctaaagttttgttaccaatcagactcttaaatcttaagaaatggagtaatccatctcagtgcataagtgtcacaaaatgatcgagactcgttggttacaaactctttatcacatttgaagaagcttaacttaagttgttttgattttcgagaaaccgatagagtaacaaagaagttaacatcccaattaattatgttcctaagctttattttcttagtgtcggattggttagattttctcatagacgctattccgctaaaaaactatgactctacacaattacacaagatgtgggttagtaaaaatttgaagtctgaaaaaaaaacagaaaattcagattcaagagccatcttcttgtcttatctacacgtgtcacatactgaactcctccaacaagagaaagatgtgtccgaagctccctcgctcgaatggcgaatcctctacaccttgagttcgtttagccaatctcaacaaacgctaaagaacgacgtcgttttgttgatcgtaattctaaaaaatcaatcagcaatgctgatgaaaagtcttcacttgttgtcttcctcaatcctcctccaccgctttgcttctcgcagcattgcatctttgtctactctacccagaagaagaaatatcgtccgtatacataacccttcgttttctagccctttcccgccgattctctctagacccatttcctcaggcaaggtcttagccatggcggaagagtcttcttcttcttcgacctcgtcaacatctcagaaacataccaaccgtttagccgctgaacacagtccttatcttcttcaacacgcgcataatccggtgattactctcttttataaaagtattcgtctttagataaaattgataagagaagaacacctctcgtttcaattagggagctttcttgcaatttgctaagtcacaactggtttagattgtagctaaccggttcttagtctaaaagtttggaactttttttattttttagattgatttcatggtttatgtcaaaaaggttgattggtacccatggggagaagaagcttttgaagaagcaaggaagagagacgtgcccatcttcttatcaagttgtttactttatcctcttttgatcgttttaattactgcttgattagattccattaatgacttttagtttgtgaaactaatttggttccttttgttttcaaaatctcttttatatggaatcttgaagttggatacagtacctgtcactggtgagactttcaattgttttcttggatttgagtttgacttcttctttttactgaattggaggattaagagaatgaatgacagattcaaagactctggatctgttagtatcattactcttctctcctcataggtgtaactctaatgaaggatttaaggattttataaattgaaagtggaaagaagtcttatagcctaagaactaagtgttattgtttgaaatgttaggagtagagaagcagataatcttatattcctattttgaaatgtatgtttaagtaacagttaactcttttgtcaggtgccatgtcatggaagttgagtcatttgaagatgaagaagtggcaaaactcttgaacaattcattcgttagtatcaaggttagcgtttaacacggaaaaacattttaaagcactgtctttgaactggttactgttgaaacatgttagtaacatgtctatgcaacaggttgatcgagaagagcggcctgatgtcgacaaggtaaactactttctgcactctttgatgtcttgaataaattgctcaaaactcaaattttcatttatttctctgaatgcttagtttcagaaatatcttttctttttggctcaatcatgttgtgggtcatattaatagcttcttttactttgttggcgaatatttgtgtcttcggtaactctagtaagagatgcaaaaccttagaaaccatagtagacttgtgtagaatttgttctagctggatcagtgtctactagagaaagtagccttgactatattcatggacttacgattctttttactggcacttttaggtttatatgtcgttcgtccaggctctgtatggtggaggagggtggccactgtcggtattcctttcacctgatttaaagccgttgatgggtggaacctactttcctccaaatgacaattatggacgaccaggattcaaaactctccttaagtaagtaaaccctttttctcttattgtacaaaagcattctaggcttgtaatggtgcaataaaaaatagagtatgtatgtagaaacaaacgctcttggcgaagactatagttgattcgtttatgttctccatgttttctttgggtttggttcaggaaggtgaaagatgcgtggaacagtaagagggatactctagtgaagagtggtacatatgctatcgaagaactctctaaagctttatctgcaagtactggagccgataaattgtcagatgggatttctcgggaggctgtgagtacatgtgcaaaacaagtatgattcgactcgcggactctagaaaaatatatatgattgatacatcaacatgaaaaggtcttctaacagtgagtgtttgtgttaaagctttctcggagctatgattcggaattcggtgggtttggatctgcaccaaagttcccgaggcctgtcgagatccagctgatgctttatcattacaaaaagttgaaggaatcggggaaaactagtgaggctgatgaagagaaaagtatggttttattcagcttgcaaggcatggcaaatggagggatgcatgatcacattggaggcgggtttcatagatacagtgtcgatgaatgttggcatggtaaaacttcaaacagtatcctgtagtatcaaggtgatgaaaaatattttgagattgacgcattttttgctatttgtctggtgcagttccacattttgagaaaatgctgtatgatcaagggcaactagctaatgtgtacctcgacggttttagcattaccaaggacgttatgtattcttatgtggcaagagacatccttgattatcttagaagagacatgattgcacctgaaggtggaatattctcagctgaagatgccgatagctttgagttcgagggggcaaagagaaagaaagaaggagctttctatatatggacaagcgatgaggttcttttctctgatatatgatatattcatgagctgactctggtttccctctgcatactgacatttgttttgcgtgtgtgtttggtttcaagattgatgaagtcctcggggagaatgctgatcttttcaaggagcattattatgttaagaaatcaggtaactgcgatctttcgagcaggagtgacccgcacaatgaatttgctgggaagaacgtgctgatcgaaagaaatgagacgtctgctatggcatcaaagtttagcctctctgttgagaagtatcaggagatattaggtgaatgccgaagaaagcttttcgatgtcagattgaagcgacctaagccgcatctagatgataaggtaatactcttcttggaattctcatgttgtcttctctactgtttcttcagatttgttaaccatttaagatttctttcatagataatcgtgtcttggaacggtcttgttatctcgtctttcgcaagagcttccaagattcttaaggctgagcctgaaagcaccaaatattatttccctgtggtgaatagtcaggtaatgaatgctacaccctttcctttaatttcttctttgaccgttttgtaattagaagactcatttttcagccagaggattacatagaggttgcagagaaagcagctttgtttatcagaggaaatctctatgatgagcagtctcgcagattacaacacagttacagacaggggccatccaaagctcctgccttcttagacgattatgctttcttgatctctggtttactcgatctttacgagaatggaggtgggatcgaatggcttaagtgggcgattaaacttcaagaaacacaggcaagtgagatctttactagctcgatttgttaaagttcttgattttggctaaaaaagttaaaaacattttaggatgagttatatctggaccgagaaggaggagcatacttcaatactgaaggacaagacccatcggttcttcttcgtgtaaaagaagatcatgatggtgcagaaccttcagggaactctgtttctgctatcaatcttgtgaggttagcttccatagtcgccggagaaaaagctgaatcctacctcaacacggcacatcgtctcctggtaaacaaacaaacaactaatcccatttgctattcatagaaagagattattgagtctctttgttgttgtttttgcaggcagtctttgagttgaggttaagagaactggcggtggctgtgccattaatgtgctgctccgcagatatgatctctgttccgtcgaggaaacaagttgtattggttggttctaagtcttccccagagcttaccaacatgctttctgcagcacattcagtctatgatcctaataaaacggtaagagcttaaaaaattatccaaatttctagattcaagatttgtgacttttggtggttttactgagcaggtgattcacatagatccctctagttctgatgaaatcgagttttgggaagagcataacagtaatgtagctgagatggctaagaagaacagaaactcagagaaagtggtggctcttgtttgtcaacacttcacttgcagtcctcctgtctttgactcttcttctctcactcgcttgctttccaagtaaacaaagatcattccatgtttaatagttgcttgtactgtaaggaacagatcaacgttgttctctctgttacagtcttacagagtagataaataaagaagagaactaaaccgagtatgaggttttttggttgaactaaaccggaaataaccgggtttggtttggttaaaaaaacagagctttgacgattccttatcatcttctatcttcagcaaaaaggtgaaaacttggattcgatcgatcgctgaaaatggcgtctcactcttcgactctcttcacttctccttcttccttcattctcttctcttctcatcgtctcaaatcttctccgaattacttcacttaccactttcctcgttccgtaaagagaccacatttcgacttgcgatgctcagtctcaatcgagaaagaagttccggaaacagaaagacctttcactttcctcagagtctccgacggcgatcaaactcaatcttcttcttattcggttagggctcgtttcgagaaaatgataagaactgctcaagataaagtctgtgaagccattgaagcagtcgaagaaggtcctaaattcaaggaagatgtttggtctcgacccggtggaggtggtggaatcagtcgtattttgcaagacggaaatgtatgggagaaagctggagttaatgtctctgtgatttatggtgttatgcctcctgaagcttatagagctgctaaagctgccacgtctgagcaaaaacctggtccgattccgttctttgccgctggaaccagctcggtgagttctctctctctctctctatcagtcgacattgctgttgatatggtctctgagttctttgattgagcttgatcctacattctaggttttgcatcctcagaacccttttgctccgactctgcatttcaattaccgctatttcgagaccgatgctccaaagggtaagaccttaatcctctttgagaagtgtaaagttccaattttttggttggatgaagcatttgatttcatcacttgtagatgttcctggagctccgaggcaatggtggttcggtggtgggactgacttcacacctgcttacatctttgaagaagacgtcaagcactttcattcggtcgttaaacctgatccattgttctgaaagtttgaagctttgtgattatggagatgctgattgaaatatctttctttgtgtaggtttaaaagcaagcctgcgataaatttgatccgtcgttctacccttggtttaagaaatggtgtgatgactacttttacattaaggtctgcagttcctttaacgctattctgattgtttggtgagatcttagcactttgtggaactaaaagaccttagttttagagtcatgtatgtgcaagaatagatttagagcctcaaggttttgtttaggttgatacagtgataagttgtcgcctaggatttgaaaacactaaaaactttacggtcttgcctgcagcaccgtgatgagaggcgagggcttggagggatattttttgatgatttgaatgactatgatcaagagatgcttctgtcattcgccactggtagtgaccaagatataacttgtgacattttgttttaagaaacttcctagttgacttatttgaatactgagatgaattttgcagaatgtgcaagctcagtgataccagcttctatacccatagtagagaaacgtaaagacacaccatttaacgagcaacacaaggcatggcaacagctgcgaaggggcagatatgttgaattcaacttcgtaattggatactactagctttgtttttctttctgtataaatatctcttgaaacctcgtctcatgttttgttgctgatggtaaaaataaaggtgtatgaccgcggaacaacatttggtctgaagactggaggacgaatagagagtatccttgtctctcttccgctatctgcgagatgagaatatgaccatgtaaagtttcttgattcaagaaactaaatcttgtttcatcttagctaatgaaacttaactactgatggtgtttgtctcttgttgcggatgcagaaacctgaagaaggaactgaggaatggaaactattagatgcttgtatcaatccaaaagagtggctttagttaattaattgtggttatttccccaattagctcttttattagttttgtctttaaaagccttaaaagagtaaagagtctaatgaaaagtgagtgagataaagaaattgtaatttggcgtcatctcatcatgagtcactgacaaacaaagatcatgatggttgatgatggagtatatagtaccaatcgtgatgatgatgataaaagtaattaacttttaattttttttactgacacagtaaaaataagagccgttggctcaaatagccgagcctctcggtgcacgcacgcatgccacttgctcggtaactgttcactagacagaacacaacaacactcaaatagagtgataacattgaatctgatgatttggtttagtataaaaatcgtttccaagtttcaacgagtgggacttgtgttaggttaaacaatttcggattaagtaaacgtcactgtctcatttgtcttgatacaagaaacgcccgtgatattttttcttcgatgtcgtccaatggggacaaagaaacaatttagtccccggatatacacacacacacacaaataatacatgggtgttgttattatggcttaccttacacaacacaacttgccaatgtttttaaatttactaaaaaccaaagccagaagatattttattgccacaaattgacgtcacacctgcccatatctaatccatgtctgcaacacaaaaaacaaaaaattgaattcccccaaaaagtgaggagagagatgtaaagactgtgtaccaattcaatatctttttgagcagagtaaaaaaaaaagtttaaaaatttgagcttctgacacaaaaggagccaaatgtaatagctggatccaatccaatgcaatgaaaacatcttagctgtaaaatggtccaatctctctcttttctttctacattattacttccacagaatcaatttatctctcgaaaagcaataaagtctctatatttgtgctcaaagatagacagagaagcataaatacttgtcctctgtgtagtacaaaagtggagccccactgagtgatgccctcacagtaacggctacatttttcttttatctctctgtctctctcttcttttgagtgattttttatgaagatgggttcttttgtccacttattactgtcctgaatcacacgtcgaatcctacgtggcatctctctccattgtatgccagctcactctcactcactcactcacctcccgcctttataaagccttacctctctctcttgtctccttcattgagtcaagtgctcgagactgtagagtgaagtttgatttatttagagagataagttaaaaaaaaaatggtcggtatggatttgttcaaatgtgtaatgatgataatggtgttggttgtctcttgtggtgaagctgtttctggagctaagttcgatgagctttatcggtcaagctgggctatggatcattgtgtcaacgaaggcgaagtcacaaaactcaagcttgacaattactctggtaagtagatgaagacaaacccatctctgtttagtttcctctgtttttggtgccatctctgttttgtttcctctgtttttgtgggttcattataattgaatatgtttttattgaatttttcaggagctgggtttgaatcaagaagcaaatacttgtttggtaaagtctctatccagattaagcttgttgagggtgattcagcaggaacagtcactgctttctacgtacggaacaaaacccatctcttcttgttctgtttttaatcccctatttgattattatgtctcaaatattgaaatgtgacaatgtttgttctaatacagatgtcttcagatggtccgaaccacaacgaattcgattttgagttcttagggaacactaccggcgagccttacatagtccagaccaatatctacgtgaacggagttggaaacagagaacaaagactcaacctttggttcgatcccaccactgagtttcacacttactcaatcctctggagtaaacgcagtgttgtgtaagctctcttatacaaacaaagtctcttcctttatttgattattgaagacccattttaatgatgtcttcattgcaaatacagattcatggtagacgaaacaccgattcgagttcagaagaatcttgaagagaaaggtatcccatttgctaaagatcaagcaatgggtgtttacagctccatttggaatgcagatgattgggctacacaaggaggtcttgttaaaactgattggagtcacgctcctttcgttgcttcttacaaagaattccaaatcgatgcatgtgagattccaacaactactgatctaagcaagtgtaatggagaccagaagttttggtgggatgaaccaactgtctctgagcttagccttcatcagaatcatcagcttatttgggttcgagctaatcatatgatttatgattattgttttgatgctactaggtttcctgttactcctcttgagtgccaacatcatcgtcatttgtagtttagagattagtcaagaataaaaatggatcaagagaacacatgtggttactctttgatgattctgttttaatgtataaataatcaatcttctattgattttggtgaagtttttaagttcggattttaactgaatatgcgaaatttatggaaacaaactcaacgcacttatcgttaatgacttttaagggtttgttttgattgaatgtttcaaaccctaattacgaaccttaggaaacaaaatagcaaaaaactcgattaagatacttttaacaatggagacaagatctgtgaaacggaagaagaagaagaaagaagaagaagcaaattggtttatcagagtagatagaatcagcaacctccctgattctctaaatcatcagattcttctcttgcttcctcttaaatctgcagcacaagctagcttactttcgaaacgatggagatctctctttctctcattgcctgatcttgatttcacctccatcaacgatctcaagaatccgaaatctttctcttctaactccatttacaaagtgctttctcttcgtagtcatcgtgactccaacaatcttagatcacttcgttttcgcgttcccgtcactttcacaagtctcaattccttgattcgtttagctgttactcatcaggttcaagatcttgacattgaagtcactaccaaagactactttaacttccctcgttggattgtgacctctcaaaatttaagagctctgacgcttaaatcagccaaccttggttttcgattacctccttcatcatcagcacgaggaggtttccaaaagcttacttcactctctttatctcgtgtgatactacacaatcaaccttgtctgtcagatttcttcactgatccgagcttccctcttctggagaaactaaccctagaatgttgctttggactcaaggaacttaaggttagttgccgtcttctccaagagttttctctaaagaactctttacagcttgagggcttagaggtttctggtaataagcttcagaaacttaaggttgagagttgcttctattcatactcagaaaagagctttgtgaagattaacacaccgaatctcaaaactttcctttggaattcaaacgctgtcactactagtgttcatttcttggacaagttagtttgtctgagaaaagcatttgttaaagtgttttggcatcatcaagatctcaattctcagatacaaagcttattcactctcttgtcaggtctctgtcattcctataaactacaacttggaaaccaatccgtagaggtatatatgtgaacacacttgcacatacttacaccttcttcttcttctgcaatttgctctttgcttcatagttttattactaatgttgtgacagattttgtcgagtaagaagggactattaaagaatcatcttctaccgtttcacaacatgagattcttggaactgcaaacacgtttgaatagacacaatgttcaaacactgtcatgtctgttcaagagctgtccaatgctaaacatacttaccgtcaaaatcattgatgatcaaacaagtgaaagaagggtaagtagtcaaataaataaacctttttctttgtttctctttctcagtttaactgaattgtctttgattttgcttatgttttgtagcaatggaataaggatttgtgggatatgtcaaactcagagattcagtactgggaatctcaagcctatgaattagaatctttcttgaaccacttggaatttgtggagattcacggattcgtagagtgcgagaacgaaatgagcctcgcaatctttttgctgagacatggaaaggctttaatcaagatgacgcttcggtctagtttcctctgtagagactctctccgcagacaaatgataaggtcacagctaacgggattctccatggcttcttccaaagccaaaatctcatttcattgaaagtttctctgtttcaggacttaggttgatgagctattacagttttttttttcggttgaaatcttatgcttattgagaataaatacagaaaagttagctgatggctcaaatgaatgttgaaaactattattatcttccatcttcaagagttatggtaagctcattttcagagcaagtttctggcttggtggatgaggaagctttgcttgatgaagggcaacgtctaagaacaaaagccggttgttttggagtaggaagagtagcagcttcgctgcttccgagcatgaaaacaacatttgacattgtaggacgatcattaggatcttcttgtacacagagaagtcctacgttcaagcacttcaagaatccctcggtttcgcatgattcttgtaaagcctgatccaataactcaatccccctttccgctttccagagatcccacgcctgcacattgatatatatgtttctcggtcaagtttttagacaagtaatctgcataaacaagtttaaagtcttagaaacctcacatggcctagaaggcttaaagatttctcaggttcatgaaacccggtgttacgcttcccgctgatagtttcaatcacaaccacgccgaaactaaagacatctgatttgaatgagaaaagaccttctaaagcatactctggagacatgtatccactgcaatgaaaggacaccaaaatgtttaattttaccataaatgctaaggaatgggatgctaaggcaaatagaagtgttcaaaacttactaggttccaacaactctattagtattggctgatgtttcactgcctccaaatattctagccaagccaaagtcagagatcttgggattcatctcttcatctaacagaatgttgcttgtttttagatctctgtggatgattctcagtctagagtcttgatgcagatagagaagtccacgagcgattcctagaatgatattacaacgcatcttccaatctaatcgctggcaaagcttccggtctttgcaagaaccagatcattgcattaagagcagaacagaagaaagactaattagagaagagacaaggagctctacttaccgaagatgaagaagtctaagcttttgtgtggcatgtattcatacaataacagtttctcttctccagcaacacaatagccaagaagtcgaacaagattccggtgttggagcttggcaatcaaaacaacttcattcttgaattcctccagtccttgacccgagcagcgagatagcctcttcacagcaatctcttgatctccaggaaacattccctgcgtcacacaagccacaaaatatttaattctccattcaatataaacaaagagtctaaaatcaaaatcagatccaaagatcacaatcaaaccttataaaccggtccaaaccctccttggcctagcttgtttgcatttgagaagttggatgttgcatataggatggtctcgagctcaaaagatggaacatctatgccctgactatcatcttgtttaaaccttcccgattcaatcaattctttgatatgtctctcactgtcacataaatgaactcctcttggtatacttcctagttccttgtttacttttcttctttgcaaaaatacataggaagcagtgcttgacagaacgaccagaatagctgcacttgtaaacgtcaccacaatgatcaaaaccaccggggttttagcttccccgtatcttcctcgacctcgttctacatgagaaccttcattagaaaaactggtaaatcttagcattaagagtttgaaatgagttttgactcagagctttaccttgagtgcagtttagattgaatccattccacttaaaatcatgattgcagaagcactgcttcttcccttctccagatttactgcaagatgaattaggccagtctttacagtctgcagataaagagcaagttggctcaagaggaggatcccaacgaatctccacttcagttccaccagtaaccgtgtctgcgttgcacttccccgtgagatgaaaaggcgaagatagctttaactctgaaagtctgctgatctgatttacagttgtgcagtttactaccacatcttttattttgatcaagaatctgcgagtatccggattgatacttgtaatattgtatgagctgttagatcctttgaaaatgacttgcccagtcgacatattgcagttgaaactaaggtagttactgtcgccacatccaggagccgtgctcaaaggataaggaataatattcgtaccgcaggtcacacaatctctactggtcgactctgcaagataacagcaatttaaccatcaacagttatatatcttaatgcattttaaaagcatttcatatgttttaaagtcggtaagagattgtttacctatatctggaactgctacgcgaatgaaaacgttgcggctacctaaatagccttccttgagattattgagatcctccaaccaaatccagcacttggtattgctttgaagtatatcaacttcttcatatgagtaagcttggcattggcaattattcaagcactctgctctgcattctttttcattatgtgcatcaaactgtgaatccggacttcctacttcaaccacactcagattcaagaacatgtctcccaccacaacaccgtctttaccacagatccttgactccctggaacatccaccagaaaaatctcccttgacccatttctccaggaaattaggcctaaaacctggcaaacacttacacatttcctcattcttgctgttgcagctaccaaaatttccacaagcattgtatacactacattcatctctaggttcagcccaaatctgtgcccagaatctttctccatctaacctgaagtactgagcttgaccagaggagctcatggtgaaccttgtattggtatacaaagatgtgaagagaggaggcacagaggcattgtgaacagtaacagtctctgtgaaattggaaagaaagtaagaaatcgcataaggcatctcgtcggatcctatgaatttacccgaaattccggatttccagtatctcattgatcttttccaaatgatgaactgtttgtcttcttcttgatccatctgaaaggtgaaatttccatgtgatggatcgttgaagcttctccatgatgataaagtcatattctcatccatcctcatccctgggagaaatgtatcagtaggattctgaaaactctgccaaaccacatttgcttcatttccatcactaatcaacacaagattaccattatccatcagctttaccattctctccgcagatactgaggaaggtttaacaccggtgtcccaatacactcttccctttgaatcaataacttcaagattcccatctttagagatggtgaaaatgcaggaacggtcaagaaccggagattcacgatttgcaacccagacaacagtcagtggatgtaaattgtaaaaccaaatccctaagtaccttctttcgtcggagcttccattaggagtgaagaagccaagctcaaatctctgaccagctgaaacaagagtctctccatggctgtcattgatcaatgttgaacctttgaacaatgttttggagtcttgaactgcaacaaaacaatctaatcgacgaatatgcagcaaaaacatatagaagaagacagaaagaatcattctctgaccagtactagcttttttttactcatctgatatctccattatttctgcttaagaactcaactcaaaacgtgtctaacgaaaaaagaaaaagtttgcctcaacgtcaacgaaagacccacctgaaaagtaaatatgtggaacgcagctaatcatgtgttttaagatgtttccaagaaaaagcagaacaagtctcacttgagcatctgaaccaaaagccatgaaagtagtagatactatttacactctcttagccactgtatgtagatacacatgtgaccaattcacgcactttgtgtcaactttttccgcgatggatctctaaatagttcaaaaagatccaacattttttgaataatacgtacttttagagtattttttgacaatgagagagacataggggtacctaaacgtgaattactggaaaaaggggacaatgatgttgaagaagtcaatcttttgtccttattggtgctttcgaagaagtggagattgaccctgcaaacattgttaaccaacttttttccgaaattattgtgagattcgaggagttttgacaaatgtaggacttttgtcgttcaaaagaaatgttttcatctaaaacgcgtaaacctgtaaaaggcagcttcagctctgattaaacaaagagacttgcaacaatgtcactatgagacattactgtttaaaaatagattcagaaacactaatcagttttcacactaaaacaactttgtcttctgccttgtttgtttattcctctggatgtttcatagatatacctttaacagggtatagcagtttcaagttcatagatgaaaccctttcgctcacaaatattgttttaaagccttctttatgagagttggattggttcaccacatagattctctaactcctcttccaggagtttatgcaactttgcttcagttcgccgatatatccacgcattagcatcacggtcccagtcaaatctagaagggccactgcaccgagacaaaaggaagaatgaagattacattaatgtgaatctaagatgtggaagcacaaagtcaagagcaacaacactatacagtcataaacagtttcatttctccaaatatcatgagtacaaaaatcagaagagagagcagaacatgataatccagatgcgaaattcaatctaggcgcctaaagttagcaactttcaaaaggcaagaaagaatctttacctcacaggtgaagacatccagatttgtcgatttggagtttgcttattcagtacataagtgcctaaagatccaagcttaagggtaagaacttcattctgttggaaacagccaaaaggactgactataataagtacacatagatttccagaaatatgaacaagatcttaaattgcttaaaagagtttaatccttaccccataatctatgtcgaaaccatcaatctgaacattatcaccataatcctgaacatgaatcatgcaagtagaacatagtgtaagctattgcaatctcaagtaaaacgaagaaccctagagagaaaaaggttccagcttcaaatacctcaattttctcaagaaggtgattaattgtgaagttggctaatttgtgaaactcttcctcctgcaaaaccgaactgtttttttcttccactttgttcatattctcatgaaattaacgattcagatacaataaaggagatcaaaatggagaatattaaagtacctgtaatcgacagaagcaggaccttgagaagagaagcttctggtagtcaaagaatcatggcggattcgagatcctattctccagaaggaatccaacggttctatggaatcttgaatcagattgcttgaaactcttacgccattgctacggagaagagttggagacagcttgagaaacctcggcaatttccgtagaagaaaccttgaagctgtagccatggcggttctgtcacaagaaacattcgacgcctctcttcttcttattccttcgttgtccaatttaggcccacaataaggcccaaatttagatttacccggttcacgtatttcccatgttccggtttactgaaaccggtatggttctcaagagatttgtcatttgtgtgcgaagaagagttttcttctcctctcataagaaaaaaccagaattttgaagaaggagaaagaaaaaaatctgggtttttgggagctgattaggttttgttccttcaatctctgggaattttcgctatgcactcaggtgaaattcgttttttcctctatttcaatctctgtcttcctgcgagtttacgtgagagaatagtttttaatgatcccgagttcgtcgaattacaatgcaactcccagtttttgtagttttaattagcgaaattcatcaatggcattggaaattttaagccttttttggtttgttttatggtactactaattattcaagctaaggaattccaaagttttcgttcgttttgattgggtttagaagtatttggctgatgagagaaagagccataattctgaaattaaacccttttatgtgaagcttgtgtagatgttttacctgaatttcggaattactagcaacatttctaaatacacaaagcatgattgtaaaatgaaattgattttggtcagggctttgcatctcttggttattgaatggtgtccgtgtttcactattatcttcttatgtttttgatttttatgtgctattttcgatagattcaggcgaagcgaccgctgatggcgataaagcttctacagaaaacagcaaaaaacggaagcttaagactcctatgcaagttatggcgcttgagaatttctacaatggtaaattatggctttgttgtttgcatatgttcctttataccaagttgtatatgctttacaggtgtgatttggtttttctacagagcataagtatccgactgaagaaatgaagggcaagttagcagaggaagttggattaactgagaagcaagtttcaggttggttctgccatagaaggttaaaagacaaacgtcatgtaaaagaagatgggaatgccattgggagccaagatcggtcaagcgttgttcttcaggatcgtggaagtgggcttcgacaggattcatgtggtagtacaaagcaaacggattattggaaccccaagcctagggaagttgaaagtcaaaggctttatatgggaaatgctgatggtgaagatagtacatcttctgatcgtagctcatcattacgtaagaatcttgtctctagcaaagatggaattcgcgatgtggaaagttctagatatgttgcacataaagacgttattcagcatcctcagttcatgagaagctatgggtataataagccttcgggatacttgaaagtgaagggagagagtgagaattttgctatcactgccgtaaagagacaattaggaagacaataccaagaggatggtccacctctgggggttgaatttgatcctcttcctcccggtgcatttgagcctcagactaatcctatagttcacggtgagtcatgataaaatgtttcaactttacctttaattttctggtttatgatgttatgagtattgagtaagtggctcagagaagctaaaaccatcttcttcgtgtgtcagattgtgaatgcctttacccatgtccagtcggatttgattgctttttctatcaactgttttgtcagagccaatatatgttgggaatcagagacggcctcaccttccacatttacttggaacgaggaagagctttaatcctggtcctgtaagtgaacattttctgtatactacatacccatgaagataatataaactagaatcttagtctgccatcacattctttggctaaattatcttactttctttgaagtattattaatattttcgttttctgtcttaatgtctttatagagctatgaattagctcgtaaatcaaagttgcattcgccagatccagattcagaggatgatgagcatgatgatgatgacaacataatggttggaatggagcctggtctaagagataagaaaagttttggggaaccaagactgaaatccccttctaccagtttctataattctgtacctcgccacaaatcgtttaaagagacattcaaaggttcaccacgggaaatccctgtaactaacagcaagaagggttggataagttccaaaagttgggctgaagggtcgagaaaccatctggttgccaacgtccaaaatctttctggaagcaatattgaaaccaatcagtctcatgattatgataataatatatctaatggcggacgcaagacgggatatctcactaaatcttcgaagctgttacctccgagtagaagcagatcccctgagtcaatggatagaggtccatcttctgggatggtaaagatttgtctaatacttccatgtctacatgttcctttcttgcccttttatggaaatatgacttgtgttttgtgtgatatcttcttttaaaggcaggaatatatcacggggagaggaatcaaatgaaaatgcagagagagaaattgcattcgactgatgaaccaccggtgagtttgatggttaactatcttaaaaatatagatattgatgtatattttaacaaagtttagaggctctatcaagttcgtgttctgacctttaacgaatgttaataggttgccaaacgagtgaaacatgggtatattcagcaagtatatgcaccaaaatcatcatcatacagcgagattcttgaacgaaaaagccagataaatcggttagtaaccaaccattgtgtaatgcatttattgtcccaaagagatatcaaatcggcttattggatcatactgttatgtttgtaggtctggtgtggaactgccttctagtttaagcggggacgatgagactgacgaatctagctcgtcaatggattaagtaaagaaaggtacaaaggaagattaggaaattccggtttgtatagatatatgatgaaaccggtttaggatgtgaaaatgttgcatcgtgtaattggtaaaagttagagctctcttcattttggtaactaaacggtccccaaagagatacagtgagccagtaatgagcctttttttgtttaaatttgctcctaaaccgttaccggtttgaccgaattgagtatgtaaatcccagtgattacaaaataaccaaagtaaggcccatttattaataaagctcaaattaggcccaaaatattatgatagtccggtttagtcgtaaaaggcggttcggaaatgtgtgactaggagatttcgtcacatgagaaaaaatcagagccgttgactagttttcgtagaaagtatgtggtacaattttgattcggccaaaaaaggtttttttctttttcttttagggttagcgttgctttgcctcaaactcaaattttgaagataatttttttggtttctctgctactgatttcgaatctttacgcttaatcaattattcatctggattttcaaatccaatccttttcctccctggtaagaatctctcttcttcttcttcttctctctcacgacgattccactgttctccgattctgtgttagttcctgcgatattttccatcacttgttcgtgtttcgttattacgggtttgtgttttgtgaacttgttgacctttgtgtctccgtaatttcgtccaacggttgatgtttttgattgctgattagatttttgtcggtaggtattgaaaaagatgatctttatggattttgttttctgtttcttctttcctttttgtaatctgacttgcaagctttttgctttttttgtcggtcggtgttaaaaattgttccttttctcttgttcaattgtttcctcaggtgaccaagtaattggggattaacaaagggactggggctttattaagctcgaaacaattgttcttcactctggccgcttctgcaaagtcgtgtgcttctcgcacctctgcgcaggtgtggggtggccttgaagtggtgacttcactctgtcttccaaggatttctctagcttctatcatttggaggctccgtcgtgtttctgagggtcttacccttgattacggctaacatttactacgcccactataccacctcttaagcttttataagaactttttattcgtgcaaaaacttaacttggatcttaattgtttctagtttagttgtggttgtaaagtaaagaaccgtttttttgtggtttggttttgcttttttagtttccgttggtgatgtagttcgatgttattaagtttgacacaatggtcaggttttcatgcttcaacgctcacatccaccgccatagacctaaggtaacttgaaccatcattgcctcttgtgtctttagaacgatagttttacattctctgtccaagactcctttgtccaataagagaatgctaatttgtttctatgttctggtgatgcagaaatctgttgaaggattttcagaacgagtgatcaaagaagatgggtctaaatcaaaaggattgagctcaattatatttgggagaaacattgcttctgttagtgaaaacagcaagccagccgctgttgagcgtgtctggaaatctgaggaaattaagcccagtggcattcttgagcatggtattgggacgcaccaggtactgcatctcaagaaaagtcaatctcatggaaatgaactatacttggatgggcgggatgccacagagaatggaacagacgatgcatcagatcggattacttctccgaattctcttgaacaacagagtggtattcacgaggcaggcagcagcaagcgtgtagatgaaagtcctaatctgtatcagcaaggtcctcgagcttctgtttctgcttaccagggttcaaatcaagcactctgtgggtctattttctcggttggagatcttcatcatactgataaagacagccgtcaactcgatgatacctccttatatggtgaacagatggacaactcaaacagtcaaacacctcatgattcacctttgatggtgaggtcgaattcattgcctaatattgctgactcttcatcagagaagtcttcacctttcaaatattcttctcaccactctagatcctctgatgaccttcatgccctcgacactcgccaaacagataaatctgtccatgagactgatgaagaggtgaagcaagaggaagatcaagatcgggactatgatatgcataattctggagataacaacaaggaaaatctcgtggaggatggatatgatgattcatatgattattcttctttggcaaaagattggatcgtaccaccaacagatgagcttaaattatcaaagttccttgaaggagaaacaacaaaccagcaagcagaattttcgggaaaggattctaaattcaagcgtatcgaagattgggtcaatgaccttcagcatgtaaacttgtctgaggaagctgatgaaataacagggtacgatgatgagttgccaagagaacccgtcgtgttgaatgagcaagcaacatcttctgctaaagtagatgccatcaagttaactcctggaatggaagctgcgaaaaagtatatatcctctctaagtgcttctgcaaccacagcccagctggttagtcatggtctggttgtgataccattcctcagtgcatttgttggtctgagagttctcaatctctcaggaaatgctataggtagctaaattttcccttcttgctaatcttcttcacatactgattgtttttgtttcttctatttaactggccttattacatctttcagttagaataaccgctggtgctcttcctcgaggtttacatgcattgaatttgtcgaagaacagtatctcggtgattgagggcctacgtgaactcactcggcttcgagtattagatttgagttacaaccgaatactgagacttggtcatggtatggcccgacctttgctcatcgacatttcctagttatctgcttttatatgaaaaccatgtttgatgtatttccctttttcttatttcttgttgacttaggtctggcttcgtgctcctctctgaaagaactatacctagctgggaacaaaatcagcgaaatcgagggtcttcatcgacttttgaaattgacggtcctggatttacgcttcaataagttttcaaccaccaaatgtcttggccagctcgctgcaaattacagttctcttcaggctataagcttggaaggtaaccctgcacagaagaatgttggtgatgaacaactgagaaagtaccttttgggacttctgccaaatttggtatactataatagacaaggcactaaagatgctcggctcgggacaagcacacatcagttggaccgaggccttagatcagagctcaaaaacagtagccggaagagtagccatggtgcatccagttctcacaaacctggatcctccacagctcgtaaagcaccagcattgcagaaacggtccaaggagagacgcagccgtcttccacctgtgggacacaaactatctccagctgcttacgagaattatcacgttgctactggtgatagattgtctagtctgagaactgagctctccatgcgaagaagtcgaagtgaaggaactctcggacctatctgatctctctctctccctctttcattgcctgcgatttccttagcgaggtaacgatgaagatgtgatagatacacactttcttccctttattcatcttcttcatctttgtgttttgttgttgtgcattacatacatcagaagctttgattcttatagcttctcaataatgtctgaaattggaaaccatggtatacattcttttcagcacagtctgagtcttgcaattgttttcattaagtaatgggcttgaatggatcttgtatatcacaatcttgggccgttatgatgctagtgggcctaatatgggttagtgcaagggattcatttacagtaagaacaaaagcaattgaatgatttaaagactgtgtaaagtggtccaaagagtatcatattgcctgcctgcaacagagattctggcaactggatccatataagtcggataacgaagtctcataagacaaaatcttattcctgaaaattgaattcattgttatctcgtgaccacatttgttcattaataaataacataaccatagggttatatacactacacaagaacaatatttattgattattccccccaagtgaaacaacttaactccacaagccaaaactgtaaatacagaacatgattgataggtagatagatagataaatactacagactggtaatttgtttttcttttgaattttttgagttttgtgttgtggtccaaaggaacaagcaacggaacagaacccgagactttgtctttgatcattcatcactctcttgtcttccaggaagagagaaatggtttatttttgaagcagaagaagatggatggagataaggggaaaggaagcaagtgtcattttcataaggggaccagaagtggtttttgaagtagctaagtgattgatttcatctgacgattatgtttgaccattaaccacctttttcagcttagtaacgacgagtactagttttcctcctcttaggtgaagaagaagctgtgattgtgatgctcttatcgctttcacaactcgagaattgctgatcaagcacatttactgctgtttcagtgcttccttcgttttctccaactataatatctctctcttgtattgctttgtaacactccattaactcatcctgcaaccacggtttaatgctcgcttagtaccgcgatgaaaaaaaagctcgatttgagatggtttacttgttcaagacttctttaccttatttacatatgtgcattggttgattctgttactgaaacatggaaactgtagaggacagagctcgaaagaagcaaagagaagtgccgcgcctgcaatcaccgatggtttaaactcgaggaaactgatatctgcagcgttttcaaacagattttagcatattgtgattatgtgattgaagaaaagcaattctgtatttaccatgttgaagactgaaagtaagatcactggtttgagatttgagggaatgttttagtagtaaaggatcttcttctttgagctcaaagagactaatgaaaaaggccaaaaaggagaaaggagtaacagagcgcatcctccatttaagagctcctagaatcacattctccattctctctatcatctgagcatcaaaaaactcaccttccacctgaaaaaaatccaatgttcagacacttatcaacactttaaaacacattcacattataaagattcatgagttttaagttaccggaagatcagaaacagacatgtctggtttcctcatttttgcagacaaagagacacaagagagagatatgagcttaagaatccagggctttgactgctgttgacaaaacaatttagtcaaaactcagatgaaacaaaggacagattctgtcggaagattctgtttttaccggcatatcttcgctagacaagaacctgtctagataattcacagcaagatacgtcagagatgggtcgtcgaattttcttgaatactgcgattgttcagttacaaattaaaataaagttaagtctttcgataacgattcagtattcagaactaaacccagaaaataattttggttaaaaagacctgagtgattgaagaaatggcttggtttcgattagagagaagaaaagcagaggacttgaggctatggaagtaatgagaagaaggcatgtgttgaaactcgacgaggaagagagagtgtggtaaagtttcatagtctgtgtcgtcgttgaagttattgtggagtgaagaatgtgagagaggatgttcaagatgaaactccattgattgatgatagactcttcttaagcttccttctttcttgaattggtgttagaagatgaagaagaagagagagggacagagagacattaaaagagagaagttgtctttattgtgagatagagagagatggttttcggtcttttgagagattttccacatttatttattactaccactttggttatttttttattcgattttttctcattgatagtaagaattaagattttatcaaagataatcaaatctttttcaagagattcttcttttgcaatattagaaggaaaaaaaatccaatattctctcttaaattctctataatcctctgtttttaattaagtgtagttcaataattttttatttttttcaatataaatgttgttttcacttttctatgcaaacattaaatgtatttaatagtttttaaccaattatattttgcatcatatttttttattggttggattagttgtaattaatggtgtttttataagaaatagataaattaaatgagatttgtatgttttcttaatttgtatgcaaaaaccttaaactacaaatattcataaacagagccgtttgtattaaaaatttataaccgtaaattattacttagttgtttaaaaaatatgtaatacactaatacgtgtaatgtttttattagattttattacaaattaagtcaataattcaataaataaataaaattgcattttagtattaatatcaagtaccaaacaattaaaaaatcatattgaaaaaaaaaccagcataatatatatagatattacattttgtttgagttttagatcatgtaaatttagtatcatgctaaaaaaaagttcttctatgaattttgtgtgtgttaaagttctttcatgaatttggtaagacccaactttaaaatatactaaggctggggagattaaatatgataataacatatactatcgttaaaccattttatttaccacataaagttgtcatttactcataaatagagctgatgtaatgtacagttttatgtatcaaaagattcgtcactttggaatctcgtccaaacagttacaaacattgattaactttagaaatctttttaagtctttgttttgtttttaatcatcattgtatcacacattttaaattactaattaggttgtgacagcttggttttccttgtccttaagtctttgtacttaccttttgttaggttttgaaattcccaacatatatattcagattattttttttaagtcaataaagaaaaattgagaagtcaatgaacaaactgccatgtgaaaacgccatttgaacaaactttttgtttttatttttttactttgatcttttactgccaaagcctgactggtctatttttagacggaaaagaaaacattaattttatgtagaaaatgtgaaatgcaaaggcctttgaaactctagatatgaacgaaatgaaagaaaacattgactgacctaacaaacataagaatttatatgcttgtaacgtaagaaaaaacagcttattagtttttgggggtattagtatttgtccaaaaaaaatgttttgggagtattagctaataaacaacagaaaagtgttgataataatatagtttcttgttttttaaacaatataatagtaatatgtttcatagagaaagagtgacaattttttgtttctttttaacaaatgccagattttgaaccactttaaagaataaaaaaatattagatatttattgcaaaagaagtaattgaatcaaaaaacttttaaatagtggaaatatataccctaaattggaaataaaaaccccaaatataatactacaaactaattttaaaatgaaaaatctcttttaaatggtgaaaatatataccctaaattggaaataggaaacccaaatataataccataaactaatattaaaaggaatcaaaattttttttaaatagttaaaatatataccctaaattggaaatagagaacccaaatataatattttaaatttatttctaacttattttggttgaatagattttatataaaattgtggtattattattgtccataaaattgtggtattattatttgagtgctatttatgtctaaaaaaccttttaatgctatttttatccaaaaaacttaaaagtgtgctatttgtaggaatttctcattataaaatgggtactagtgaagattgaacaaatatatcacctaaattctcaaaccaacctactttgtttgaactttaaaatgatacttcttttgctctgtttttattttcttactttcttccatagatacattactactttggctttaaatggatactaaaaaagcgactaaactataagcgaattactctattaaatttttgaaagcagacaacaatttactgcaaactaattttgttttaatgtaaaagcaatatgaagtagatccgtatcaacttaatttcgtattttttgatacgcacttctaatgactataatttatgaatgataacaaacggatttgtctgctctacccgctccaacagtcaaaccatttgtatgttattttcttacttcattgtttcatatataggtgattgtctattttgttatactaatggttcgataagattaggctaccaacaaaaaaaacaattaacaatataacagcgaaatataattttagctagttccctgctaaaatgtactttgtttctgcacttgcagagtgtgtggaatagagtgagatatacacgaccaaataatgaaattacgttacaaatgttcaattgcatgactgcgtaatgtattttatccaattattatatgtgatgctaattatactacatttcaagtaagacgtgtcaataataagttgattatcattggaaacctttatatagattaaagatatttgcattgaccggtcatcttatagccacaaggattcatcatgatcaacgcatataataatacaagaagaatttgaattaacaaaaccttaatgatatatgtatgttgctcgattctaatcactctatatataattaccaaatgtataaggaagacaggtcatttgtttattgttactatatggaaaaatgaatccgatgagtttcgtaatttcccgtggaatccaaagcttcgacatatgcaaatagtaaaagttaaatgttgataacggagattgcaagtaattgataattaaatgtaaatatttgactaatggagagggagttgctaaattcaagattgttagtttaccttctgtcgttaacaactttgattatatcaattatacacataaatctcgtatgactcaagtgtgtatataaactatatataaagcatgggaggtgcttttttctttatattaccaatttgataatatgaaaaaacaaaagataaaaagggatcaggagcagacgaatattagaagaagcaagcctcagtgactttatgagctcacttctttgccttggggtgccttgcttcaccattgcgccatctttttatatttgattatggtattgacgtattgtttgtacgtactattagttactcatcattatatatgtgttataatatcctaggtcaaatatatttgcaaatacactaattcattataaattccaatggattaattataatcgggattttataaacaccttgacgtgatccaacatatgtctattctctctcttgctgcattaagattattgaaacacatgcggaccaaattaaaagtattatagaataaatactatgaatacaaggcatatatactaatcaaacatgcagaaccatgatagtgtagcagaaataagactttaatgcagtatttacttatcgaaattatatggaccataaaaagtgtcaatgtgtgaataaaatccagttaagactctaaaatctaaattatgattttaaataacgaattttcaaggttttgaatatgatgcattaattgttgcaaaaagaggacaagaaagataggatgcattggatggagggaaagcctgaaagcactccgcaattaaatttattttcatttctttaaagttttagttatgtttttttttttttttttttatctttataaacattactgtatccttctttcgtaaaaaaaatctatttaaaaaagaacattcgcatgttatgctttttagccattaccaaaatagagccgaccagaaaagtattataagtttataacacaatatacagagtatttataaatcattttcgttggtataaaatgtattttcaacaattttgctttacaaattgatattctgcttgtttgttttatatcaatcatattgatcattttaaaaacactagtcagtactcagtagtcatgtatatttttgtatgtattaaacccatgcactagatcagtagtagatttttttatttttttttcacaccaatcatagttagttttagggtgaatctgctgtataaccaaaatccaatctaaaattaataatataacatcatattcaaaaatattaaaaaattaacaaattagagtagtgaaaagacaaaattattcaacggtgaaagatacgcgctaaagaggacgtgatgagatatgtggaagaagagagagaataatctaatgttataaaaattaatattaccccaaatgattttaattgttgaattagtgatataaaaataactgattaaattttgcaataggtttataaaaacatagatttttttttgagtataacatgattaaaaattttaaaatctaatataaattatttaaaatagtggataatgtttgtataaaacagacaaataaaatagtatagaataaaactaaatagtatagaacaaaacgtagacaatccaaataaccgaattaaaccgctttgatcaaaaaacactataccctaagatacaacattgacaacccaaataaccaaggtaaaccgtagcggtgacgttgacgatggtaagattctgacaattttttttacccattcgttaatcaatagtttaaatagacaaacaaatcgaaatcgaatgaattggtttgtttgtttgtaggataagttaatagaattacataaacattttctgggcaaatcaaagaaattggaatctttaatagactaaacattgatgtcaaggatatgagtgattgtccgttggagattctattgccttggtgatgcaaacggatttaggagagagagagaaagagagagagaggaattgtgacagttcgattgtgaacagtgaggggaagaagaaaagtggagaaaaaatatcgagaaagagagggggagagagaaaatgagaggagaggcaaaggggcaaaattgaaaatagtatatcaaatatagaatatatcatccatcttttttgttgatgtgattttcttaattataatatttttgtgcgttagttctgcaaattctccttagttttaggcaagtttgcaacacttaaactctaataccatctccattggagttttttataagagtttctcacaataaaaaaaaaaaataatgaaaatgacggaaataaagtgtagaaagttaattctgagatactctttacaacccatcatgacatttctcttctcactattggttcaaatttttaacaatttttttttttaaatcaaataattaaattataatataatattattattttttgtctaaaaaactttgtgggtttctcatagatggagatgccgtaaaacatatgagaaaacaaaagataacctctgacaaaaaaaaaattgaaaacagaagataatgttatcaagatgcattattatattggacctaaaacgagattatcaaacaaaatagattggtgcataaagcttgtgcatgttaataataggctacaatcttaaattcttataaggaatataactttttaaaatatgatttttggtaaaaactttaatttaatatttttctttggaaaataacattgggctattaaatttaatagtggtgaaagattcaatgcaagaatggcaccggatatgaggagattttcatatttacgtgcctaattaataatgtgaaactgattagccaattaagaaataaaatttgtattggggattttttttttgtttaaataattaagaataaacaaaaagagagaaagcaaagagacacacatgcaagcacgtgatgagtgcatgtctcgcagagtctcacgccatgcacatttcatcatatcaacttcgttgactccttctcagtatgtctttacctttttcctcttatcaattcaaattattcaatacatgttgatgttttaatttaaatgggctataatgaagtttatcagcccaataaggcccacttatagattggtttattttttaaaatttacaattgttatattggcccgttttaagcccattaagaatcacatcatcaagaaatccaaaatctgaaaagtatgtggctatgtggaagcagaggctggcgcgtgccttatctgcttctctctctccagtggtctcaaatctctctgtgtgatcccacttgtcatcctcctccacaacataaagcttgagaccataaccctttagcgttttcggctaaagctttcgctgactactacaacaatggcgtcctcatccctttcccctgctactcaggttcactcttgatcgttcgaatcgaaacaatcgggtctcttcgtataggaatttgggtttttgaaagtttggtttttttttttggtggcagcttggttctagcagaagtgctttgatggcgatgtcaagtgggttgtttgtgaagccaacgaagatgaatcatcaaatggttagaaaagagaagattggattgagaatttcttgtcaagcgtcgagtattccagcagacagagttccagatatggaaaagaggaagactttgaatcttcttcttcttggggctctttctctacctactggctacatgcttgtcccttacgctaccttctttgttcctcctgggtgagattgcttttactctgttcctcgatttgatttcatttttcgaatgagattcatgggttttcttttcttttactgtatatgataagagtcccacatcgttaaggtagaggagagagtgttggtatatgtgttcattggttcctctccccataacctaggttcccatggatcttatgagctagacctcaactctatcagtataatgattgcattagatagataaaatctagagactcttttgtattgtggtgaagtttgaatttactcttgtatgttgttactttgttagcttatggttttgattcaatcgaatatgtagttatgaataagtatatggcttctttggtgttactgagatgtgagattaatgagacttgatatagtttattttcgttcgttggtcttggtttataatctctacgttgttttgaaaatgcagaaccggaggtggaggtggtggtactccagccaaggatgcccttggaaacgatgtagttgcagcggaatggcttaagactcatggtcccggtgaccgaaccttgacccaaggattaaaggtaagatcatgaacaacttatttagccctccttgaaacactgctttaagaactcaataaaggttcttgcatctcaatgggtgtggattatttgttatagggagatccgacttacctagttgtagagaacgacaagactctagcgacatacggtatcaacgcagtgtgcactcatcttggatgtgttgtgccatggaacaaagctgagaacaagtttctatgtccttgccatggatcccaatacaacgcccaaggaagagtcgttagaggtccagccccattggtaagtcaaatacattgcattctttcttttttgcgtatctctaaagtggaccgtctaaagtaaccttaatttcatggaacagtcgctagcgttggctcacgcggatatagatgaagctgggaaggttctttttgttccatgggtggaaactgacttcaggactggtgatgctccatggtggtcttaagactcttcaacaagaaaaagagaaagatttggtctttttgtgtaagacttgtttgaatgttcttataatgtataagctacatttcatcgcaattactctgtgaattcttgcctcttatatgaaatattatgttcattcacttcccaagtttcttttttaatttcccgttttcaagggtcactttgggagtaattagcttttgtttgttgacaatggtacatgtaagatcaggtgtgtttgcaatcaaaacaggtatttaaatacattactgaaagattaaatcaaaggcccgtatagctcagtggtagagcgtcagtcttgtaaactgaaggtccgtagttcgatcctgcgtgtgggcactttttatccattgctttaattttacgttatcatttatttttttcaaggatgttacaaatatattcaccagtcatcaggttgtttgctgtaattatttgtccatatgagcatacatcaatcaataaaccgagataataacaaactattattttcgttgacattttgtttttgatttcttatcataaaaatgaagtcaaagacttcacaaacttgggacagtaccacatagtggctcaccactcgaaatgatttggtctcttgccggctaaatggtaaagtaactatgattaagtaaaataagtagattgatgtttataatcttgtttgttcggctatgaaaaatattagtaaatatttcataaagaattgctaaatatacaaatatgttttttgggttgaattttatagaaccgataaaacttttagaagacttcgatacaaagccacaagtctcctttaaaagacccaacatttcctctcaaccaacaataaaacaaatccctctctatctctcctatttttgtcccatttacatgttattacctcgagcttttggctaagaatttccaccaattctctttaacattctccttgatttctgacactaccctcatcgggtctccaagaggccaagaaagacctctttctcggcttctaggagtctcatcattctcttttttcacatttgcttcctccacacgcaacctccaaaaagccctaaatttattaaaacaaatggattccacggagctgaaccgtgtgttccaaatgttcgacaaggacggagacgggaagatcactacgaaggagctgaacgagtcattcaagaacctcggtatcataatacccgaagacgaactaacacaaattatccaaaagatcgatgttaatggtgacggttgtgttgacattgaagagtttggagagctctacaagacgataatggtagaagatgaggacgaggtaggagaagaagatatgaaggaagcgttcaacgtatttgatcggaacggagatgggtttataacggtggatgaattgaaagcggttttatcttccttgggactcaagcaaggtaagaccttggaggaatgtaggaagatgataatgcaagtggatgttgatggtgatggtagggttaattacatggagtttagacaaatgatgaaaaagggtcgcttttttagctctttgagctgataataactttttttcttctttttttaccttctcttgtttttaattttggttatttgcttaaccattttctcttgcggtctaaatggaaaatacatgatcatagactaattattttatcttcaagacatgcgagagcacattgtaaaaaactgtaggtgttttatgtttaaaatgtgatgagtgatgctttgtttacattcaattaccttgaatttcaaataatgcacatgtagaatgataaagtagatgtgttgtttataagcattttataatcacttaaaacaatggatattcaaacaattaatacaatctttataagccaaaactaagaccccaaataaaaaataaatatcattaacatccaaaaaaaaaaaaaaaaaaaaaattgtatgcaacatagtaaaaacattattagataggataggattcaagaaacttttttagtaaggaaaatatcattgcatatgctcagaaaattggataattaactctcctcaatttaactgttccctttttactgttagcattttgtttacgcatgtacccctatgttattgattaagtcaattatagagtatagagcaataatgttgcatgctgtaggagtagatattaggagtagatttttattgttaaattttttcattgttatcaggttaacttcgttaactattattcatatatcgaatatcttaacgttttcatataaatattattttgttatacaataagttagcatgttattattctatatatcatgttgttataattattatcatgttaattatgtaacaaaaagtttaattctcttttattatgctgaatctacataaataaaaaataccgatttacaattttaaattgataaatatataatcttatcgtgatttcatagcttttagcacgttaaacaaatatttatatatttatcattcgcatattacaattatttttattcaatggcatttttataattaatttttttaaaaaatatatttttaatttatatattatttctctttcatacttatctaaattactaatatttacacatagtttgttaatttcttgatcctccagacatagacattaatatagccctcttagtaaacgccattctccaatatgcatcatataaattaacgcaaacaatgaatctggacgtctaatgtcactttcgtcagagtaaatgggtcgcagtattagaggaatttgaaaaacaattgtgttaagcgtcaccatcacccatacaacaatttaggcatgccatcataaaatttggacagatattgggcttttggttaaattaaatgggctgaggtactgaactaaagtttattaacctaaacttgtacaaatattgggcctttggtttgtttaaatgggtctaaggttcagaaccaaatttggggctttatcattctgattaacaagacaccggcgtgtagtgagcttgtatcagctgcagagtttctctcccgattgacaaagtcgattgagcagtagggtagctttagcatccaataacgtatatcgcaaagaagaggtccaagcaagcgatgatcctcgtcattgttgagtaacgttacaaggtctctgttatcggtttcgaaccaaacataacgcaatccgtgaatccatatcacttgtaaggcatggagaaacccgagaacctccgcgtgtagtgagcttgttgatggatgtagtttcgcacttccacataggattgtatggccgttactctctcgtattatccaaccggaacgtgtataaggacttccttgcataaacccactatcgaagttacatttgcataaacccatatcgaagttacatttaacccagccaacagggggaggttccaactgactgcttcgatttcgtattgagggttgtatatcacttggtgcagcattctcatttgtattttcctagggctcattcacgttaagccactcctctgcttcttgaatacctttcttcgcttcacagtctggagatcgacttttttgttgaaataaaaactcatttcttgatttccagagtcgccacatgatccaaaacggaagatatttatcaagaggattgtttattaacacaccggcgtttgtatcaaaatttgctttttaacaaaacagtaccagtccgttcaaagataaattgttcgtagagaacaaataattagtctttcaacatgttttaatgaaatctcatattatagtcatgttcgtctgataatttgttaacccattctctagataacacaatcaccagagaccaaactgatgcgttaagacatccaatttttgaggtactcaaaaatagttttaataatttttgatgtattatctatcgtagatttctagtatcgacatattggattcacaattgaataagaaaacgtattcaaacaagtaaaaccaaaaaccaaagtgtaagatagtaataaaaagcctcagtcaaaatccatataacttcatagaaattacagtttctgccaaggggttctccctgtaaaacagggtctcagctccactgcacctcgaaattggattatatcatcatcagccaacaaaaagaaatatcactaaaaaaaaaaggctcagaagttttttggtatacagtttcttcgatcaggaattatctgaagcagaactggttttaatcatcactgccctcaatacaaacaaacaaaacaacaaagaagaaactttaagaggctcatattaagaaattcaaccattgattatcgtatatacttcatagaactaagtctcagaagcgcggataattttgtaatcatagcccaaaaacacaaattcatcacagagaataacaaaatctagacattgctttgacacagttaagccggattataaaaagagacagaactgcaacacgaatggcatcaatctagcaggagctttggggcttaattcttcatgaattattatcagactagcccgggaggctcctgcggaaatctatgtaaccagagaccctaaatctatatatcaaaaacaaaactgaagaaccctaaattaaaagctatcgtgaggttgagaatgatttgtatatatgattcaacgcggctattatatagagagtaccctagccctaaaacaccgtctctgaaatgtcgtatctaccctcgttcattgactttcctttccgttgttgtcggtttaatgtaaccgaatgttgtagtatttgggctttgtacaaaagcccatcttcaaatttgacaatacgaaagcccagtgtcaaaactatccccacgtctaattgatttgccttttcgtaatcggtattattgtaaaccggcttggttttcatgatactactattattttttactcgctaattttgtttattccgaaaccctaaaacctgtcgccgtcgaggaaattatggtgacaaccaccgatcgtatctctcttacattcctggcctcaaggttttttctcctctcatcattcattttgcactatttgatttttgtttttatcaccgttttactcatctgcttcttcgttttttctgtgaaatgtgtttttttttcttcgctcgtagaatagagaaagctttaaaagtttaaatccttaattttgttaaaattatatacatgtatgaatttttactagtgtataactagccctgcatagcctttaatgtgttttcgtaaacaaataaagcaggaaccaaagtccatcatatctaaagaaatacttgaaaccaacaagcttatgttgtttctccaactttggttcaccattcccaaaatcaagattgacaataatctcgagtttgcaaagaaagattgttcctcttctaggtaataactactaagttattgtcaatattgaaaacttgtcttgtaatggatgactcttttaattaatttactatactgaatatctgcagatgtggacgttgcatcaccatcacctttcaaccaaatatttgttcatgaccggaggctaacaaagcctgtgagtacactgagagcatctaaagatggaaactcgatcccatcaatagcagcaaacgtattgctaaagagacttttcttgacttttaacataatcattggaatgcttctgttcgcaattaacgacttcttcccattgattaaactcaatgaacggttagggatgtcctatatgatggtgttatgttttagttgcatatggtgccttgttgacagcttggtgttcgtaatggcagggatctatcgtctgattcatgtaatctgtgccacattcaattggccggttttgagatccttgttttactactctttcgttgttttgaaagaattatttcttttttattgtaagctaagaatttgcgaattttgcttgggcatgtgtagttttgtcataatggtttcttcgtttaaataatagttttttttttaatatgtatttatttcttgttagagcatctccaatgcagggctctcttgataatttgagagagttttgttgattttattgattaaaaaataatcaaaactagtcaaatttgagagaaacgactctctaaagagaggttttgggagctgagagagccggacacgtggcactacgtgataggttgattgtttttaacaaaaaggaaaaaaagatcctttttttctttgctcaggacatctcgttcccgatttcgacaaaaagctctatctctcctgaatttttccggtttcgttcagtgtggtgagttaaatcgtctgaaatgtggtgtatgtgattgtaaacgaatttttttaaagattgattgatttatggttgatagtttcggaaattttgttgaatctagtgaatcgatctatttactgtgatgtttgtttctgatgagatcgtttgctgtacttgggaatacagattacagaggaagaaattctcaaggtttctttgatatggagatgaacacttacatgtgctatgatctcttgtacaatgccacttgactgatttgctttgtttggctgattactttgcttggtcttgtatagttgatgtttatgggctatttcagcacttcttagtttatcttgtctcagattttgtgatttttttaatgtcataaattaagaaactttaatggctaatttatttcagattaggagatttcatccataaatggaaaaaccaatttcagtgtttatgttttgagctctcgaatgatcataatcttttgctgcatcagataatgtgattcttgagatgttactggcctttgactgtttgttttcatgaaaactgttttcttttccttgtgtgtgttgtttatgagacttccttgatggtgttttaggctactggtagctcggttgatcacatgacttgctttggagatgcagtggtggagagggatttttatccggagatgattcagtgagaatgtcggtgttgatgccggaattatgattttctccagaggatgctgataggcttgtggcttcgtttagtggtggatggcaaatgagaatgtcacttggaaagaaattgcttcaggtatatgagtaatctgattccttaaagttttatcttttcattgattttgaactgaaagctaatgtgaattgtgtatggctcttatctaggagtacatggcagtgacaacttgaaagatgatcaattattcttcatgtctctcattctttctcaatttatggtaacttatctttgatcattcaatttacaacatctatgtttgattctataattctatttcttccacttttgcctgtaagtcttttttttttttttggtaagccaagggagacaatgtctcccaagattaattaatgaaaaataaaattacattcgcacttaacgtgaaaccgtagctccactagtgtaatccaacaaaataaagcgtaaagaatctggaaccaaactaagcaaatgaaaacctaatggtaacgaaaaggcatagttggctaacccgtcagcaagacggttagcttccctataaacgtgtgaaatacggactctccagtcccttgatatgaagccatggcacaatcgtaccaggaaagacagcggatgtacctcgtttatccctgtcttcaacaaacccacaacaatctctgagtccacctcaatctctagccgtgtgactcgtcgctcccaagcaatgtagaggccatagtacactccccatagctctgccaaaggtgctgaacaaactccaatgttcagagcaaaacctcctctccaagctccttcctcatctcgtagcacaccaccagcagacgctaaacccggattacctctggaagccccatccgtattaagtttccaccaaccttcctcgggtttcgacctgtaagtcttttaatcaaagacacaaacaacatttattcttgttttacaaagatacaaacacacttctaatttttattttttttccaaagaaccccatttgagagaaactaccattgtactatcattttcttctaaaaataaatacaagctctcttcttacaaattttcacaatttatattaaacaatgggagagagccccatgagggactctcaccattggagatgctctaagagagtcattggtgcatagagttaactctacaactatttccatcttattttggtttttgtaaatctattttcatcttgttatcggtttaatgtgaaacccgaatgttgtacgatttaggctttgtgtaaaaagaaattttcacggaagtggacgaaaaaaattttgctctcaccgtttgtcaaagtgagaactggttttcacggtttgtcttttcattcaattttggaccaaattaccctgagaaaacttaataatggcacaaaccaaaccgtgcagcagttcgtatcggttaagttgatggcataaaccaaaccctacagcagttcgtttcggtttagtttatgcggttcagttttgaaaaagacaaaaaaaaaactgaaacgaagaaaccgaagaaaaagaaaaagagaagagagtaacagagagattcgagagagaattagaaagcgaaacgaaattcagtatccattgcttcaaaattcgacataacttcgaattgttgggtagttgaattgagccactgaactcccacaaccggggaaagttactgtttctcccggcgaagccaagagaaagttactgtttattccggcgagatagcaactttagctatggctgggaataaagcaaacgacgaagtcccgaggaagcagcatggtccagggaaggagaagcgggtattaagagtttccccgcggagaaaacgctctgcgacaaaggcaacggaggaactgggttagaatctctcatttaccgtttgttgtttttgggtgtatcagaattgtaaagcttgtttgattaaagggttagaactagtcggaatttagcatatctttaggataaaaaattgagaagtagaattggaaatctctgtttccgccaaaaatatgattttgagttataatctggaaaatgtctgtgtacgtacactacttcgttttgcttaacagtatatcacttttaattgcaggtagtccaagtgttgctccaactgaagatcttacagttgaagagttaccaccaagactctttgctctagaccggtacccttccgagacgaagatgaacgcgtactctaaacaggagtacatttctgacatagcaaatgtactaaaggcgaaaccagagatgcagtttcttctcgattctccatttggggaactttttaaaataccccaaaacaaggcatctttcaatgctaagcttgtccttggactaatatgccgtcagttagtgacaaagaaggtgaatgagatgtggattgtattcggcggtcatccaatcagatttggattaagagaatttagtatcctaactggactggaatgtgggaagtatcccaagaagaaagacgtggaggatgttatcagtgtgaaacctgagtgtgagagtgtttggaagactctgtttgatgagaggtttggggacacggttccaacaattgctgatttggtgagctggctgcaggaggaggaaagcatggaggggtggaagcaactggcactatctcttattattttggttgacggtgtggtagcggcccacagtaaccccaacaggcctacttcgaagactgtcgagatgacgaagaacctggagttcttctgcaaatacccatggggaagggtgtcctttacccgtactttggggaggatagcaaaattccaaactccttacgatgctcaacaactaataaggggtttacttgtagggtattatgcactccatggcttcccattagctctccagcttttagctttcgaaacaatcccatcaattgctaagctaggacctgatgatgtacctaacaggacatttgctgagaggtctatccatcgtcttgcctcattgcgggcaatccggacatctcgcattttggagtgtgaggctgctgatgaggtgtgttaaattgtgtatgtacgtgcataataagtaaatgtacattatctatggttaacatacttatttgtgtaggttgaggtcaactatattgtgaaaccagctgataatgtttgtcctccatctctttcatgggatgatgaagttgatgatccaagggttgattacattgaggcactgttgatagatgggcactagtgacaggaggatgaatgggttggaggctatgctagagtaccaaagcaggtgcgcccaccacaacaagaggagataggtaagtataagtataaaggttgtttacaattttttttgttattgcacctagaagaaaaccaattaatagcagcaactggtctattgtagatgttaagaggaaacgaaatgcaccgggtccgagccctaaagaacctgctatgaaaaaacagaaatctgaaatggactgtgataatgaagaaaatgttgaggattgttttggagagcctgtgcctaagaggtttatttttgaaatgaggaggtctttcaaggagctggaagaccaaatgtatcaaatgcaagaagatatgagactttgtccgtgagcagatacgtgctgcccttgatccaaaaggcaaaaggccagaacaaaccataccttcccatgattcgcggaaaccacctacttctatggataaggcaccggttactgcgaagaagccatcgagaaggatgtctacaaaaggaagcacgggaacgagaaagtcttcaaggctgactcgcgtttctcatgatgtggacactccagcgctttctgttggctgtaattccaaagaggaagatttggatgtccctggtgtacataccactactgtcggcggaagaagaaaaccttcaaagccgaagaaaaatgtttcttttgttgttgacactactgagctatctgattccaataaggaagatatgcaaggattcattgatgaacaggtaagtcatgtacgtacattgctaaatattttataatccatatattataactgtactgtctgcttcgatacagtatggcggtaataataaaagtgattttactgcaaatgatggattgaattcttcggccgctgaagaagagatattagacactggatttttaatagttccttatgctggatccacacaatcccatctggtatgtcgtctactaatactcttaacaatctgtttaaatggtgtacgtacatattcgcttaagaagttagttaaactatgtttcaggatagaggaaacgttgttgttggtaagactgtctttttaggttcaatgtctgggactgtctatgttacataggaagggaggcatgtggaagaagctactgttgacaccgagatggaagaagttccatctaatgtgtctgcaagagtttcaaaggtagatcttgtggtattcgttacatacagatttccatgactatatgcatagatattacattaatttctccacttatctaccgcttaactctatggtagcctatgtttcaggataatggaccaaaggatgttgttgaacctggcttagttggtacccatacaggggccgatgaaatagctgatgctgacaaagagatggtagacaatccatcaggtttaccttcaacatctgcacaggtatgtgttagtcacttgttctttttccatatgtgtacgcccataagactttgaaaattatttttgtttcagaaagaagcaagagatgccagtgctgcgactgaagctaatggcagcgagtcagaagaaacttatgagccttctgatggagatacagctcacatacctggcacaagtgtacgtacatttttgtcactatgttctgtgtacatatatattgtttcatacattactaaaaagttgctttccgatgataaattctacaggttgaggcggcaggagaatccaaattagtgacagggatggaagttgaaatacctgagaagacccacagtgatcccccgtcaccatttcaagtagttaacaatgtaagctaactcttgcaacaaataaaatgtactatttactgttcaaatgtataaaatttatattatgcaggtcatacgggagttggataccaaagccgttggtgatttggctgcagctactaatgtggaggtaacaatttgtgtgtttcaattcctattctcggaatagcatacataggattatatgtgtacattatatagacttgtgtacgttaacttgcacaggtagtcatggaagagccgggtattgtcgaggggtctgtaagaactgaggatcctaacccagggtcagatgaagcagacaagaccgatattcataaaaataatgtatgtacctgggaaaacggtttatttccccatgagaactatcatatcacgccagatagagcccgatctttagcctctgtctgtatacccacaaaactgaagttaaatgcctaattccccacgaaatcaaagttcgagagctagttgtccccgattcaaaatttcgtcatcttaaaccccatgtcgatgggtttaatcggtttactgttttccaatcagataagttaacccgctaaacctatctttaaccaattaaaccaaaatttctacccgatttacgacccattactcttacaaccaaaccccccccccccccaaatcgaaaccctaaagtctaaaatccccaattctaagaaccctagagagaacttttttcaatcgtcgtcttcaagcttcaatgtcgttggtcatgcgtgaccctgattttgttggtgatgttgatcctgaagctgaagatagggatcaatttcacatggaggaaatgttaaacgagtggacagacgagccgtcgatcctagatagggatcaatttcactacacatgaatagtgaacagtgatctttcaagattacaagaatctaaaatatgaaaacacatgaattatatgaaatagaggattgacattaccctgttttttgcagctaaaccacaacgaaagtatctccggtaaggatttggatcggattttgaaatgagtgcaacaattccttccccgcaccaacatctcgttggcactccgaccactcttcctcttcctgggaattaagctttttagggttcttaagatttcaatttgggatttttaggttttgattttgtgtgaacaacgacaatgggtcgggttattataacgaagaggatttttttggtttaagcttcgaccgaaacatggttctatctcgggtttacgcaccaaaccgacgaaattttgaatcggggacttctagctctcgaactttgatttcgtggggaattaggcatttaacttcagttttgtgggtatacagacagaggttaaagatcgggctttatctggcgtgatatgatagttctcatgggaaaatagaccgttttcccgtatgtacctattttaaacataaaaaacgtatgaaactgttgttgacaatcatatttgttaacaggatgaatcagacaatgctgctgctgtcgaagccaaagaagaaaaaaaagcatccccaaaggtcccaaaaaaagtgaagaagcaacttatctatgaacaggatgatgcccatcctcatgattttaaggcaaaaacagtcttggtgcccgatgttccaactcaacagacagaggttgttatcagggctggaaatgtctcatacaaccccctggacatggttgacccttcaaaagtagaggaattcagcaatatcattaaaggaccctctgtgtaagtacattatattaaaatggattatttaatatctcaatcatcatttttccaagtcttaagcttgttatcaaatatttttctggatttacaggattcacactcttttcgggtttcgcaaagtgcccaacgagttctttgcgaaacttataacacctggtgaatgggtcgaaagtttggtacattgcatttatatacgtacattccttgttataaattgtacatagatgattaaatttttcgtggaagtgtacgtacactgatatattttttgaacatttcagcatttagaaatgatggcaatgttgatgtggcacaagaacggggaacagatgatagcaaacagatgtattgcattggacatgatgctgacgcatctacttaccaagcgggtgggcgacttcaggaagtgtattaataagaatgggttcaaatggggtaaatttctgtccgacattgctaatggagtacacataaaccgtgaacccaatatgaagtggctgaaggatgtcgatgttgtgtatgctccgatgaactggaagagtgaacattgggttgctttgggaatcaaccttaatgaacggctaataactgtgtatgacgctttaatatcgcacacgcgggagtcggctgtgaaggcgagaatgactcctatttgcgaaatgatgccatacttagtcagagcgatgtgccaggatgtattgatttctccgtactcagttgaaccttttgagtatgtgcgttgtcctaccgttgctcaaaacccaactacaggatattgcgggccatagacgatgaagttcttagagttgcttgcgtttggacacccttttttggaattgacaaccattcgagaagcagatatggtcttctaccgtcagaaatactcggttgacatctacgagcacggcaagcgggagaccggtactgtgcacttgctttaatcgtccaagaacaatattctgattctttgcgactaattattatgaagaaacctatcttagatatatgattgcaactacatttaatttggagactgtcagaagttaatttagtttcctcgatcatattgtcgtacacatcgttcacttctaattacataatgtaaatgtgtacgtacatatctatatgtctcgtacactgcattttaactttataacataactcaagtgataaattgatttgacagccaacgcttaccaaaacaagtatgacattcatttcaaccgtaatttccccaaccaaattcacagtaatggttattaaagttaagaaattactgacaatctctgagtatctcatttcaaacatggttaacccgacttttcccgacgatttactctcgaagatagctaagaacctggctgaccaatgttggtccgaccttggtccactggtacgatcaggcactcgtggaagagacattgtctaccgtccggatgtcctcaaagatgccaatattctcaacttgtgtaactcgcccgatgacttccaagctggagggggccacaatccctccggatccgctgatgaaggccgacatcgaccatttttcttaaggtgttttgcagctaataatcctacggtcgtgtattacgaaggtatttgtgttctaacgcatgaacgaaacatcattggagccatcaagatcttacagcgtcatgctccagtacaagcaaatgcaacacttgcatgcgccattgtattcatatgtgctgggtatgattatatgggcggcttgtttctacagctcttcacccgcaaccattatccattggactcggttgccactcgagttttgggtgatgagttcatcgaggaaataaagaagtttgaccctccatacagcaatacatatggtcctacgttctcttatcctaccagccatggaattagtatgcctccttgcgccttatattgttacatggtatcaggagctttctaaaacgtttgcaaccgctgttacctctggtcgtgtgccaagcgtgttaatcaaatgctatagttattccattctactttatatgtttgtttattttatccgctatgtcatgtttcaaattatgataaggcttctactatgttgtttatgtttatgttgaaattatattattgcttaagaaatttgcaaggtttgttatgtttctcaaattgaatatttttcagccaaattcgcatatgatatttagttcccgtagtacatgtaaatttggatattaaaatctaagcgtccacaactacgtacacgtgcatctaccaaataatacttaaaggtttttggtttatctcggaaaactagatatggacgtacgctagcatgagatatcaactctaacgtacactaaaaaatacacatgcaaacatatgaggtctttggtttgtctcataaatggtgatatttatgaatggacgtacactgatagtacactacagcgtacactgtttgttgggcaaatgtagaaatgtaaatgtggacgtacactaaaacgtacactacagcgtacactgtttgttgggcaaatgtagaaatgtaaatgtggacgtacactaaaacgtgtactgtaacccaatggagaaattgtttcttcgccaggtacactaagaccagtgtacgtacacgtttctaagagacgactgaattcccctgtatctccgccaagtacactaacacccgtgtacgtacacgtttcaaataaacgactgaattcccctggatattgagcagtctgttgagtgagactgacgtcttcctcaagatttccttgtacatattcttctactattacatcgtgtgtggtaggatacagggtacttcccccaatagatccatccacaccaagataatcatcacacccatcatcatctttgttgccctcctcaacttcatcctcttctgttgtatcgtcttcaacatcggcttgctcctctacatcttcattattttcatcaacatttgtagcactatcaaacacacggtcactttcagaaacttcaccatgaaacctagagacagtattcccgaacgccttcacggtattattgaaagagacgaacaagttgagagaaagatacccaccacgaaccaaaaaaaacgtttcgagacccatctgactgtcaatgtatacaggagggcgtttagtattatcagcactgacatttctcccggcatccagtagctaattatgggattgatctcggtcactacaagaaaacagtcgctttgcgaggcaacattgcgaggaaagaaatctctcgcaaatttgcgagagaattgcaagtcgtttgctaggaaatagacgcacattgcacatccgtagcaatatttgcgagggacactttcctcgcaatatttgcgagggaagtacgagtattttgcaagaacaattttaatcgtcgcaaatcttccgcaaccatctcgcaaatctttaccctaaaccctaaaatacttaaaagtgttttgggatctttgattttcatatatcaatgtgaatctaagtgaccatataatcatacaagttgtttatatggtgatgcacaaaaacatattgtataggtttcattattaacattatgaaaatgttaaacactcgtgattcaaattatagaaaaacataagatcatcattgatgtatttgaggaaaatgcacatttgaagtagataattaacttcctaatgatccaaaaaaatgaatccgaatgattttgagtagtgttttgttgtattttttcaaattgattctacattgcgagggctttgcgaggtatttgcaagctgctcgtatcacttcgctcgcaaattttttaccttaaaccctaaattatttaacatattttgtttgtttttttgcggaggatcttattagaaacaagagaaaataaatcagaaaatgaataagacatgattaataatatttaagcatgtcttttgttttttaaaaaccctaataaagattttgcgagggatttacttggaggcctcgcaattcccttgcaatgcttgcctcgttttaattggttgttttggtggttcctcgcaaaagcctagctatttttgcgagggatttgcgacgtgtcaaatatctatatatatggtgataacctagtttgaactcgctcaaaccacaaccgcaacatcgcgaaaccctaatctctctgattttttccttcgccgattgactctcttctccaatctcttccaatcaccgattcccttcctttctccgatctctcctctctgattcacttcatgcaaaggttaagttttctttctctgtagatcttcgtcgatttgttttagggtcttatttcgtgttttaatttgatttagggtttctttagggtttgattaagggtttctttagggtttgatttggggtttaaatcaatttagggtttgatttggggtttaaatcgatttagggtttagttctatgttttctttctctgttttgtgaaagtttacgtttttttgcctctgttactaatgttttttcctttgtagatcttcgccgatttgttttagggtctgatttcgtgttttaattcgaaatagggtttctttaggttccattagggtttgaattcgggtttgaatcgattcagggtttagttccattacgttttctatgtttagttctatgttttcttactaacgtttttttcttttctcgtagatggtatctgaaaacgactacactaggtatctatccactcaacaagtacctgttcctcctactcgtggttccatatctcaagggaatgcatctagaaactgtgatccaccctcacctgcgagtcaaaaccaacaagccggtttgtctcctccacaatccaattcaaactcgcctaatccatctcattcagctactcaaccaccaactgcccgtctcaatgatatgacattggatgagctcctcgacagtccggggcgtcagtctttgcagaagctagatccaaatcgtcctccgggaactctctggtaaggatgattttggttatactttaaatttagtttcagttttagattttcggtatgtagattctcattgtattttaggtatgtcgactaagtactaatttggttatacattgtattttaggtatgttgattctcattgtaatgatttttttttgtaggtttgacattgatggttcaattgcagcttctgtccgaaaggtttttgaaagagatttcaaggcacctcatgccaattggacacaaactcctaaagcagtgatcactcgttggttcgagacttttgcggtaagtgaaattgcttagtttagatttgttttactctacaaatgtatgtgatgctatttctgactttgtttttttattttgaagcaaatgtacaactgggacaagtccataaatgatagagttagagatgagtttgagaacaagttgaaggataggatgtctgatcaaatttgccggtggaagggaaagtggaaggagaaaggtgatgaggcaaagcctaaatggattgatcctcaagtgtgggctggacttgttcgtttttggcgtgatccggcatcagaaattaggagtatcaacagtagaaatgcccgatatcctgatcccgatgaccttggtatatctaagcaccgttctggccagacctctttcaaatcccgtgccagaaagcatgtaagttaactctgttttctttctcagacatatacttatgcatattgaactgacacttaacttttttcttttgttttagtctgaggagaccggtgatttaactccagattttctggtggttcttgagatgactcatcgcaaacctgatgggactttcagtgatggaaagtcagaggagatctacaaggaagtgtcatcaaggattgaagaggcagagtctctgctgcaattaggggataatatagagagctctgcttcaggtgggttattagtggctgtcaagaacaagatttatgctcaggtaattctgtatattttcagttcagagtgtctttagttagtacttagtctttgtgtggtgtgtgattatgtgatgatgttagcagcatacttgtgtgattatttcattagtacttagtcttgtggcagtccactcattatattgtgtggtttgtatcaggttgctccaaggaagaaaggaaggttgtatggggttggttctctacataatgaagcatcctcagccactgttggtccacagcctcacaatgatccggttgttctatcggagaagcttgctgctgctgaagctcgtcttcaacttcaggctgagaagatcaatagtttcgatgcctattttgaatacctcgcagaaaaggatccagtgtttgcaggcatgtaccgaagaccatctgaaccagtaaatgcagacgccacaagaccggctgagggcaaccagaccggaggtgatcagaccttcaccgatcagaccgaaactgagacggagacaagaactggtaccatacaaggctcctctacttcacaagctttttaatttctctctgttttaagacttggtatatagttgctaatatcaacttttgttttaagacttgggtttgctaatctcaacttttgtaatctcaacacttatgtttttgaatcatttagcagttaatatttttgaatgtctactgatttcatacatgtttttatatgtttactgaaaatcaaattaaaatcaccataaaaataaatcagcataaaatttgtaaatgaaaaaacaaaaaagactcgcaacagacttgcaaatccctagcaaatgttgcgagggaagtgctacacttatgttttgcgagggattgtggtccccgcaaattttgcgatggaataggtttctcgcaaaatttgcgagggaattgcaagatattaaatttgcgagccgcgatttgcgagcaatgacgtggcgtagcaattctcttgctatacgcattttgcgacggatttacgaagaaactttccctcgtaaaatacgtgttttcttgtagtgggtggacttcaaactgaaagcctctcggagtgtacggacaaagtccgtgtacgtcatggtttcctgaacgcgtacacaacgaccaaagatgccttcctcaggttcaaatttccattctccttctttgcatttccactcaccgaccatagtaaatacgggaacatccataacccacctgcatcataaattcaggagacacacattaaatgcaactgaaaaatactatacatataaaaaacaaatggaatgtcgatactacacatttataaacctaaataccaattatcatttgactattttaaacaaacaaatatagatttttcaaattttctgataaaaaaatggagttcgaacacaatcaagatcctaatatgacataacaaaaaacttcttaaaagaacttcattacttacacgagcaatgcttgttttggttccaaacttggtacaaaaacaagatcaacacttcttcagcagcaatgtacgttctcaataattctttgttcctgggttcatcttctttatctcaacaatttttttattaattattatcaataatttttttaatattatttgatgtaatgatgattttgcattaattgtgacaatagtcacatctaaacttttttggggcattaaatgttgatgtcacttcggaataatggaaataatctcacttgtaacggaaccgaatcgcgtcaacgtgaaacaaaaaatcttcaactgaaccggaacagtaactaaacctgctaaactaaactgtacatttcaacagttactaagagagaggtgcaagggcagaaacgtcattttgcaggcgaaaagacaaatggtaaaaaccacatttgactttgacaatccatgaaaataaaacatgatcaacggatgtggcctgcaatttacccttgcgtaaaatcccaaacttaattttgagaagactagagcccagtttacgaaaatgtcgaaactatccccactgatttgcatattcgtaatcagtatatattgtaaaccggcttggttttatgatagtacacataggaaagaaaaaaaagcaaaaaaaaaaaaaagaaaaaagcaaataaagaattaagagaaaacatattttgaaatttgaacagcttaatcaaagagaaaaaaaaaaagagaatttataggaagagaaggcataaattattttgagatgttgattagcctcttcgtcgtcggttattctaaactggtttaattaaagaatagtgtaatatttatgattttctgattttctccttcgagaaactatatttgttgtatctgttttgccctaaaaaggctatataagcctactataatgccatatcgtcaaagtttttgttttgttttttgttttcttgttttttacgtgcaagtaacaaatcaccatatcgtcaaagttacttgcacgtaaagatacgagaaccaatagaggaaattatgcagggtttggcggcgaccacagaccgtggctctctgagctatctaatggtgatttggtttatcttcctttgtgttcttcttgagtgcttacgatgcgcaatggctggaagctatcctcagattccaattattagcgatgctgcttacattcataggcgattcagtttggcagattattggcccacggctttgagatttcccaagcctaaaccaagtatttgagatttgagaaaccaaaaaaacactaattatacaaatttggcagattatggatttatcattcatataatgattcttgtttgatgacaaaaaaaaataaataatgattcttgttattaacttattagtattagtttttcattagcaaaaaccggcctaatttgtgataattgggcttttactaacaaaggcccaataaggtggagtgctttcactaaaaccgacctaaataaaatatagccacctcgtcaaaatcaggtagcttcatatttcttgcacgtaaagtttactctgtctcaccgattttgtttttttctttgttttttttttgattttttaatatcgaaaccctaaagcctcgaaggttctctcgccggagaagaaattatgcagggtttggcggcgaccaccaccaaccgtggctctctcaccttcctcgctccgaggtaacataatcaactcatgatttcgtttctccttttcgatctctctctctctggtcttttcgttctccttcttcgattctggagttcctcgttattttgatgatttgtgtcgcatcggttgattcttactagtcttcgatttgctatgatatgttttaatctttcgctctgtactgtttgaatcgtcaatttcaatgaaactcgaatcaatttgcctacaatttctgaaattgaaattgggttagaaatggtgtctcttttgctttaagatttggttactgcgtttctccataggcttttaaaatagatttgatgttgtgtttaccgtttttgataaaccaggaaccatagtccaatttcaaagaaatttgtgaatccaagagtgttctttcccaacgttgattcatccgcaaaattaagattatcagctagctcaatttcacggagatgtccacgagagattgctcctctttcaggtaattatttggtttcaagttttattctttgcttgttctgtaaccatggctttgaggcttgacagctaaatcatgtgctctttgtgattctgcagcaactgcatctgtggactttgcagcagcagcaacatcatccaaccagctctttgctaatggcttgccaccattagctcctggtttgagaagacaccggagaccgatagagcctgcaagagtggctaaagatgacttctttaaaatcaaactgcctaaaatcgcagagagacctgaatggtggtggaggacgttagcttgtgttccttatttgatatccctccaaatatctgatgttggtttctatgtccaaccttttctcgaaaagcacgacgctattggggacatgatatatttcatcccgggagcgataaacagatggccgacatggttcttcatggtgtactgctacttgggttatatgtgggtggtgaagaacaaagagctgcctcattacttgaggtttcacatgatgatgggtatgcttcttgaaacagctcttcaggtcatatggtgcactagcaatttcttcccgctgattcatttcaaaggacggttcggaatgtattattggatggccatcggattcacctacatatgtctgcttctcgaatgcatacggtgcgctcttgctggagtctatgctcagattcctttcatgacagatgctgcttccattcacaccctcttcaacttgggaggttttcagagaccactcaggtgaaaggtgaaaaactggccctttcgggtgttacatactttggaataggaacaagtctcttatcgagtctacacttatatgaatttagtctttttagtgtcagtgtcttatctcatgtgtaacacagaactctctatgagagtagcttataccaatgattttaaagctgaataatccggtcggatttgtccatgatttgaaagtacgcagatcaattcagctctatattgaacgtatctcacatgttgttggattgctttgcgaatttaaatacttcaaacatgcttttgtaatttaattttagtctattggtagactttgtacataactcataaccgccttaaggtccactggtttaattacattgaattttttttcggttaagtgggctccatgattccccacaggacataaaaaagtgatcattattggagaccacgtctctgcaacatggtaccaaccaaatcacaatgtcagtaattttacattccatcttctttacaaagtcttccttggtcttgaaactcttgactggttctaaacacagctcattatatgtctatttagtattttacacattggtttcagacggctcttaaaggtctctctagcttcatgtcaaccatctaaaccaaccaccattaatgttcctctgcccattttcaagaaattagaaatcatttttctctaagttcttgatcgtcgccatgaacgatcttatctcaagctcattcaagagatacacagacttaaaccaccaggtccaactcgatgacatcgagtctcaaaatgtttctcttgattcaggcaacctcgatgagttctttggatatgtcgagagtgttaaagaagacatgaaagctgtcgacgagattcataagcgtctccaagatgctaatgaagagtccaagaccgtacatgattccaaggccgtgaagaagcttcgtgctcgtatggattcgagtgttacagaggtcttgaaacgtgtcaagatgataaagactaagcttgtagctttggagaaatcaaatgctgcgcagaggaaagtcgctggttgtggtcctggctcgtctgctgatcggaccagaacatcggtcgttagtggattggggaagaagcttaaagacatgatggatgattttcagagactacgaaccaaaatggctactgaatacaaagaaacggtcgagagaaggtaaattttatttctttttctttcatttaggtgttactctgatccaacaaagaccaaatccttttactatgattgaacaaagatcaaatcttatttcaaaaaatgtttaatctttcgaagtaagagatggtaaggttttgagtatttggttgaatcattgaaggtacttcactgtaacggggcaaaaagcggacgaagagacggtcgagaagctcatatcgagcggagagagcgaacgttttctccaaaaagcaatacaagagcaaggtcgcggacaggtcatggacacattatcagagattcaagaacgacacgacacggtcaaggagatagaacggagtctgttagagctgcaccaagtgttcctcgacatggctgctcttgtcgaagctcaagggaatatgctcaatgacattgaatcaaatgtctcaaaggcgagctctttcgtcatgagagggactgatcaattgcatggggctaaagtacttcagaggaacaacaggaaatgggcttgtatcgccactatcctcgctattgtagttgttattgtgattcttttcccaatcctctttaacactctacttcgaccttgatttcaaaatgtaacttattgttttctccaaactccttttgttagagccctttcgatttcttgtattgaatccagagctgaagcgagagtttaatttgaagctctctctaaccattcttgctactgtaattgctttatatctaaaattttgggtgacatggatcgttttgtataactttatatggaaacctatgaggctatgacctatgagtacaactaaaacacaatgaatttacattttgagcttggatcattacctgtcatgaacattgttttattctgaactcatcagataaaagtgtctgaagaagctcctttaatctctcagcaccagggcctggtttcaaagcagagtcatccccgcggacagagcacggatcagcgccattttccgagctaccaatgcaccaagctcctgaggaaaaccgatgagtgcggcctaagagctctctatcgatcttgtctaatacaggatcgttcttgtggaactttcgagcaaatggggctttgcttttgaccatcttgtcgaaatccttcatcgataaagagtttgggtgttgctttggaggatagtcccaagcaatgtagtgcaggtcatgcccaatcgcggtgctcttgaactcttcagtgttacatatcagtgtgtgaaagtatccttctggagaggatacaaagttggtgtagtacatcaagatcgtcctcggaaaattgtcccatcccaagattgagtattcaagaaaagaccgagtcagaactacccacgccgagcctgcaagattcaagacaaggcagataaaccatctttctttcatccataaccataagacctgtgtatgaactaccaaaatgaagatgctagctaacctgtgaacagcgtgaaagatgtgggaagtgaacggtgttgagtagtccaagcaatttcggttttcttcgataggtaaagaccgggatcaacaatgattgatttggccctttggttcctgcaaaagaccatgagaagcacatcttattcactatttcaagataatgagttgctactttagcggttactacttacagtttccacccggtgagcttcatatgttcaatgaaattgacattccgagacaaattcgcaaacacatacagcatatctgcagaatcaggaagaaccaaaaaacgtcactaataagtatcaaagaccaaaacatgcaacttcaaaacaaaatcactaaccatcttgtgtcacaagaggataatccgaggcactaagattgatgaaccaatcccaatccaagctttctttaagcaaaatcgccacggcctgaagcgtgcaagcaatcattgtagggcctttataagtaaccaaattagactgagacataacacgaacgttctcaacttcacggaaagtttgatcactcttcacagacattgcaagctcaagcctttccttaggaggagcttcaagatccaaatgcagaacatactgatttcttggatgatacacagcttgcaaagtcctcatcatcctaagactatcacctttcgtccccgagatcaaataagctaacctaggaacctctgaagaagtcgaatccaacgtcgaattcaaagacattctcaattgtgattctacaaagtaatcatttgtttcttctgagagattatcaaaaggcaatggctcttccacataagaagtctcgagttggacataaaggacagacatcaaaagagtaaccgacaaaaccaagcttgctaaaaaagggaacatccattttctatctctgaaaaacctaaaccctgaatgtgaactaacatgtctcttcaatctcgctaatgggtctctgatccaaatcagcttcctatacactttcttcatcccccccaaaaaaagatcaaaactttctcttgaacacctaaccagctaatcaaaatcttaatcttttgtacaaataaagataaattaccagatagagattgttgctgcagagttttcagaatagaggcaactagaacaaaaatgacaaaaacccaaaccaaaagctaattaatagaagaagaaagttgataagaacaccaacaaccaatgcaccaaccgaataaaaggaacagtttttttttgctactgtttattgcttttggcatgtcagctaaaaaagcttgattagtcttaagctaagtcagatctaatgacttaaatcggagtttcaagaaccgaacaatcaacagatgcttaaagtttaagtctttgtgtctttcaaaaaaacataacaagacaagtccttggactaagacagatgctgctgaatgaaattacggcaggagcgtaaaattagggcagagttgtccttggacaaaaacaaagttaatgagggagacacaaagagagaaagatgtcaatttcttcgaagaacaaaacataaatggattagattcggagtggactctgaagagagaagaaatgagaaacagaagcgttgagaatccaaaaagtgattagtttttaaaattcagggttttaacttaaattgttggcaaaatcaatctgattaattattttatcatatggtttttttttctttaataatgggattagcttaacgttgaatagtctctttaacgaaaaacgttgaagctgaaagtctctgacacgcaaaaaggcgcgtgaccgttgttgaatcgaccatatctcacgcgcgcatgacgaatgtgtattacacgaaagtggacaacgatcaagagaaataatgaactgtgaagaaaagtttgctaatcaataactgtttagaatataacttttcgttcttccaaacttgaactagatcttgaataaacagtcatcagcatatccatttacatatatcaaaattatgttttgtgagagtaaaaaccaaagtcgaaaatcatctcaactgctctgctactcttggacattggtcagaagatagtccagcattaaccccctgagactgaagttgcatcaattgtcgttgattaagctttaaccacatatttatggggaagcctaagtggtgtttgctggttgaaatagctctgatttacaacaacaggtcatggccaacttggtgttgtagtcaacatctgctcaattagctccgggtagtgcatcattagagctagacttggcacttcttcgttctgcttattggtcccaggtcagcaggtatcttgacttcctccagttaacctgactcataaggctaaaccacattctcagactcataagaagctagtagtttttttgataattgtattataataactaaaaaagaagactggaaaggtgaaaccaacagacgagagaaactgatgaagtacacgtggcatccctaaatcaaccaaacctatactccattgttctttcgaccaaaccctgaatctccctcatctctcagctccattgtttgttttctgcttctttacaaggagaaatggtactagttatgaagcttagaacataatcgatcttcctctctatcttcatcttttagctctgtccctctcgcggttctttcagctacgttttcttcttgtgtttctgagtgatgagtgttactgttctaatgtcaaacctttgatatttctctcagtctcattcgatgtcatagagaaatgggcattgtaaaaacagaatctttatgattactatattgatctttcactcaaaagaattgaatttgatgaaaaacgatttgctatactactctgttgagaaagtgaaaatctttcttcatcttcaattttcattgtgattttttttagacttctttgaactaaacagttgatctataataatctttaagaagttgcacaaaatgggcattcaaaaaaagagaacctttcttcggactagtaataataatacctttagtatcataatgaagataactcttgcttgttctagactttttgaatactaaacaatcatcatcagcaattcatttactgatcaaaccaacattaaagtcttgctcatttgtacacataaacacatgacatagtgaagaaattgaccaaaatcatttcaaggtttacaagattaccagaatttcagaaactcaagagtcttcaaaacccgaaaacaaaatggacccaatagaggttttgtagcagaactgaggcaaattcaacgaaaattacaaactccaattgctaaataaaagaagttaactttggaattttatcacagaaaaaccttgtttagttctaaattgaatcaaatatgatgacttaaatctagttgaagaacctaactgagaacgaagacatgctcttttatccttttagaaaacgtaagaggacaagtccttcaaaaacgaccaatgctgcagagatagtaaggaatcaaaattaaaacgcataagagttcaaaatcttaccagaaaatgggagaaaatccattggacaatgaacatcaaagcagtagctacaaaaaaatattgaaatatagggtttcattcatcagactttgtgatcgttttgggggaaaaaaatattgctttcagatataagatgtgagtcagtgagtgtgccttttactaatcatacggaagcgttttaattcttcaacagctttacctacgaatacgatgactgactgatttatgccacacgctgttgcgaggttgaagttccctaactattgggatgagcaaagcaacgcgttcaagaatcgcaaaaagatgagctttaaagcaaagtttgaggtcaaaaccaagcacaacctttagatagtacgtaaaattatagttgaggttttgtgacactacgtagatgctggtaaattggcaaggattttacatgaatgttgttaccagaaagtaaataaatgttcaatctctgatgttctcaagtaagtgagtcttattgggaataatttaaactcatgttcttcttgcatttgatttctttgccactctcttcttctatctcaaatctgtctatactatctcactactgggctttttattagtctacaatgggactcaaaataaggctttggccaacatcaaaaagataagtcacaaaccaaaactaaattcagagtcttttctcccacatcggtcactgtactcattttgtgtttgtttatatattacacgaaccgatctttgttacgtcgagctaagtaacatgagcttgtaacccatgtggggacatttagatggtggaacactggttcgggtccacgggccggttctgttgttggcatgtttctgggctgcccagtccaagctgtgagtaagacgtgtgtgtcaagcgaaggcttggctcaaacggcttctaaagttggagggtaatgcgtgaggctggtttcacagagcagcgactacttcccgcttacagcagtggacggatcacagtttagcgtcgctcagaaccactatggcctgctggtccgatctcatatgaaccaccatttttttccttcttttgattttgttttccaaaactttctacgctttttgtttatactttaagagggaacaaaagcaaactttgaacaaagcaagagacgaagagttgtattatatagcttttgttctatgtatggaaaatatacaagttttatgctactcaaaactgtgacttaagagtcaaggttaaagagccacgagtaagatgtgtaggtatgatctcaatggtatcgttgtcatcaacaccaaccacccagaatgactgattctctttcaatactctgttttttgtgtataagaaattacccttcttgaggcagcttttactcaccttcctcttcaatcttcatcaactcgtttctcagttctttcacgttatcgttcaatagttgcagagtgttttgacgcaattagtattttgattgtttttttggttaagtttttgagtaaagcaagagactttactgtctttctgccctgttttatcaacaaagattcaacatttggatcttcatacttgttgctgtaaccccagatcattgaaaaataccaaaaaaaatgtgagctagaccacccgatcgtaatgttttctagagaatgtacagagctaatttcgaaaagatgttaactcaagaagaactagtttctcttcttttaacaacaacaatatggagactgcaaaaagatgttagctcacttctcacggataagctcaattgtatcgccatcagcaacacggttccacttgaatgacttagtttcgatcaatggtaactcactgcttaccaagtgaaacgcttcgtgaggcagatttaactcacccctctcttgcatcttaaccagctctttcctcagttcttcaacgttgtcatctgcgttaacctctacttgaatcatcttggtatcttcttgatatggcttcacatgtactgtaaacttcatcgggtttgtcttgatcttcttttccacaggcgaatctgaatctctaaggacctctttggctgtgcctgacgttgaagcttgctcggtggtttgaaccacttgatttgttctgcctccaaccgtcacagttgctgaatatttagggccaagtaactcatcaagtgaataagccggtagtgatgaatatacattgtggactctcctcgccatcaccctcgtgagctttttgctctccgatgaatcttgaatgccacagaactcttgtttcttatcatcaatttgttttgattgctcggtttgctcgttgctctgattagggtcagcatcaggagagatgcggagaaggagagattcgaagaggatcatgtaatcaatcttatgaagatcatcttcaagagccttgccatccaagtaaaggatttgtttcgaaacagggataccttgagacttctcgatcttctcttttatctgtaacactgtttcgccgaaatcaatagtaatggagaacgatgagccagtctcagtatcgatgtccacgttcatcgttgtagtttcaagatcagtggagagagactaaggaggaagagagaaagagaaactgatgatttgtgacgaaagtttgttaatttcgtgatttggccgcttaaatatcactagtcaaagaattctaaccgtcgatttctctccttactgatatgatccaacggttattagtcgcagagtgtttataagcaaattagtaatgtgatttttctttggttttagtttttgaataaagcaagaaactttactgtcttttgctctgttttgtcaataaagattcaacatttgatctttgtactagtgatacattgaagtagtaaaagaaatgtgaattagaatgtacacagagcttatagtaactcaacaagaacttatttctcttctttcagctcatattggtattacatgtgttaggatatttcagaaaacttgaagaaagactaaaaccaataagaaaaagagtttaagatcgattagtgatcaaacgttcaaccactagtgagtttaacatatccttgggaaatctgaatcgtatcaccgtaagcaacaccgttggtcaagaatgactgatcttcgtgtaatacagcctgcttatgcttgtgtattaagtaatacattccttgaggcagatttaactcacccctctcttgcatcttaaccagctctttcctcagttcttcaacgttatcatctgctgtaacctctacttgaatcatcctggtatatccatatggctgcaccattactatcatcttcatcgcaagcgagtctgtaatgttaatgacctcttcgactgagtctgacggcgaagatactctgtttttaacctcttgatccctgtttcttatgctcccaacagccacagtcgacgaatctcgaggggcaagtaactcatcaagtgaatatgatggtcgtgatgatccattgtcgattctcttcgccaccactctcattaatggaggccgatcttgttgattcttactgaacttttccatagtcaaagcacttgattttggcgataatggagaatcttgattgttaacgaactcatgaataggatttgatggtgttgatggagattggttggtttgaggcacttggttctgagtagggttatcgtcaggagagatggagagaaggatacgagagttgtgacgtatctggcatccaaacatattaagatggtcttgaagtaccttgcgtttgaagataagtatttgcttggaaacaggggtcccttgagtcatctcgatcttccgtttaatcattaacactgtgtcccagaaagaaacatcaatggtgaacgatgagccactctgattctcgatgatcacctttatcattgtatcatgaatcggatttgatggagattgagggacttggttctgagtagggttatcgtcaggagagatggatagaaggatacgagagttgtggaagatgccgtattcaaacatatcaagatgatcttcaagaagcttgcgtttgaagaagagtgtttgatgttctcaagtaagtgagtcttattgggaataatattaactcatgttcttcttgcatttgatttctttgccgctctcttcttctatctcaaatctgtctcttcaatttcacagttgggctttttattagtctataatgggactcaaaataaggctttggcccacatcaaaaagataagtcaaatgaaaactaaattcagtcttttgtcccacatcgatcactctactcgttttgtgtttgtttatatattacacgaaccgatcttcggtacgtcgagcgaagtaacatgagcttgtaacccatgtggggacattaagatggtggaacactggttcgggtccacgggccggttctgttgctggcatgtttctgggctgcccagtccaagctgtgagtaagacgtgtgtgtcaagcgaaggcttggctcaaacggctgctaaagttggagggcaatgcgtgaggctggtttcacagagcagcgattacttcccgcttacagcagtggacggatcacagtttggcgtcgctcagaaccactatggcctgctggtccgatctcatctgaaccaccatttttttccctcttttgattttgttttccaaaactttctacgctttttgtttttgggtttaatgctttaagagggaacaaaaacaaagctgtgaaaactgaaagcaaactttgaacaaagcaagagacttaagagttgtatttacagcttttgttcgatgtatggaaatgtacaatttttttgctactcaaagaaatgagacttaagagtcaacgttaaaagagccaggagtaaaatgtctaggtatgatctcaattgtatcgttgtgatcaacaccaaccacccagaatgactgattctcgttaaatactctgttcttgaggcagatttaactcaccattctctgcaatcttcaccaactcgtttcttagttctttcacgttatcgttcatcttaacattcacagccaccggaatccccttggcagcttcactctcaccggaatacggcaaaacgcatacgacaatcggcttcttcggaatcctctccttctcagacaaatcttgaatgttcgtgaatcgtgatcatctcttggactgagtttgacgatggagattgctctgtttgagccgtcacagtggaatcttgatgagcgttgatgatttgttctgttgggtttgacggtggaggagattgctcggtctgacccatcacagtcgaatcttgatgaccgtcgatgatctgttctgttgagttcgacggtggaggagattgctcggtttgattgtggttagggttctggtcaggagagacgacgagttggagacgagattcatggacgatcaaaatcgtcttgaagaacagtgccgtggaagataagggtgtgattgaaaacggggatacattgagacttctcgatcttctgttttaactctaacaccgtatccttgtgatccacttcaatctcgaacgatgagccactctgattctcgacgaacaacttcacaattgtattgagtagtgtttcaagattaatggagactgttgaagaaaaaagagagaaagtgatgacttgtaaagaaagtttcctcacaaataggtttttgtatcatttgatttcacatatcaaaatcgatgagaatcttaaccgtcaaaatcgatgagaatctttttgctctgttttgtcaacaaagatacaacatttgatctttatacttgtttctgtaacgccacatcattcaagaatatattaaaaaaatgtgaattagacgatctaatcgtaatattttcttctggagaatgtacacagagcttaaagtaactcaacaacaactagtttctcttctttcagctcacattggtaattacatgtcttagcttttttgcagaaagttgtgaacttttgaacaacgcacgaaaacttaaagacagacttaaaaacaacaagaaaagaggagactgcaccacatagtttagctcgattaatgatcaaagctgtgaattttgaacaaagaaagaaaacttgaagaaaagagaagactgcaccacagagtttagcttgaagaaagctttcgaacagttctgggtagagagccggtataggtaacatatccttggaaaatctcaatcgtatcaccgggagcaacacggttcgccatgaatgactgatcttcgcgtaatacatcctgcttgtgtataaagaaaaacccttcgtgaggcagatttaactcacccctctcttgcatcttaaccagctctttcctcagtacttcaacgttactcaatacgttaacctccacttgaatcctcctggtctcttcaaacggctgcaccattactgttatcttcaacgggtagttcttggtcttcttcctcgcaggcgtatctggaatgttaatgacctctttcactgagtctgacgatgaagatactctgttttgaacttcttgatccctgtttcttcttctcccaaccgtcacaggcgacgtaccttgagggccaagtaactcaggtaccatcttcgtgatcacaggccgatcatgttgattcttactgaagttctccgtcgtcaaaggactagattttggcggtagtggaggtttccctgtttgatgaagaagcactggattctttttgtcttcagcagaatcttgattcttaacgaactcatgaattggatttgatggagattgagggacttggttctgagtagggttatcgtcaggagagatggagagatggagaagagggttctggaggatgtcccactcaaagatatcaagatgatcttcaagaagcttgccttggaagaagattgtttgtctggaaacgggaatacgttgagtcatctcgatcttccgtttaaacgttaacactgtatcctgtaaaccaatatcaatggagaacgttgagccactctcattctcgacggtcatcttcatcgttgtatcaatggtatttgtttcaagatcaatagagactgatgaagaagagaaagatagagacagtgattcacgcacggtaagtttgttcgtgtcatttggttcaaatatcacttaatcctctagtcgaagaatcgtaaccgtcgatggctctcgttaatgatatgatccaacggttagattaagtaatcttgtaaagggtttaaacgcagcgttttagttaaaaatattggatcaagctcttgatttacctgaaccagagggctaaaccacaatctgagacaagtaccctcaaatcatcgtcaagtagaacatttggtcaacttcttggttagtacataacatgcaagtcatcatttcattcttatgggcttaaagctgaaacattatctaacgagaattgatccacaccacattagaaccacctagtaaaattggctataaacgattgacatgatagagtaaccaaaacttttctagatacggtaaacatcaattgtctctgattatcctaaaccctaaacttgaggctgcggatgattttggatatccggctgcagaaaaacttgagaagcaaaaagattgagatcgagatggggacgtggtgcattgggagaagaatactcatacaaatgaatactctaatatttgtattagataacgatgatggtattgtttttgaggattaaggagacgacaatgagtctgcttctgatctagtcggaggcatttactctgtttttgtcctttctgtttcttgtccaacaagtttttatttattgacttgtgcatttgttctactaatattattaccgaatatattgaattgactctactaaattgtcttgctaaaccaaacgtttaaaaagagaaactctttctttcttcttcttattcttcatttttttccttttgaataattcttgactaaaatagttcatcaacgtttcataatctttaagaaattacacaaatttgcaattcaaaaaagagaaactttaagactatagtgaactttttaatcttcagtgaaaagtattgaaattgattgggagttgataatgaagatccagaagagaaatcttccttgttccacacttaagaatagatctttgactaaatagtcatcaccaccagttcttttacagttaccaaaatcaaatctaggctgctgctgatcttgaccttgttctgaagatggtctagttttaaatccttgaggatgtgttggctgaggcacacgtcacatcatttgttgattcagctcaggcagtgcttgtcgtgggttgagatatgtctgaccatctaaatcaaatgatcttggctgtcctgttgcggcattcctgaatagcggcattcttaggttagccattggatgttgatataagttatgctgagtagccattagatcatgaatgggcctcattggccctgacattagattgttcatcttgttagctgatggatgttgatcatatgtgttatgtagtctccatgtgatctacttactaatgcaggccctcgaatctggttagccactggaagctgttgatatatttttaaaggggccatggttttatagttatacgcaagaaggaaatattaaccattcaaaatttttgatccgtttagttctgttaagtccgatttaattagaaatcacaatatcgaatctgtttggttcggttaagtccggtttattggacctgactttaatctatatatacatttttggtacactttttggcaaaaatccctacactatttactattaacatttaaggtcttacaaattctatctcaaccaaatattctatgcctaaaaacttacaaatcgttaatttgcattaaatacttgaattaactctttcctaaatttttatcatcaattaaatctttctttatggaactaaattccattaaggctaatttcctaaactctctatatcaatattataagtatataatttttctgtcactatatttgtttttatatataatttattttgactttatatataaaatacatatagttaataaaatattagattttaaatatttgatttaatttaaattttaaaaaacagacatataatactcaatcgataaaaaaagtaagtgtacaaggtcccacattacttaaaaaaatgggaaatcgtttagagtcatactataaaaagaacaaaatgattctgaatacgaatgaacaagaactttgatatatcagacatccaaaattaaaattgttattcggtatacctcttgaatatgttatttatatctaaataatattaattaatataaaagtctttaattttctaacaaaaatatcaaaccggagtgtaccgtaggtcaatctctagataatgcaaggtttaaatctttattatctctaaaaaatccaaaccacgaaaaaatactgaattttaatattaaactaatatacaattataaaagatgaattattcaagctttacatatataaaaattatgtgtcaagtattatattattcatatacaaataataattgttataaaaaaatatgtatacttttcaagttaataatatgtacactgcatgtcaatatctagttagtaaattacaattgttcaagtgaaaatcctaagcacaaaattcatagaagcagggaatacaaacacaaacacaaacacatagtaaggtctataaactttttgaatacaaacaaattcaaggattcgagtaaacataaccactttacagtagaatatttcaacgaacaaaagttatacgaacagagaccaaaaccacaagacacaaaaagcctcgtctttgctgcaaaatcaacttaagcctcatcctaaggttatgactctgtttatctttgttttagttcccctttgttgttatgactaagaacttaacatcttgtctccgtaattcactggtgaacaagtgcttccttacaattcaatcttcaatgtatagattcctgagtctgctcgatatgcataagaggttagtagttgtcctgataaatgtttaaatgatgatactaaggagttagtttttttttggatcttgaagattcaagttctttgggtttagcagtttagctgactcacagggccaaaccacaacctgagtgagacaagaaagatcatattcgtcgtcaacttctcaatcacagactaaacactgtgattgaccaaaaacttccacaaagctggcaatatcagtcgactaataagttatttttggatatattattggattgtaaaaagggttttaggtaatgaggaaagtgtttagttaatgaggaaagtcatatagtatatccaaaatcaattgtgtggaagtacttgatctttttggacaaataaatacatgatattactaagagattgaccaaaatcaattcaaggagcaccagaattcagaaactcaagaacctgaaaagtaaatggaaccaatagacattttgcagcagaattgggaaaattacaaactcacaatagctagcttacttataaagttgatcatagcatcaaaaaaccaatgcaacaactgctatgtaatatgacttatacgatatatttcgtaattgagaaatacttaaaccataatacacagaaaactagctatccagaatcaatgtactaataagttgagatatctaaaggagaaaactttactcaagttcctgacgaagagcatcaaaaagttctcttttagtctgtttctcagtactaatagtgtgttaagaactttactctctcctctgccattttaatcgttgtgctctttaacttttaggctttgaactgcttgatgattcttaatcggagagcatcgatagtaccagcattcataagatgttcaagaacgtcttccggtttaaatggctatgttcaagaacgtcttctggtttaaatggctacgggtatcgatttaaaacatttcgacaatgaaaactcatcggacaaggaacatcaaatcaaagctgcaacagctagaaaaaaaacaagggtttcatgagaattaggatcgatctgagaatagttttggggaaaaaaaaatttggaccatttctcgatttatgcgtgtcatccttgcgcaggggccatgctaatcttctctgtatcgttccaattttatcggatgtccccgaagggacaatcactacttcgactctaaccatatataaacacagcttcttcacttgtcctatcgatgtggtacatttgccaaacattaacagcttaaatgggcttgttttactgaaaggccattttctttttctatttaggcccattagcataagtaaaaggcctctttctaattcttcctatgattgagaaactacgacgtcgttattacaaagacagaaaaacaaatgtggactagttagtctacaatatcacaaatttggctttggatttgagcaaacgtcgcagcgatttggctgattatggtttgtaaatgagaagaaaccaagtagaattaagatttaagaggttgaatctaccaacgacgcaaagaagaaaaacaagtagaagaaacaacgtttggaaacgacttgaactaccgagattcaaaacatttgcataacaagttgaaattttgtctgacaggtagttcctaaattagctgagaacagaaaggatttcgaaaacataccataagatactgaagattaagtttggaaacgtagatgaagttgtttattgtcattttttatcttccactttaatgtcatgttatataaacttctgcgagaattgcctttaaaatttcaaaatcttgtccagagtcgttaacaagaaccaaccagctatccatgcagcttctttcgacttctaacactaagctgagaagcaatgagattgaggtggggacgttgtgttgcattaggaagagaatatattgctgctgaataactcactaagaccaactatgcctctaatgggttcgtttacacggttttgacctacaaatgtaactaaacactctgttaaagtacttcaacccaatgagcttgattctgatcttctcggagcatatactctgtttttattcttcttgttacttgtgctacacatttttgttgctttacttcttctctttgttgtcatattcttctaaagttgtttatcaccttcggatcattttgaccagaaacaacagattctgaatcattctctggtggttcatccacaacatcaagaggtatggaactcaaactaagttcgtcacaattaagatcaggttccttgaaagtttccaactttggatctatcttcttcgacggttttagagggtttagaaggtggaaccctaaccatggccagagaggaaagggaagaaagggaagaagaagaatcacttaagaaggaatagtgaacgaacgtataaaggcatcagctttgggaacaattatacattataggtttagcaacaaaatcaaacattgtgttggttagaccagtttaagcttgtatatgttttaactatttggttcggttaatccggtttgatacggctgttttagatcgccatatatgagtaacagagatgatcaaaagattcagaaaaaaaaaaaaaaaaaaaaacttaaccttcgcaaatggctctcgatgaatgaatttgtggaagaaagaatcattggctctcgaaggaaagatgatcagatcaacaaaaacaatgcatgccaatcagtctcgaacaccccactcagtaccaaattttaaatcttttgtacacaaaaacacatgacaatcttcgaagctcagtggcttagaagaaaaacgagtttgatcgtcatataaaaaaattgggaatttaagcataagactcatattcttacatgaattgattattgaattaaactacttcacctaataaaattcattaacataaatactaatctcataaatatatatgttcacaatattatcattaatggtaattatcatttagatccttctatatgcaagttacaattatcccaaccaactttgtcccaattgggtttctctcaaaatactgctttgaaagatggttgacctctctttctttggtgaatcaacggtttgatccttctttactccaaacaatgttgatcgtcgtcccccaccgtttggttctacaatgtgaatgttctgaaatcttattgcttttgaaagtctgagaccctttggttctcttggtttttccttcactattcatccttctctttaccgtcttactctacgtttggtcgtatgtagcctcgtgaaaaatacaaccttttttggatcattaaatttcttgttcatatcctcttcatcattttgtttagaaaactccttaattaacgagacttgtgtacatacacatgcatttcggtcaaggcaaaaaatttcatgatctaagcaaaattaaacccggtgtacaaaaattgttctagcgatgcaatgctacttagatgagttcagttgtgcaaataacattaatcaatttgaggtagtgactagtgataattaaatcttctcacatcctttataactttggcatgtgttcttggtaagatgaatctcgagggttaaacccatgaggttgcatttttatggggaggaaattgtagccgactatatcctccatggtaagataattccccaaagttaatccattaaggttgcatttgatggggagaaaattaaggttggctttttttgttggacaggtcctggtaataaggttggttgaattgcttctgacctatggacatcgttggtcattgtgcctaccattcaaatctaatcaaccattcgattttgagaaagataacgactgtaccttagattaaaccacggtctatgctcgtctactgaaagttgagctatcgttttcttgttcgagtagaagatgtagcattaaattgttactacattggaaccacgttgaatgtgacatgcaaacaattagggacaacaactgctctaattgtaatccttttgtcggttcgtcgttggttgagagttggattctaatatggaaggaggcataaaatcatatataattattaatattagatttataaaatagaccatatagaaaaactaaattcatagcattaaattatgtatattttgtcacctttagatttgacattccaaagacaccaactttttgaaaaatgttgtttcaattggtttctaaatatgcattaattataattacatatattgaaaaaactatatctttaaatttattgatttgaaagatgcaaatttagaattcactacaaaaatgtaaattatgtatatagtattatttaaatttactttaaacgttaaaatattaaattaactacaaaatgagatagttggttactaactcactagttttactatcattttaaatttaaatgtaggtatactttacaatagagaaagataactttaatatttaaagttaaactaggattaaaaaaaaatagatgaaagagcataattttatttttatttattttcagcataaaatagttttatttaagaaaaacaaatataggaaaaatgcatctataaacaaaagatgtggctgtgacaaccaaatataaaatggaactctgcacctaaaatgttacatggggcggcactctcttgccaaatgacctaatggacttaactaaaataacaatcactactcactacctaacttataaaaattagcatggggcacgtgcccccacctcatgctagcgatctgatgacgatttgaagagcttccaaaaactatgtttgtaaatttattcgtcattcttgagttgatggtttcttcttcacgagtatactttctctttcccatatcacgctgcatttggttgtattacaatctaattaggttttataacaaatagcgtgatgttctattgtgagttgtgacattgacaaatggaactggggcaaggtcctgccaaattttcacaattaagcaaatattatattaattactttctaaattaagcgtttaactcaagcatgcaattcttgtcaaatcaaaacatagtgtaaactctgattaccgaagataaacctagattcgtattaagcattttacatacttgcaaattaagtaaacttgaaatagtattaatgcaatttgtataatttaccttgggcttcaccatcattgcggtcatcttctttagctaccaacaagaaggattaataagtaaacatagtatttatacaatttgtttctctcagagatttcactaatatcaccgtttcttgaaaaagaagaatatggtttcttgttggcttcataaatggtggaacgaggagcatgaacaattgcccttgattctctagattctagagtgacattcgcagatggaatgggaggaaagtccaaaacattcacagttaagcaaagggtgtgaacgatctgtgtccccctaaaaagtttcatatagcaccatatctacacagaattcgaacctttatcccagtctccataaaatggaagttaaagttcaatttctccctaaatcgaaagttcgaatcctaggtcctcataaattcgaatttcacagtttatctttggtttattgtgccaaacccgatgtcaaaccaaatcccaacagattaaaccaaattaaaacctgattcgagttatcacaaccaaaaataaataccaaatgttattatttaatattaataagataatctaatttaaataattatttttaaaaaaacgattaaaagaattaaaaaaaatatacatctccatcgtcttcttccttcctccctcttctaatcccagattttgacaacatcacaagtcaaaaccaaaatcgtagagttgctaagacttgtttgtttgatttgatctgtaattggaggaaaggttttgtgatgatggtgtttgacatataatggctgggatttgttgcggtgcactaatggattcaattactcgagctttcaatggtaaatgtaaattgatgttaattgagatagagactgtttgcgaaatttgatttcatcctagcatcaattcgaaatctggaagttgtttctcatgtgaattaatgtcacctcgagattaaaaaatgattttggatttgattcaaaattgcgaaattcgaatttaacatcaattctaaatttgggttttgattaacatcaattcacatggagaagattttacgaatccatgaacttgtatattgttatttattttttcagaaaaaaatctgggatttgaaaagggaagaaggaagaacagaagaagacgaaaggagattcatttttttttgtttttgcttttttttttttaatttagttattgttaaaaccttctaaattcagtaaaaggtttagattttattattgatgttaaataattacatttggtatttattttgggttgtgataacttgaatcggttttaattcggttaagtttatttaattttggtttggtattgggtttggcacagtaatccaaagataaaccataaaatttgaatttatggagaacaagaattcgaacttttggtttagggagaaattggactttaatttccattatgtggagactgagatagagattcgaattctatgtagttatggtgctatatgaaactttctaaggggacacaggtcgttcacccttaagcaaattttagttacttcctgataagcaaactagaacgaaagaaaactaaatagaatctcatagttgccaccattcatttctgtttctcaaaaccttaaaccctaaaaacgtgtctctccaccctcgcaaatgaatgaaattgattagtgtgtgtcttcaccctatacactttcctcattccctaaacccatttttcctatccaatgaatgatattgattcagacagaagatcaaaatcgtctattcaagacctaatcagcgttaaagtcttactcttttatacatacaaaaaccatgatatcattgcaagaaaatgaccaaacagagattttgcgatagaattgggacaagttcaaccaaaaatgatagctaattaataaaaagatgactttaaaagttgaataagaacatttaaaaaaagaaagcttcagctgatcgtgacagaacagtcatgtgagagtagaaaaagggttcaaaatctgtcaagaatcgttttacttaggcttctgcagttgtgctagtatggacctctcccaccacggtaagaatatggtccagcgttaaacagctgagactgcattgtgggctgcgtttggggattgaaatccatctccgatcctaactgttgttggttgggatagctcagatctacaccaaatgaacctgacggtccaccttgtcttactgttgacatctggccactcaaatactcattcaggtacccaaccagatctgatactagcagagattggtttggtgtaaccgcagctggtcttatgaaattctggtgctggtagtacattattggagcttggttttggactagatatgggatagtgcccctttggttctgctgactactctcatgtctcatgaattgctggtgccacatcattggagcttgacttgggaaaagattaatgcccatttggttctgctggttggtctgaggtctcatgaattgctgctcttgctcgtacatcattgggtgctcttgctcgtacatcattggctgctcttgctcgtacatcattggctgctcttggtggttggtctcaggtctcatgattagctgctcttgctggtacatcattggttgatattcctgcaaacaaaaaattcggctggaattgtcttgtgccccacggtttggttcataatgatatgaagtccttcccaaaacttccattgggccgcactcaccttcttcttcttcaaccaagtcatacactcatatccagttggataatgaaatcttttgtacagatcctcttccgtaatatgttgtgtaaattcctctatgaacgagagacccataccttcagggatttgcatctctgaatcctccactttcacaatatagtcaggattcgttacagatccaaagaagtacccatccacacgacctaatgggacttttgtttcagtgatcaatagcatagtacctacattcaaaggtttgtgatctcccttgttcgtaactaccaaatattgtacctgtaatgacaaattaggtttaaactcaagcatgctgagacaataatagtataagttcttcagagaatattaccatattcacaactccagcaggaacagtgggtggcttgatgcgcttcatctagttacgctttttattgagcaagtagctgcatatatatatatatatatatatatatctctcaggtacgaatattatttgtttttgtttagtatctctagtacttatcctcctagatattcttagattattctattgaatcctgtaactaacaatgactgttccgtttagtttggttcagtccgggtttggtatggtttattggacctccgttgattagtaagtagaagggttttagacaaataaatatgttacaggcacaaatacacttagtcacacacatactaaaagaatacaacacagagcaagttctatgagcttttaaagttttaataaaacaagttcaaagaatcgagtaacacaccattttacagtagaggtcttcaaccaatacatattactaacacagatgattcaagattcacaaaaagaaactctgcaccaatcgaatcatcgcccattggaagcaagcacattgatcctttcccctgagccacttcacaaggctgtagaatcagcttaagcctccttaagcctccttctgaggctttggcttttttttttttttttatgtgtctggtttagttccctatgttgttgttgttgtttctgagaactgaacatctcttgtttccacgaattcacagagatgatccgataaaaaaatgcttctttacaattcactagtccgcggtagaatcacccgaaccatgacgctctcttctgatcatatctagtagatcttgaacaacttctgacatcagtggtctaaattctggttcagactagaaaagaaataaaactcttttggtcacgcaaacacaatcacaagcatctaaccacagtttctaattgtcagtatgtgttttacctgaacacaccgggatattatatcagcaaagtgtgacaatgactttgcagggtattgtccattaagagatggatcaaccattttgcccaatgcatcgatatcatgaagctgtgggattgcccacctcaccaagaactgctctcctctactccggtccctataatcgactcgttgatatgaataaatgcttaaccggaaacagaaaactaagcaaataaaacaatgtgacatgcatacctatcgtaggacattctacccgtcaatagttctaacataacaacaccaaaactatatacatcactctgccatgtatagattccagagtcgaactctggagctccatatccgtaagcggctagcaattgccctgataactgattatcattataagaaatagtttagtctaacatcttgaaatctgtagagggtatatccatcagaatcaagctcattgggtttaagtattttacctgactcacagagcctgatgatattagtggggccaaaccacaatctgagacaagaacactcaggtcatcgtcgagtagaacattggctgatttgaagtttctgtgtatgataggtggttcacacacctcatgcaagtaccttgaaagcattaacaaaagttagcaatcaggtagaaaacacagttggacacttccattttgaagtaaataaaagaacttactcaagggctctagcagctccaagtgccatactgacacgggtattccacgaaagtttcttcttgaattcatcgtctgaatgcaacccgtcttgtaacgtaccgttactgcaatattcgtagaccaatagtctttgatcgtgctcagcacagtaacccacaagttcaacgatattggagtggcgaatcatatctatattgttcactagttcgataaattcgtgatcctgttgttgttcagaagccctcttgtccaacttcttgacagcaaacaactgtgaaagacaaaagactgagaaccaaagcagaatttctgagactgaaatgtttgaattcaatgcattatacctttccattgggaagccgggccctataaacactaccgagcatgcctgagccaatgagattttcctgagcgaagctttccgtgtattgttgaagagaagcaatagaatagtgcttcacagaagttaagggtaagcgtttaggggaagttttcttaacgggtctttcgggtgatatgattggcataaccgtgaccttctcatccaaaggaggaggtggtggtggtggtggaggtggtggaggaggaggcatcaacattgaaaagtcaatatcttgactttcctgtcttgatataggtgcaggtctccgcagcctctcaaggtcatgtaagacctttggttcctctccagctttcttgaagggttctctttgaactgttcataagcacaagaccagcattacttaacaatagacagtaggaaccaatagccaaacttgcaaacttcaatctcacctttttcagatcgaccaggtggtggcagtaccggagtcccgttttccagagcattctctctgcttcctctatcagcaccaacttgatgcggtttgaaaactctgttagcatgttctctacgtcttgcacattttggcaacagcaagagtattgccaaaaccagaattatgaagacgaggacgccagcgaatgcaataaggattatctttttagtatgtgaagagttctttccctttgaattctcagagctcgatccttctgaatcagaaggtccatcagcaactttccctcgattcctctcatttggaggaggtggaactccagaaaatggtcgcgttggagctggttttgttggagatagagacggagacaatgatggtgcagtcgaggtggaattgatcattgtggcattgaacgggtttccttcatgtctgcatcaccaatttatacacagagcaattataagaacctgaaatgcctccatagaccatagtgtattagtaaacaaaagagcacttacaggaatttcggaatgcttagtaatttgtccggtatgggtccagagaagaggttattctctatgtttctgtttcaagaagacaacaaaaactaagattttggaaaagttactcactgcttaagtacttatacgttgtgagagaaagaaacatacaagtcttgaagaggaaggccttgaagaacgtccagagttcctgagagctgattgttctgaacacgtctgcaaaactcagactatcagctttgtgaagaaagaagccaaaagagattcaacattgtaatgatcgaaacttacaatgttgtaagagttaataaattctccatagaaggaggcaatgtgccgcttatattgttagatgatatatcactgcacaaagatatcaaatcacaaaacaatccatagaaacaataactgttaacaaaactacaaacaagaagaagcatacagattaatcagcccgacaaggttttgaaacacgtcgggtagctctccagagagaaggttatcgttcaaagacctgaaaacaaatggtataattctcaccagtcatcagcacaaagcaatggaaaaaaaagaatttgggagttatctgaacttacatgtcattcagaaaactcaatgttcctagagattccgggatgcttccggtgaactgattagctgaaagaaaactgccaaaaggtaaaaaccattatcatacaaactgttcaaagcaacaaacccgatccaaaaaaatatacagtgttaggtgtatacatacaaatgctgcaatgtaaccggcaaagtagaaggtatgcttcctccaatgcgattgttgctgaaatctctggagatatgtaaagaaaatacaaaaggttagaagaaatatccaatttgacttgtcaaaaatgtcacattttgtgtccaatgcgtacattcccctgatagaagtgaacttagctaagttgtcaccaagctctccttgcaaatttgcagcatttacagttctgcaaccattcaagatagaattaacagagcattgatacaaaagataactcaaaagttgttgatatctctgaaagacgcccttacatgcttataatatctgaaacattgcagataatgccttgccaagcttcaccacatgggtctccaccagaagcaatccaaccaggaagaacaggtgctccaagtgcagcgaataatccgttaattgcagcaactgattcacaattacaacaatgctgattaattctcagaaactcatgaacaaaatctaaaactcctcaaccaataagcacagatctcactctaaaattcagtgagacaaaatgtaatttagaagcaaaaataagtgcttaccatcatcagggttagtagcagctaaggagatcgaaggaatccagatcagtaaagacaagagcagaggaagaagaagaagacagtagatagatctcttagcagccattgttccaagtcagagtagagtaaaacgaaacatcaatcgaacaaaacgatgtccacgaatctgaaagcgacaagatccataagggaggaattaaacaagtagcaatcttgagaagaggaaagattacaaaaaacttactggaaaagcagaggaatcgtcatcaacgagctttaatgggttggtgaaattaaaacgaataaaagggtaaagtcttttcctttaaattcccaaaaacccaatcctgagagataaaaaaaatgcaaacttttctttttttgtgggtgagaatgagatttaagacgcaacgtaagagctaaggttcaatgaactttcgtcgttgaagtaaattttaccctcaataatttgacacttgagaataaagctcgacactcgaggaatgaatcataataatcagagaagaaaacccagaacgaaaaaggaaactttttcctaatttaagcggtgggaccaaaacctgcaaattaagaagaaagaactggagaaattcagaaattatttgggtttaagacagagtttaagttcttcattactgaaactgtgtttatagatttgtttatttagaaacaaaaatttgactgatgcttctatttgcttgagatcagtactaaaaagtcataattaatgataaagtctacttaattaatcaatgatttaacttaatggatgtgtacaactgtatccctatattatgtttgaggacaagttgcgtcaagattctaatccgaccaaagacttgtttcaataatagttgtcaattttaaggacgataacgagaataattggatgttagttataccggacgatgtctcagtttaatcggtgttaaccgggtctaaaccgctggttaagataaaaggttgaatggtacgcgcgtggaggagagacggtgaaaagacgttgaaatggtaacggtaaaagacaaaattagccgcaaggaaaaagattagttggaattggattcccattactgttttcttgctggcgagtgtcacgtgttcttcactgtcagatgacgtcactcacttccacgtcagctcctcatccacttctcattagtctgactaactttaatcataggttaagaaaacaatgtattgttgataacattgcaatctttgtatgattatagtgatcttcttataaggttgttatgtgttttagtttttgatctttctccacatttttttccttttctaactctattgatgaaaactttataataatttcgcttacattgttgttacccacatggagagatggatgatggatgggccaacaaacaaatcctctgatattttttgcttggttgattatggaccgttggaatgtgatgtgtgtggaaaaaaaataaccaatcttggagttttgctggggaaaaaattaaaaagaatattcagatacatcgattagtgagatggtatagttctgttcaatcgttaaagaagttatatgttaacaaatatctagatgtttctaatttggggatattcgacaaacatatttttgacctctcacctttacatgcaaaatgtgttcgtttttagacggtgtgcggtattaaacaagatgatcaaaaatattcttgattggtctaattttttttttcagaattagacatatttttggatcttggttggtaaattttaaagcatttacgaatattacacttcacacgtttgaataatgttttgtcgcttgcatgggtagaaaaatacgatcacgagattctaacttttttcatgtaagttttttggttgctaaatggctcatgagtattagtgatcatagtgtgtatgatattacaaaaaaaaaaatgatttttttggttcgtatacatgcatttgagcatttcagtatttgtgtgtatactttctctatacctgccatgcatgtttgataaaattagcctcagattttcaaattaagaaacgtgtttgttctgtttttaatttggttggaaatatactcaacgctctgatacctactttttgctctaataaagtttcggaatttataacgagatttcaaaaaaaaaatactaagagaaatctcaccgagttctaaagattgggtcattttttaggcctagcctacgttggacagggtaaaagcccaaacggagccttttctccaattagacgagtcataggtaaatttacgagtatgcatgtatgtgcatttatatatttaaatgtaatgcatgcactaatagtacatgtaaacatgaatgatactgttgacaagaattcatctggttagaatgtaaaagcaagaaaaatgtgtgccacacactcttagttaacagtaacagtatgcgccatcactccctcaacatcaattcaacattattcaacatctaataaatgttttcttttccattttgtattctatcaattcaatttagcccacttgtctctctctctgcctttgccttttaatgcttctttgagacatctaataaatgtttttattgtttgatttttatcaaaattatgccacttctttttccttttatcatgcattcttcatttttcaatcgtgttatatggcccttatcaaaattatgtatagttatacttgtgacatgatctctcgaccaacaactttatgccaccccacactattgagtattgactattgtatggttatttcaccttaagcttatagtggaacaatgcaaagaaaagaaaaaaaaaacaatgcgaagaaaaaatctagtttgtatgctaaatcaatgcaattttatgaagttgtgaatgacttatgcatgcactatatagtaatcttaagttcttaactacttagtacttactaacaaacattcttttccacttacctttataacaacttgtaaagactatcgggatttgtatccttggtttaagctggtgttgtcgatgtctcataatcatataaactgaaaaagaaacgattttctaattttcgaaataccaaaatttagtaactccattgtttttaaccaaaagagtaacataatccttttattcttcattgtaaatggtcaaaactgagtacactaacacagccgccatggaatcacaaagataaaaacacaaaactaaatttagtaatcaggtttctagtcataagctgaactgcgaaatctcttgatagtagaatcattaagtatgtcaagcataacagaattggtcgtacacctaggagtcttaaactggttcaagccaccgcatttcccaacgcacctttccgccactttcccaaacgttcctcgttccacaactcgtagctcaagcggtccgatcgagttcatgcgcctcgacactacataaccatagtccacaaaagcagtatccatctctctgcaacattcttcaagagccttatcatctgcttctcctctgatttcccagtagattacatagtgaccaggacgagctataacgtctgcgtggcttgtaaagtcaacgacttcagctcgtgtggatcggctcagaagctgagacgccttgtcaacaactctctgaagatccttctctgtgtttttgtcaatgttgatggttaagatgagttttcttctgtatatgaaacttagcttcggtgtgcctttgtgaaaactggtcacttcaactacgtctcctaatctgtacctataaagacctgaacagagcgataaaacagagtaagtggtgaaacagatgacgcaaaaagctcgttgattataacaattggttatggaaaatgcagaggaggtttttctttacctgtgaaagtggttagaacaagttcatactcctgcccgagtttgacttgagagagcggcacaggtttatcttcgacaaagtcaccgtcaatgcatatgtctgattgattctgccgcctgtaaagtggtataaactcgaagtaactaaaagtgggaatcacagcaaagctcacgtcttctgggggaagatgaggatcaacgttcacaccaatccagctctcggttgacccgtaatctgcgctcaccaggggcaaaccgccagcgtaatgcctcagcttattcaggtacggcagcatagaacccgtcatgattgaggagataaattttgcatttggccaaagctttgaaatcaaaccgaaccatccgagatttgtttccagctctaagcagatctcctcgatatgagaagcaagagacgggtttggtctgatcagagccaatacagcttttctcatcttgggcagagtgattcttgagctaagattaccttccttgatgtcagcacatatctctctccagatttcttcgaaaaaggagaaagcttggacaatggtgtaagaaaaagcagaggcgacaaactctacttggctggagtaatggagaccaagtaggagatgacaatacgtgcactgaccgaaatcacctcctgagatgacctcttgtgggctacaagtgaaggattttgttgtctcttgcttagttttaaactcttcgctcgcatagtaatgtgttgtggccgttcctactgtcaatcctcctagcgtcttaaattccttcccggcgtatataaactcaagaatcctccctccttcccttattggataaaacctttaaaagaaagcatagtaggaatttatgagataatgaagaactttttaatggaaaagaatagacaagaaatgaaaacagaccttgatctgtaagccgctgataatcggaaaatctgaagagtagtttgcgcgctatggcgagtaaacggaacatacttttgtctcccttctgttgttccagagctgcgtcataaagggagtgaaaagggatcaatacagaacatatatcacatacacataaacacagatatccatagatgcatgtagaaatatacctgagggacagaacagtgatgggttcttgtgtaagtaatggagaagtctctccatctgcaattctttgaatataaggatctaaatcagcatgtgaaacaataggcaccaaggaagtaaagagagtttccaaagtataatcgtccatcttttctacatcaacagtcccaagccatttcctcagatactccactccggagttgagctcaagaatccttcgtagcgtctcgctttggaccttgcaggcattttccgacacatgctcgaaccaaccaataacatcatcatgccccgcttctacagtttccatccaataccaagtctttcaaggcagtatagtatctcaacgatgcaaaatgagtagaagtcctaacccaacatataggggagtactggtcattgaccactccctttgtcttcagacaaaagaaatttctttgtgtgtatagttgttctcaccttttttgggtctccttatttgtctttttaataggaaaaacatcacagatacctccataaatgtcacgggaattaccgtccacaaattctatcaacacttaatacagctattaatgcgttctcacagaagagtatcccagtctcaacatgtgctcaagagacaaaccttaaccacaatgtattttgcaactatcatccagtgtggtcccatgaaagcctctttgcctcctaaaaaccaaaacccctacatcatgttagctatctttcaactgctttccctgttaataattcagtgaacatagccacaaatatggacattattaaatgaacagagctctcaaacacctatttgagcaaaatagcattagaaaattttagttcttcctataatgtggctaaccttttgatgtttctttctctgcaaatatctggataagcatgtaggaccaaagctaccaagcatcacaagttgcacaagatattttttcttttgggcaggctggctcttccctcaacctcaaccttcacaggcccaccactagtttcaacgggtctaacatttaaagtcccttcactttctatctctctcctcaatcactatgtgcacaaaattccaaccatggttttgcaagtcgaatgaatctctttagcctttttctccctcattatcttcttgatgggtaattaaatcctaaaacatcttatcaaagctccgtaaagcaaaggactagctccacgttaatcttagtataagccaaaaacagaattgtcaccagctcatcttacctccaagataaccaaacaaaaaacgtgggtagtacatgaccattctttgagaaacattcaaactgctttcaagaagtgattatctcctaaccagacgaaaactgttagggtacacagtacatctttggaatttaggtacacagtatcattcatccctggttggtgaactcggaatttgggtacacagtacatctttggatgcaacacacagaaaaatctaagctgtccccatacggatgaatcattaacgtggtgtatttgactacatttggcttggcctccttaacgaatcatattgcagaaaaaccacataaccttcatgtaattttcccttcttgcagaatctccaatcactaaactacaagcctgaaagtcacttctcatccaaatcttgatacaaagctaggcaatactcaaaacctgcatcattgtcatatcatttctctaccctaccttacaatactccttgatcatgcctgttgtaagtaacatgtagtctgatcctgcaactgcccacaatctcaaatacatgctttgtcaaatcaatgaaacatcaagctcaccagagaatttgaagtatgcaaattgggttcaatcccattttctcttaccttacgcctaaaccctcctctaccattccaaccattccaaaactcataatcagagaattggccaaaaaaaatcagaaaagacccaatttttttctaatttgatcacaacctaatcctatcaacatcgttaaccaaacaaagccaatacatttaccaaggatatacgtatgcatattgcaaagatcacccgattttatgaatttcagaaaaaaccttccgcctgattctcttgaatcgttttgatcagactgccgtatcggcggagaccacgatggtgtagtccttgaacatgtctagatcttaaaccaaaacggtaggactcgaagcaactggtcctatggtctagtggtcaggacattggactctgaatccagtaacccgagttcaaatctcggtaggacctttgttttcggcttcggttttgagattgtgcaaaccggtttttaaccaaattaaaacccaccggttattggttttaatttaaccgaaactcggttcggctcagttcctaccgtttggtcaccaaagtctgctgcttcttttttgttctctaagtctaaaaacctctcctttggctgtgagagagccaacgagaagagaaaaagtatcttcctttgagaagtgcaagtccatggcagctctctgttgttgtcccaccaccatcatcgtctccgggaaggtttcttcacggattaaaaccgcaggcccattaccccgaatcaacccttttaagaatcagaaacgattgattacagagagaagaaacttgatcgttaaatcgatcattgaagacagagaagcaatcgatgttaaaaatgacaatttcaaggcagaggaagaactatcagaagataaagtagaagatacagatcggctgatgagtcgaggtatcaacgcagctatagttctcgccgccggtaccgttgcggttactaagcttttaaccattgatcatgactattggcaagtaagcttagggttttctttatctctcttgtgattgattggttcttctatctctgcaaagcttgctcctttatgggattatactgaaattgatatcacgattgttgttgttcttcttagggttggactctctacgagatacttaggtatgcacctgaacataattggtttgcgtatgaacaaattctcaaaacaaaccctgttttggcgaaaatggcgattagtggaattgtgtattctttaggagattggattgcacaagtaagaaactaaaaatactctaaaaagcttcttaatttgagttctctctgaccattttggctgtaactttatgcagtgttacgaaggaaaaccgctgtttgagtttgatcgaactcgtgttcttagatcaggtcttgttggattcacactccatggttcactgtctcactattactaccaattctgtgaggtaaaaatcaatctttgctctgtcaagatatgttgtattaacaacgggctgaaagctaaaatcttttctttgtacaaggctctctttccttttcaagaatggtgggtagtccctgcaaaagtcgcatttgatcaaaccgtatggtctgcaatttggaacagtatctactttacagttttagggctcttgcgtttccaatctccagctgacattttcagcgaaatcaagacaacatttttgccaatgctcactgtaattaactctccttgccctgtgtcttcgtgatcatatataaagcttaaagttagtctgttgattttatctaaaggttatgtcatgattttgtctatgcaggcaggctggaaactctggccattggcacacttggttacatacggtgtaatccctgtagaccaaaggcttctttgggtagattgtattgaactcatatgggtcactatattatcaacgtgagccttcttcaacttcaatcttttttatccaatgtatttgaaagtgttgcacatattagctttgtggctatcatgaagagaagttttgtgttgctaatatcggttgcctgattttcatttcgaattctggaagttactcgaacgaaaaagctgaggcgcaagcatcagaggaaacgaactccagttctcactcaagcgaggtttgccaagtgttccttttttccaagaatctctcttcaaaaattagtcttgagcgtttgaatgtttgttcagagtgttcatctaagctaatttgtgcctgcaaatacttgacaggattaggtgatatcagcatgtagattctagattctatagactctaacaggaggtggatgaagaacacaagcacatatatac

SEQ ID NO: 519 - DNA, 95519 bp, Arabidopsis thaliana
caacaatatctcatatgtaatgtgtttactaactttgattttatatcatcgttcttgaggtatctgaagattttttgaattctaacatcttgtagtcaagagatgattatatacaaagctttactttttcaatctgttacttatgggttcaatttcccgcaattcgtgtttgacaaacaccatgaaccgagacttaaccaaatgcaaaccttacttcgattaaatatctcttagcattcttctcctttaaaaaaataatttcttccttttctcaagaactctctttgtataagtttacaatgacttcttggtcggttcacaataaagtatttaaagcagctaatccaaattgaacttaaagattaataatggcaatctttgtctttcaagactagaaaaatatttgattataccaatccatttgatatacaatagaaaacgatgttgagattgaagaaggcagagatggcagctttgatgaacagtactattcatcttgaactttcctctgatgagcagcctttatcggacggggaggaggcattagaaaactctcacatcgttaaattcaagtaattaagttgttatgtaacgcaggggtaaattcaaccttgttctaagtgtttgcttttgtgacaccaagatttaacgagttccccgagtggttatgcgtatgtctcgtgagggatctcttgccctcaaacttccactagaaatcagggttacacaaagctctcaaagagattacaagaagaagctcaagagaaggtaaaactcacggcacaaaccctagaagaaaacctaccttgtgggcttctattaccaaagacccaactcttcttctctttactcttcaaataacgtgaggcccacttatttggcccaaagagaaagaagttatgagctggtcaaaccctttcaataaataacagtcataaaccaaaagagagaagacgaaaaaacgatgaaaagagagaatctgcaaaataaggttttgatgaagttaagaagaaatgaaactccactctctctgtttgagatttataagcgagtttctttcttagaggaatatgaaaagccttttgttttgttttgggaaatcaaaaacacttaattactttgtgaagactagtattgatacccgtttggggctactcctttacagtgatgataacgtatctgctttcaaaggtgactcttcatatataatctctaacttttttttttagtttggtaacttttttttttgtagtaactaaactcatgtttattatacagacaaaatctgcaaagaacatgaactgtgtttcccaagtgtcggatcgtatgattttgaaaaccgctcttcaaggcctcagtaacaaggactggtttgtatcagtcgacctcgtacgtgtccaggagaaaggtgagctgcagattgtaacaagaacattgtggagaaggatgcttaaggattctgctatgacttatcagcatcattgatcgcttctcttatcttttttttttttaattattattggaacttttggttttgtctcggctttctttttgctctatggaacttaaagtacttatttaaatatttgatgctgctctatgtttttcccggtttaagcaacttatttcatctattttatcatatcttctatttaattttcatgcatgattttatataggattaactgctgaacaatccaccatctacatactaatcaaatcaatcatagtaaagtacttgataaaaaatctacggtttagtgttttttctacaattattactcgttagcattttgataaatctacagtttcgtctccccgagtatggcatcgatggcgtcagggaaggtggagagagggcatcagctatacagagacggcaagtacaaggaggcgcttctattctatacggaggctcttactgctgctaaagccaaaccccaaaagatcgctcttcacagcaaccgcgccgcttgttatttgaaattgcacgatttcattaaggtttcttttacttaattcttctttaatgaaggtttcactattgttaatatggttgatatgtttacaaaacatcatagcatcaattatgcaatctaggaacgtttcgttcatcaagttataattaattcacctaacatcaaaagctgaggaaccttgatctaacaatcctaatcataccatttgaatccttggaatataactgtgaaattactcagatatgtaatttgaagtaaaaaaatcggttgataataaaaagaaaaagaaaataacaatgacaacaaaagagttgaattgacctcttagaattacaatttcttattatccttttctaaggtgtataactgtcgatgcacgacataagagagaaaaaaaaaatgtaaatccacatactaggaaaaagttaaaagacttttaagggagcaaggacttctcaaaaagacgtttgagttgaaattttaaagtaagtgaactatattttgctacccatttataaacaaaagaaaacaattttaatttaattttgaaaccacaaaaatctgttcgggtttacaattttaaaccaaactgcactaatatgctaacaaaaccgttttgaaccaaagaatgttgtacagggctgaggaagccaccatgaaaaaaaagagcaaaacctaaaattaaaatacgcaaagactctcagattctgactttttctttcagcgcctccctaaaacctaataatacaaatttgatttttgttgactgctagcaaaaatcaattaaaaaccaacccaaaaacctatacattaggatcaaagtgattcttgatgacaaaaaaagatcaaagtgattcttggtatatgtctaagttttgtgtttttgcaggcagtatacttttacatgattacatgtagaacatatatctccctatatatccctctctgtagataaactcttatataattcacaatgtacatctttattagccattctactctttttctctcgttccatttgtcaatcctgcacaacaaaacaaaacggaaggggaactactgagatttgtaggtccccagccttgattcaccaagaactcttcggctacttcttttccacactaacggaataacatcattcataaccagataactatctctccgtcagcagttttcaaggacattgatcgccatgctctctgtgcgaaaatgatagggaatcgattagtcatgtcttgtttcattgttggccggctcgagaagtttgggagagggttaacatccctttgcccactcatggtttcacaccgtctattactgataacttagactttgtctttaacttaatgagtaacgatggtttatctctttctctgagaatggccaatccatggttactttggggaatttggaaacatcggaacacaacggtattggcgggaacacaaggcgacttaaatgcacttatagctcatgcttttgaagaatctaaggtgtggaacaagttaaggacgatgccaacccagtctgtaactcgtctttcgctgaatcctagatgtgcagttagatggactaagccaccactagatacgcttaaatgtaatatacatgtttcttggcttaatgatgttcacatctgtggcggagcttggattgtcaggaatcatcatggggacgctgcttttcatgcccgagaaatgtttttaccagcgtcaaatcgtattgctgcggagttgagaggggttttatgggtcttacacagtttacgtgacctacacttagataacattgagatatgatcggactgtctatggaagccattagtgatcccataaattggccaacgtatttatcttatcttgatagaattcatcggattcttccgaattttggttcgctcgtgtttaaggtttcatctacaaaagccaatataatagcacgagatatagccacgagcgtaacgagagaaggtaggagcagatcctatttgattcagaccgcaaaaagaaaaaaactaattaagatacaaaatttaaaagactaatcggatcggagttgagaccaatcttgaatatttttagggatttggtcggcaaaagaaaagataagcattaccttagacggggactagtcaatgtttaatttacatgaccatggggttaatagtacaattattgtagaccagctaaacaaatggttttctccaaattgattcttcttctgtcatatcacatatttagttgtaatgataaatggggaaggtcattttctaagcacccattttcttatgaactaaaatttacataactccctaaacagtttgaagttattcatagtctttggatgtctcgatgccctttagcctccattataacaaacggcacacctctaaacgcgccgactatttacgattttaccaataaggccatataagtgtacaattatttgtttatagatttggcactctcaagttttgataaatcttagatatgtctaataaacactctgaaaatactatttaatgtttggagaaacatccattagaataaatccaaaacaagaagcaaaaaacgacgatgtaatcatcaaattatttagttttaaatccaaagattaaaagaaaacttgaactacaaatctggatctagcttaggactaggcctgcaaaacataggataagtcttacattgtaatttcttcacaaccttggcttgatactccacaagcgtatcatcgtcctcagactctttcgccataaaagtaatatacgaaacccacctaccagtgaaagaccctgtcactcttacaacatgatccaatgtcacattggtttcctgaaaacacaaccaaaggaaaaataaaaacaagtaataacaaggccaattcacacatcttaaacaaacaaaacaatgttaaaatcagaaattacctttaaggcattgtatttgcgaagacacaatttgaccatgtcttgtgcgtattgaagttgtgtccttcctttaaccggagaatgttcactgtccaatggttcaagtaagattgcaccaatccatacggaacgtggatgaatccctttttccaccagaaaaccctaaacctcaaaacaaaaacccaacaaattacattatacactaaataacatttgaattaggaaaagacaaaacctaaatttcgaatcatgtatatacgaacacgactaaagtggagatttcgacgataaagacgtcttttacgctcatcttcttcgtcggtataacagtcttcatcaggtgaacagaaatcgctatataaatcatcgaagttatccacttcccactctggttgatcgtttgttgaatatccatcgtccactatactatctccattgtcttctccctctctttccgtatcgccttcttctctgtcgctttcgttatcatcatcgtcatcatcttcctcttcgttgctttcgccatcatattcgtctccttcttctccgttgctttcgtagtcttctccttctttttctccgtcggaggaataatcatcttctcttgtgtcggagtcggatatgtccttgttcagagagcaagcgacggtggattcatcagtggttgtctctatcggtggaatttccatatttgagatttgagtaattttaaaaatatttgggttgattttttagctttttttttttttaaatgactagtgatttggtgagatttgtatcatcatgggtgagactagaggaaagtataaagagtcatgagaaatttggggtatgtgtttgatgataaatttcatgattttagatggaatttgaaatttttttacaaaaaaatcacattaactttcctaaaatcattaaaaccatagaaaccccactaaaactcaaatcattcaaaatgtaaggtccaatatatctctcttagctattcgaaatcttattgaaaggctggaatggttatttaatgtttccttttcgcgaaaaataccaattgaaaagaaggtttcttcaaacaacaatgagttgggtcaactattcagtcaaatgatattgagtggactatttctttgcaaaattgtgctcaatttcatatgtggcaattccaccaaaatctcttcattagttggaagacaaattcgcacgaatcggatgctttaggaaaatatcgaaagtcgtatcgtcaaatatttaatatgattctacaattttagttttgttcaagtaaccaattatagccaattgagcggatattttgatcaattcatagatcttttcgattcaattagtaatgaggattcggaatatcactatcacacattgatcaattaaagagagatttctattttggcaaaaatcctaataaggaagcctaattctcaaaacattactagtgataggtactcttccaatttcatgttcttttggattttttactaataaaagttacattttaaaaggtcaaagtaaaactcagtaaacattacaaaagtgttaaagaaattgatgctcatatagtcatatagtcatatgttttcatgacaaattataacacaatcgtcttatattaaatcttcacccaaaagaagaaaaaatttagtcaccttctagattctattgatctctccatatagaatcaaagattcacagtataaacgtataaataagctcttaacgatcttgttttgttttatgtgtcagaagtggaacactctggtttgctgagttcatcacccaacatgtgatgaagaagtgtatcaactctctgactccgagacttcgacctttaataaccataaaaacaaaataaaccttcagattttgagtctagtatgatattaccaaccaacaatttgacctatctacttaccctgcagatcgacgcctgtttcttttttcttgagaatcctgcaacgatacaataacgagatgaaaacattgccgattgaacacgaaccaaaaggttctttacttttctaatctccccaacatctgtaactttatggcgaatcaaagacaataacaaacctgtccttgacatttttcttcttcttcaagatccagctcagtaaagaacgcctccaagacaaaggcaacaacctgaaacaaacacgcattataagtcgatctaagaagcagagttaagtttctttacaacaatcatggcctctgtttgatcgagctcttaggagttggcgtcagtgaaactcaccaaattcaacagaagtaaaatagtgatgacatagaaactgacgaaatatgtaatgctccaccacgtgcccgtcaaatctttgtagctctgaaagaaattaagagtagttaaaaccattgcaccatagtgattggcaaataagaagcaagctgtttatagtacatctagcattggcctcctcagctccaatgaatcttgcgatacttcttgttggaaactataatgagtctaaagttgggactaacagaagagtgaaattacctccatccatacttgccagttacccataactagcagattgaagagtgtgaccattccattggggtagtcattgaagttgaacaaaaggtagctgagtttttcccgtcaagaaacgatcttatactgaaaacgtttttaccccagtaataaaaaattaaaaacacactagcaatcacaggaacagagaaggtgtactaagactgtgttgagtgcattaaaagtttttcagaaagttaaaaaggatactcatcctcagccaattcggtttcaaagagctttttgttcccagcattcacaagccctccaaagacctacggagaaatgagatgaagaaatttttatatctgatttgggaaatagaacccgtgagagaagacagggaaaacacatgagagtagcagttcagcggttcctaaaacattcagatgaacggaaagatgaagaatttcaagaggcttagaataatcaaaaatgacgagaatgaccattgaccaaggcttcatcataagcttgcatttttcagacaaaaaactcagtagtctgatttacctgtacgccaatagagcagtagatacacagcacgcagaaaatggtccctaaatatggcatcaaacttggaataagagttatgaacgtcgcaataaatgctcggtatcgctggacgttcataagaagccttatcagtcttaacattctcgccaggagaaggtaccggatcctatcaatgagaaccagagtctgggttagtacaaaagaagaccattgtaacaaatatgtcatcgttattcctcaccattctccatttgagaagaaagtattctcgtctggagttatgaaggtagctgtttccccaataactgcagatacaaagattatcacttatagcatagccatcaatcactcaatcagcaaaacaagatgaaaatgctgcttcaataggttacctatgacccatgtgactagaaaatcaaatcggttagcaccctctctccaataattctcaaatccatatgtatagatcttcagagccatctccaacacatatatccaacctgtaaaaacattcaaagatagaaattaaaagaagaaaaagttaagactctgaaaaggtggtcaataaaattcggctgttacaatctaatatgatccatagaagtactctactcagtgtaataacacaggaaatagcttaacttctatttcattcttcatcttttcatcatatttctcagtaaccatagattatacacttcacaaagcatcaaatagaagaaaaatacaaaatggagagaagatagtggaaacctattcaagttcttaccaaagacaaactcggcaacctgccatggcttctgagccgagctttcttcgatatcaagctgcataccaaaatctgttatggcttatgaaagaattaggaatcgcatgtcaaagaaatatgggaacatgatataccgttgtttcaacaacgacagcaatgaaattgataatgaggatgaaagaaatagcgtagccaaagttggggcttcgaacaaaggctctcagttgttgtgataaggcggaatggtaaatttgcggaaaatgttcaaagagagacggctgcaatgaaaacaaaaaggatcgctaatgtaaacatatggtggaggtaagtaaattttgagagaaggaaaataaagtatatgtgaacttactacttcctccttttggaatcttaaagcaatggcctggcagaggtcagcaaactcatccttgtttatctgctcaacaggaaacaaaaaggggacaaagaatctgttagtcgtcaagaggtttaggtgaatagtaatcttaaggtgtatcctgatcatatgtgccacatccttcacagatctctaccttaaagtcacgagtatcgtcaagctcatcaaatatcaatccgaattcttcttttgatatcttcggcaacgtcctataaggaaaaatgaatgcatatcattatcaggtctcacaagttaacatacaaaagggaagaaaccacaaacaagtatataaaagatgtatttctttttcgaaacataggaaagattgaaaataccaaagatcatagcaacaaacctgtaattagtcaactgttcaaagagcttaatgcattggttcttatcaatctccccgtttttctgttaaaacatgaaataaagaacgaagaaatatatgctcagcaaagtggttaactatacaaagactctccattcatgaagatctttgcccaaggagaacttctccggatatctctaggagtagatataatcactatgcgtagatgaacttacgtctgagtctataagaccaaaggctttctccaacattcttctcttcatttgatccattccagatacttgctttgcgagctgcaaacagaatagatatgatatgacacaaggtgtcaaaagaggttaatacttttgttttaaaagctgacataagaaccatacaaacatcaaatccttaatccacctgttctttgaaactgtcataaacaacggcaagaatcaagtttgtgacaaagtagacgccaattagcacgtagagcacgaagaacaccgaagaccagcgagaagaccttagaggacagaacaaataagtcactaaattactggatgcaacgccatacaagcaaactgagacacaaatgggatttcacctaatacttacttgtatgcaggaatccagacatcaggattgttggatgttgtgaacaaaataaacatctggtaaagagttgcaccatatgaagtgaagaccgtgaggccctgctgcgtgtcctcaaacataacaaaagcaatccaactggcaaatagaaggaacagcatccatagagcctgtgaaaatattcaaggagttaagtaaataggatgacaatcaatatgagttaattacttatctgaaagtcaaaaatgattggggaaggccactgaccaagatattcaagtatgtgccaagcattccagacagaaggacaagggtgtcccgaagttccctgtacagaaatgtaaagaatcataactttggggaatgtgctgtatttagagatttaataggaggaatagtaggtcaaataatcacacgtcgacatttatcatacatgacatgatctgcgcatctttgtctatagaaataaagacatataacccatatagttgatagaaaagaagcagagatctacggataccttatgctgaggatgaatatgataactctcacgtatggggcgattctaaaagggagaaagtcgaaagccagtggagacagatacagaaagtcaaccagcacatcaacaaacaaaattaccacgcaagcaacctggaatcaatatgaagacaaattgttgcacgaagaaaaggaatttcttactttctgatcgattttcaacaaaaagaagaaacacaaaactgtgaagtggctagtaaggaaataccttcactagattcaggcgactagtccaaaagattcgggaaccttcataggatatcgggaagaaagtatgtacaaggagtatagccagggtaatcacctatttggacagcaaagaatattataatttcagcacaatgagaaaaggatcttggccagtccttataataaacatatccaaaataagatgtgagtgttgatattaagttcttaacgacgaattaaacgagataaactagtcttgaataaatactcaaggcttctcaagatttaaagaaaacaaacataaggcaattcaagtcttaaactttcaagtggatgtacatgtatatcatgagcccatctgcactaaatctatgcatctatagcaaaaaaacaaaggcaaacaagacttaagtgtaattacttgcctcatagataatggattctgcattggtcaagtacggtaactctcccaggtaatagtaatctctatctttgcaagacggtttagggtttttttcacaccacaatggttgctgcaaaagacaggaaaagtgtgtgattactttcaagttgtgattttctataaatttttcaagcaaggttggtgtataccaaagaaatgtgctgacctcgaagaagttaaggaaaagcagagcgaaatagttgagtgaccagatcagatccaaacgtgtgaagatgaagtaatacctagcagactccccgaaactcgactgatcaagtatttccacaggaagaccaataccatcttcagcctacataccacaaatcagagtcaatccaacaatcctcttgacataagactttagagacaatgaaacaacagatatctccattcccaattttcaaacaatgctaatttcgtgaggatatacacacaaaagcattgactaatccttatacgaagaaatcactcagaagaagaaacgattcatcttctcagcttaacaaaaacactgacttaatgaactgataaaatacatagaatctctcttggaggcgatgtgatccatgtatagaaactttttgaaaagtcaaagaggaaaacgaattcaaaattagggtgtaagagaataagagaaccagatcaacgagtgcagctgctttctgaaacggagtaccatgcgtgatagcttctgatcgacgaacccgatccgtaccaccaccaccaagactatctctaccaatcaacgggtcttccattttttttttctctctccgatgagaagaaaattactggatcgaattgaaagcaaatgtcgaggagagacctagtagctttctctgagtgatttgactgtagtttgataagatcaaaaggaagacgaacaagattgatgatgatggcccagaagtagttgaatttattattaacaatttctcgattttaaaagtttcccgttagatcagtcgccgttttgttaataaaaggattagatcttgcagacaaacacgttggtccctcgtcgatttcttgccacgtggctttaattgctcaattctgtttttttttattccccaattcacactgattgtttcccaatttgtaatagaaaagggagcaagaagttcaggagcatccaagtagaaaagtcaaaaccgacaaagtggtgttgtggtccaattatataaatttatttcaattttggacccagaaattgacaagcagaaaccgataatagacgagagtagtggaatatggacaagtatctaatctgaaactgatctctactaagaaggagaagaaaagatgtgaaatgtgaacaaaagctctgcgagatgacattagataacaatctgaatataaactaaaaatgctctaaagctctataatgagagaaggagaacaaatacacaaagcctcactacacaaattgctgtacctttagaacaaaaaccatacaagaatcagagttccctccacacacactgacaatcaaatatctccctaaacccatctaaccgaatcaaaccaacttcccgattcctcatccaaccaaactctccaaaaacctgtttaaaatacaaagataaatcatcagcatctgagtttttctttagacgaaacaaaacttcgaattcggttgtttcgggaaaactaacctccaactgattccttcgccacataccaataggatttgaactaccatttacttcttaagacctacacaaatttaaagcccgcattggtgtgaaatccaggatttaaacgatcataacataaggtgttgagaacaaggagctttaccgttttttaaacttagacatcgccttttgatttcttcccagtgacaatctgcatgatgcgaagtcctctgctaaaagcttcattgaataatatcctcgtttgcattgactggaatccaggcatccatgacaagaacgctactggaaccattatgagtatcccaaacaatatgtcatacatgcgagcaacagagacaacagcattccagaaaatagtgtaattcttcagccacttcctttgagtctgtgcgatcagcagaattccccagccagttgggatgaatgcaagaaggcttgtgaagatatcgatgaagctgaaatgcgtgaactcgagcaaagcaacaatcaccagtatagcaagcacgatcaggaggaattggacaagcctgtaccgtatgtgagcttttgccgagtacttgtcacgggcgtattggatgactaggaagagcacaaatatagcaaagatgtatatccatgagaacaagtagacaaaaaggctggtggatccgtttgcaattttaagctggtatacaatcccatactggaagaagaaaaaccggaggaccaagatgatctccacaaataatcctgccttcccggtgtttctcaggtggtcctgttcctcgtaccaccatttttcccagctttgttcagatttcgttgagattctgccttggtaccagatccagttcatgaagtcttcaaagtcatagactgtcttaagccagtcgaatcctgatgggttaaacacaaatggggccattatccatgaaatcacaagaaaccagctggtgatagtcatggctatgtaaatcaacgagtctttggcaatcggactgtgcgaagcgtagactatgaggatcagcccaagctcgatggccttcacaaagtgactgcgtgcatacagtcggtagttctcagtgaatcccttgtgctcgacaacaaatccacgtccagtggctctatacttggccccaccatggagaatagttcgaccgaaatagtgagctctggtccccattgagaatgtgtagaagacagctgaaagctgaatctgcattcgaatgaaattccatatcgctagaaggaaaccctcctcgagagaccattcaacaatcattggcagggcagtgaacagaccgagctgaatgatgaactgctggttcaggatcaccccaagcgcggcgttggtgtccgtactgtctgctagagcggacttctcaaccccgctgagagccagataaacccgtccccagaggaaagcgtaaacagtaagaatgaccatcattgtgttgaagaaaaaccctacagttgtgtagaaaaatgataacattctgaagaaatcaagcctgtgcccgagccggtacacatctcggctgagaacctgctctccgttcccactggctaccttagcctcaaacattgatatctgattcaatccaacatcccgtcccttcccgacctgaaaaatgcataaagacaaaggttactcaaattttttgaatttagaagattaaaaaacgttaaattacataattataacaaaagtagattgcataattaataaacgttaaaaacgttaaaaaaacgttgtagcagtatagttagttagaaataatccaaattgtggacccttcccaacctgaatgtactcgtggtgggtgacgtttcccccccttaacgtgcagttaaacccggcaaagatgtcctcactgatatttataactctggaagccttactgatgccgcctcgactcaagaaccagaatctgtcaaatacatcagggtggccataatgcattctgaccttcagtgggtttgcaagaacacgctgaccaagagtgacaaaacttgtctcctgagcagacatgaaccacgccagtgacgagactgatcccgtgaagatatgctccctgacaccaagaatagttggttttctgataccatgataatggttgtactcctggagcaaatttctcatcttgagagcttcctcaaaataactgtcttggttcatatcaatggtctgaacagcatcaccacgggtaaagatcattgcatgattctggttctctggctttccctcgcccagcttcactggaccaggtagcttcacacggaatatttccacttccttctccaactggtgatcgtatttcaccagaacggagtaataatcagtctctcctcttcccgcaggcacctcatccacatatgcaatacggagagcttcgttctgcttcatcagatacagaatttcctctgcctgaggctctttctttgctttttgagacccgtagatctgacacgccacaacatatgtgaatttcatcaatgcagtcccatactcatggcctttatacagcgtactcacggaactacttgctctgcttaaggaagatcggtcgttttcagagacaaacccatcagattgaccacccagttctccctgcaaattcctcactgaaccaagctcctgagcaccctcccgaatgtccatttcagacgcagagtcaagaaaagcgagcatcttaagagcccggtagtagtacatcatcccacgaactgtacgtgccaatgtctgacctctgtaggaagcccaaagcctgaggtctctcagcttggttgtccacaactcactatctgtcttgattccttccctatgcatccgttccttgaaatttttccattcatcagcataaattgtctgcaggtagtatagggtggaaatcccatcctcagtctcatttcggagctgttctttgctgtatacaacttcctcactgtaatatggagtcagaacactgaacgccatcattttctcaacctgaggggcatgaggcatgttcatgaaaagcgaattactgaagaaagcaatccgccgtctcgcctctagattcacagggacgctgtgcatagagtccctagaggtgagaatcgtgtgtaaacgcctaacctgccggtagaagtcttcattgcttgcatcaggaagcctaatagcattttgaaacagcaactttgaggctgggtctcgaggagttaaaccttcattagatagctgttcagttgtcttcttctctataaagaactgtcgagttgcaatctcataaagagactgcagaacattcaccacccgcccactatctgtttcctcatcatttaccagcccaaccaatttctgcagtgtttcataaatttttggcagcaggtccactctaaaggtcttggtgaactgctctgactgaatggactgattaattatctgaaagaagaccgtaattatcgaatgttcttcagtgtcaactttgatgattgagagcaatagatgtttgatgctgtcatatgcctcaactacagcacaacgcctgtattcattcttgcatattttgtgccacagccatttatcaggtgcgtctatcagctctctggcctggctcagtgcaagcaaaagctcattgcacaacaagaaacacggccagcgaataaccgtcacatcccaggaattctttggcagctccagtagctctacttcacgatcagaaactatatcctcttctctgaaagctaagatgatttcgttccagatcaacgcaaacttgttggcctcgacctgattcgactcaagtttcttaaacggcctcccaaatccataccttagcttcaatctgcatacagtacacaacctcaagttattacaatattgaaaaatttaattatatgcagcatctgcgttaacaaaagtaaaatttcacagcttgtacagtcaagtcaagcgttgtacagaaaattatttaggaatattagtagcatgcttccacggactacctatgaatgccgtccttgaacttgttaccaaagcctctagcattcaggagttgttcctcaggcattaggttgaattgaatagcactagcaaagaattgaaaccttagcctcagctgtcccatgtccctgatctcccccagatgatcaaacagcccaacaacagcaccaacaatcgaagaatagattgcgtaccaaatttggatatccatcagatatatcaacacaactggcaaccataacaatgcgacagaaaacctattgctgtctccataaaactgatgccactcataatcgacatcctttaagttccatagcagctttgagggtttaatcattggcttaacctgcaggaagtaactaaatgtaaactttgtagctaggacaaagatccagaaagtcgagtacttgatgttgtccactaaaccctctctcaaacctcgacccacaaagcttttgccttgaaaccaccaagttagagcaaagaatattttccaattggtctcttccaggaagtttctcatccatgggataataaacaaagccaaagccaggatttcgggcaccaagaaggcccccacagcgtaaaggaattggtatatcttagtcgtcgcggcattggaccactgcctgtcttgcctcttctgcttccagatgttagtgtagaggacagtgaaagctacaatccaaactgcggcagctataaccttcatcagcattctgaaaaaatgccttttggtctctctggaaacgaggggatattgtgaagccgcgtccagcacagcctgcaagagtcgcataccactccatgtcaagaacacggtcaatagtctcacctgaacatctcttgccttcagagcattccacagctgccttgttaccgacgaggtatctggcttttcctcccaagctactataatggcggcttgaaggaacaaagctagcatcacccaaagtcgatcaaaactcctgtaaaggtagaagaacgtcctgcgctccacgaaaccagttttccctacacttttgcctctactcttaaagaaattgcttcccaaatcaagcggccatttcaatttgctgaaacaccgatcagtccagaagtactcattgatatcgtcgtagttcctccacttacaatgcgcaactgtaccgttcttgctctcatcaatctcagcttggatagtatcgtaaataggtttaacgacgccggttaagaaagcgttttcgcctgagagagaaggcaagtaaggttggccggtgttctcatcgaggcaatcctctaagattttgttgagctcagaggccatgttatggaagatgtaacagatacattcaggcatgaaccgaagattcgcagcctctccccaaatgagaagatagagtccaacatagagaagctctcgtctcgaatcagggttccgatctgagatccagatatttgattttttccccaaatacgaacaccagctagagtagttagcgagaagtttccgacgaaaccgacgaacaaccgcggaatcgagagaatcaatattatccggcggcggagagagacgcatctgagcatttgcgagatgaagcaccatatgctcacgctggttacgaacgttatctttctggaaaccgaagaacaaggcgagccagtcgaggagatcgtagtgagaacgccattgaacatacggcggacgacgaaggtctccaacggttttaagagcagcagcggcggcacgaacctcgggaaaacggagtgaaggatggtcggcgaggagattgttaacgggaatgatattgtacggctcctcttcgattccgacagcttccgccgccaacggccgtccggtttgcggcgggacggtgcggtggcggaggctcatagtagcatgtggtagatcttagaaatttctcgaagaaaaaagcttcactgaagaaacaataacaatggagaaatcgaaacggaagcgagttttttcgtttgtagctctgaagacggcgacaacgacgacgagaagattttgcctcctttccgcgtttcagtttcttctaccttttttttttgttactttttttgctgtctttgatttgtatttttttccaacaatataatttgaatttccttttcttaaagatcttttaaccttaaaatgaatatactaatgatcaagtaaacttttgcaatgttatatattgattgatatgttaatagtgttattgaattgtattttaaaattttctagatatttatccaaattggtgaaattttgaatgatagacagatttttttttttttgtgaattactagataaattttgattattggataatacatttgaagtttattaatgcaatgaaattgctttgtatcttccacctttctggtttacttactatataagttaagaaaagaaaaaagtcagcataaacaaagaaagacatttatggcaatctggaattaattcataattttggatccgaatattataaaagaatgcattataaataaaataaaaagagaatgcattatgcatgcattgatatgaaaatccttaacaaaagtaacaaaatacatgcatttatttgtaaattataactctttgttttaggcttgttttggtcctatgtatctttttctatagattttgatgatgattaaaagttcgtaattttattaacagtatcaccatttgaagatctcgagtattgcaattatattacaaaattgtaggttatgtaaatgttagtgattgatcaagatatgtaagaagaaacgataatcatcaacacggaaagaaaaaaaaagcccgtatctaaacaattcgtggcaatgatcgtaaacaaagaccgtgacatgtaagttccaattacaaaattaaacttgtcattttcgttattgacttactgacctaggatttcaaaactaacattgaggatgatgatacaaaaaaactaaaataattcagtataataaaatttggaccaagcaatatttgttaatagttataacaaagtgggttgaaagaagaaaagaacaagtggagcgtttttatttcataaacagagaaaagtcgctgaacggcaactgcgaccgctttggacgctaaaacaagaaccctaaaataaatctcatatttgcttttcaattattagattcacatgggaccctttcttcatactctcgccccatttccctctctttttctagtaactttttctccattttctaatgatttctttagaaggatagaatgtcccataagcaaattctcagctcaaatatttcattaaaatagttcataccttttgagaatatttcagtctggatcctgactggtcaaacgaccaatcagtattaaaaaaaatcaagtgaatctagtcatcttctcttcaacacaaatgttttttaaatttgattaattatacagtatgatgaaatgctcttctgggactaatttattacagtatacatatgtttaaataataggcatgtgggattataatctaaattctaaatgtggaatcttccttttgttctgacacaacaaatggtcgcatgtgcttcaccaagcattagaaaaatacacacgattagagcaacgttaacgttaatttgctgatggtcggttttgttactacaaatgtccatttaagacaggccggtttgcgatactaaaataatttggatcacgcaaaacactatgtcccacattaatattaccttcattcgcctctttacgtgttatggtcatgaacttttagaaaacgttcttttcagtggaaattatacaagcacaacacacgaactacgtctcaaatcgacatcgagcaaatttatgtttatgtgtctactatctatatatgtatgagagacataaaattagatcgatactcaaaaaaaaaaaggtagattcaagatttttgaaggagaaaagggtcgacgacggcgtggagagaatataagagtaagagtacatagaggacgagtgcaacgaaaccggcaattaaagctccagtgatctgatcgcaaaactttggaacttgcccgcaaatcggaagccaacctgcgtttgcgtttcccttctttcccacttgtgccaccgctagagccgccgataagcttgacgtaagcagcattgtcatcaccttcatcacggttaatgacaaaaaaatgatacaccaattcaaattaaacatattaattattttagctaatcttcacctaacaaacgaaacgataagaaatctttgtattaagacacgaatactagttagtaattagatatgcattcaaacgttttaactttccacccaacgattcacctatccttcttacacacaaatcaccatcaaattatattcgaatggaaataaattaatttagacaatcaatcatctactatgtatgcagtcgttttgtgttcaagttgctatcattttttcataacactttcttaaaatacatcgagcgttttcgttttagaaccaatatatcaacttcgagtatagataagtttttaattaatctagagagatagtctttaacaaaaatatatataaaatcgtcactacactcaaattgtaacagaaaaaaaaaaaaaacagtacactcgaataaaaagtcaggtggatatttaacacaaattgagctaatgatcattataagaataacacaaattagtaacatcataattttcaattcttatattacaccacttaaaacttagtataacgagaaaatcacaatctacatgctgcaaaatagttgtgaaaatgttgctacaaaatactaatttcattgcatttttgttgccaataaataatgttgttaatatgcgatgaaaaacaaaaaatctttttaaataatatttaggatcagttgttaatatatattaaccaggtataagtaacaacatcactttataataaccaagggaacttataatatattatgcaaatgaatgcatgcagagaataaaaattggtaccaaatccaagacgacgacgaatttccaaagcaaactctcctttggaagaaacagaactagaaagctgtaaacactcacaacagcgtttgctattacaaaatacctgccaaacatgttttattctgttaccacatattcgcataactcatagatgtataatttacatacaatgactcaacaagaaaataagaagaaattttgtacatacttaaacgctgccatatcggtgtacttagcttcaagggagatggctaagaaggaagctctctcgcggctagtgatcataacgatcaatgcggcaagagccgcaccaaacgctgccaatcgcagcacaagccctcctattctctttgtcaacttcaccatcgaacggtaataaaaatttctagatgaaacagaaaaatatgtaagaacacaaagacatcagggagaagtgtaagaacgtaacacatacacataaactgaataaacaaactaattggtaatcaacaatatatatataattgagtgggatgtgctgttagctgagatttttcaactatcttcaccgtcatcgtctcattttcaacacacgactatttttctctttatgactttatgacatgtggaactacaaaacaaaaatgcttcatcagaaatacaaaaagtattaaatttcaaccgcacataatgtatatagatactccaaaattgatgtcatggtaaactatacaatggttattaattatttgaaaaacatagccctcaaagtcaatattttgttataaaaaaatgtcatagtttggaattaaagatgtagagtatgcattgttgaaaaacaaatgtcgtagtttatattattattgttagattcatgaacgatgacatcatagaagaaacaattatcatttttcattgagccgttgtcctaacttataggtgaatcttcggtgtttttgtctgccgggcttgtatattaattttgacatttttttctaatataaccataagtatttgtatctattcttttttctcagcagtatatatgagtaatattcgagagtaaccatggaattgaaaacaattgagagaatagccttgtatcaaaaaacttagataaataaccttttatagggtggataatatattaaaatattcttgtttttataaaaatatcggtagttgtagttataaagtttttatgtatttgtctaaaataacatgatatatttacaaaaaagcatgcaatttttataaatacatacagaatatatatacacgatatatatgtttctctgaaataacacgatatatttattaaaagcatgcaattctgttatacatcgcgaagttttttaaaaacatatagaattgttacaatattacatgagtttttattggataacatgacaaatatttatatattacatgaatttttgttggatagcatgacaaatattaatatatcagtgttaataacatgttttgttcttaaaatacatgcattttaaaatcagacatttgttttaaaatcaaatataatctcttatatcacaacgacattgatgaagaattcaggcaaaaagagaaaacaaagaatgaaagatagagagatttctatggaaaaagaaagagagaacatgtgggtgaacaaaataaagagatatgatgataaattttatgagaggtggtgaagatattctaggagagggagagaaaagtagaaaaagaaaatgacatggtgaatttgaagaagatgaattgtgttaaagatgaagagagaaagagaacttcatggctaaagtttcgtaaagaacatgaaaaaaaaagaaaaagaagaaaaaagagaaagaataaaatagactaaatattgccaaaatttctgtagcagacaagtactatttggtccaaagttattttgtttattgttttcaagtcaaaggttattttgtatatatactctatatatatatatatatatatattcataattaccaacaacaagtcgtcgagtcttttttagttataattttacatttaatttgaatttttctttctttctgacattcgaactaacattgctttagatggtataagtcagtgaaagcaaagttagagttttgttgtatgacttttatgagtttatggaaatattagtgtcttgaagtgggtgacctattattacttaaaagtgttttcacatgaagagaagaaattgaacattctcctacgtttataatttaatccaattatagaaacttagtttcaaaatgatttaagtttatgtcattttttttttttgttaatttagaatcataaacctacgaaagaatccaaaataatctctgaggaaggtgcatctcatagataaaatcctttcttcagatattgaaatgaaccgtaaacatggacccatatctatgtagatataagatatccaagaaaatatatttaagtttcgcagagcaggtgaatcgaacttagaacgtgttaacatcccaagcccgtttccttttgcattgttttaacattattgttttctttaaaccaactaccaagatttagttatcacttatcaagtatgaagatcaaaaaccagcgacgaccaatagcttattaacataccttgtggcggatatatcgtatgaacaaaccttgtagaaaaattgttaactgaaatctaaagcaaaaaaattctataatatttggagattcaagactacattgttactgatacaaatgactaaaaaaatatttagtttacaattaacaattataaaaatatttaacaaacttaagtgataagtgataacacattgatactaatacaaatgactaaaattttattcgtttggtagtaattagtacttgtgctgatcaatcattataacaaatttaccattagtttctagtcaagaaacttagaatcgtataagcagactgagtccatgaacattatagaacccacatcattcaacttcaaaaccaacatttgttgggaaaaagacgatgagattgttgacgatattagtaaaacaatctcattctcattaattagcaaaagagtacaattgggggtttatatacaaactgacattggcctaaaccataagcctctaaaccaaaattaagattggtttatagaataccaacctgtacagactctatatgaaatctatactaaccaaactaagcttatatacaacaatctaagctatatacattaatagtccccctcaagatgggacgaagatgttgagtagacccatcttgcttattagacgttggaagtgcgatggatacaaaagcttggtgaacggatctacaatttgcaattcagtatttgcaatttgcttagacttgaaagaagttggataaccatgtttcttgtaacaagtgtcttcaacatgaccagggcgactacagtaagtacaaactggcctctcctttttctgataggtgtctccattaagaacagattgtgaagactgattggagactgcaaacactgatgaagtcattcctggagtagtagaaatccttgcagaacgttgaatttcatcctgatcaatcatgttgaatacctcagacaaagaaggcaaagttttcttcatgagaatctgacttctaacagcatcataacaatcattgagtcccataagaaaatcaatgactctattagtctctctttcaatcagaagatcttctacagtccgtggaatagcctgaagactcgtcaattcttcccaaagagtttgtttacgagtatgatacgatgacaaatccagattgccttgacgaagagagtgaatctgttgacgcagcttgtaaagtcgagggaggctagatttgtgaaatcgagtatagagatctttccagattgcagcggctgtgggaaaatacaagatgcttgtatagatctccttcgatacactattcagaagccaagacttaaccatactgttacaacgacgccagattttgcaataaggatcatcatcatcaggttttggaatagatccatccacaaatccaagcttattcttagcttcaatgctagtagtcatggctataatccaggtaccatagctgtttccatctaacagttctggagctaagactaaaccaggatgatcggagctaacaagatgataaggactgtgactattatcaggagaatccgatacctcaaagtgacgcgatgagctgtattgagctggttgatgaatcgcagcatgaatcgaggatcctggagctcttgctgatgaaccagaagactgctcatgaatcttcgatgaagcaatgacaagtagatccggtgaactactccgacgaacactctttccatttcgtttacccatggagaatcgaaacagctaacaaatgagactggatcgcaaaggaaacgaagagaaaacgtgtagaagttcaagagaagaaaaaaaatgagaagatgaacaaactccggtgagattccagtgaaatcaaatcggaaaagtttgttacgagactgagatcgagatattttgctctgataccatattagtaaaacaatctcattctcattaattagcaaaagagtacaattgggggtttatatacaaactgatattggcctaaaccataagcctctaaaccaaaattaagattggtttatagaataccaacctgtacagactctatatgaaatctatactaaccaaactaagcttatatacaacaatctaagctatatacattaatagacgaaatttttaaacaaaacccaggattcgaacatcaaataacccatccccaacgcaacaaatattatcaaccaacttttcatttcatcaatgacactgtgaatcatataaaagagatatgatgtcggtgttgaagataacttctttattgtaagattattttgatcgaataagctgcctcaaatcttctaatttcgacaactctttatctgtgaggacactatgaacacgtttgtaaaaatccatcacttggtctctagctaccaccattttctttcttcgcatagggctggggaataatgagttcttacagtgaaaacataagtggtgaccggacgcattgaacctaacatcgtagaaaacattgaggaaatttttgtaacataataaaaagagacatgtggaaagagaaaacaaaaataaaacaaaatattgagaagaaaccaagaaaggaggaatttctttagtagagagatctaccgagattataaagaaattgaggagtagaagagatgtcagcgagctaaagtgacatcagaggaaagactttgaagtggttcctcaatactagaggtatataagaaaaagaaaaagaggcagatccaaaatgttggttttgaaagttttatagatttttaagattttgtttttgttttcatttttcaagagctaattgtcataccattaccaatcaagttttaaaatgttggttttccaagaaaatacttttgctataatctttttttttgtcatcagatattatttaggattcaacgaaccaattttgaagaaaattgttaacaaaagcgaatttttcatgccaaatagttttttattcaaaattttagacttttagttatcttataagcaagcgttataatttatttatttttttaaagaaaattttgagaaaaacaattgcgaaaaaatgtcaggagatcttcaaatgttcaaaaatacaaaaaaaaaaaaaaaaaaaaaaaaattagtgtggggtaaaataatacgtttaaattttattgacttttcatttcaatagtcaacttttagtgacttcttatttcagtcgctaactttttgttgatgttgccaaaatagtcattaaattgacccgagatcacaaattgcgggtaacggaactttgttaaaatttctgttaaatccacaagtgactggattaaaaaaaaaaagtgcaactggcctaatatgagcccaataaaaaatatctcaaaagttttatgggcttattacagatgggcttagtcagagcactatcttacccaaacaattaaaaaaacaatttacaatatgttttcgttttctacttttttcggttattttgggcaaatgatatctacagctcaacaaatcaaaaaaattcaaaaatatttcaatttattatttctcgatttttttcacaactgtattttaattgtatttttagtagaaatacttatttttccaaaaatatttgtttgtgttgatgtatatataaaaaatctgcatcagtgttttgtctacattttctcttccattagtttcgttatctttttattttctctatctatctggatattattttttcacttggggatttggagaaacctctcctctctctatctatagccatggctgctttcacttgtacctctcgtcctccgatttctctccgctccgagaccagaatcgtatcctcatcaccatcggcttcttctctctcttctcggcggatgttcgccgtcttaccggaatcatcaggtttgagaatccgtctttctctctctccggcttcgttgacctcgattcatcaacctagggtttctcgattacgaagagccgtcgtctgtgaagctcaggaaactactaccgatagtatgttttctcactattcctttttcgattttggttattaacttgtctttgattcgtgctcgttggtggattttgagaactgattattgatttgtgcgagggaaattagaagcaaggtgcttgaatttgtgttgttgttcttgttgtagcatttagtaatctgctaaaaacttgagattagttacagattagtgaatctggaggaggaagaagagtttctttaggagagtataccttttgagaaaattcttgctgaaaatgaggtttctgttagaggaacgattcatgccatttgcgtgaaatttgaagaaggttgctttttaggatcacttcttttttggggatattttacttgattaatgcaaagtctctctaacaaacctagaaattaggttgggtacctactcagatattttattggttggatcatacacattgtgacaagaaacagttatttggctcatgagagaagaatgttgctttttgtgctttagagtaaacatatcttgattctctataccagcagataacgattttggttatcactagcattgatattctacgattttagataggtaagtccttttccgtgataatgtgtttggtgagattagcagtattatctgctacaatgttaactcagtcattggtctctcctctctggtgaaaacataaagctttatccttcactggatctatcaaatttctattttgaaaaactttcacttctagatcatttttaggaaatatcatatagacttgctacaacatactgatctagctgaagatggataaacgggtcagctgtctctttgttttattcgtccaccttggctgatatattttgttttcattcatgattctaaaagctttggcaataaggtgttgatttgtgttattgatcctgcagttcaagtggtcaatgactcgacatgggactctctagttcttaaagcaactgggcctgtagttgtcgacttttgggcaccatggtgtggaccttgcaagatgattgatccgcttgtaaacgatctagcacagcattacactgggaagatcaagttctacaaattaaacactgatgaatctcctaatactcccggccagtacggagttagaagcatcccaacgatcatgatctttgtcggtggcgagaagaaggatacaatcataggtgcagtgcccaaaaccacactcacatctagcctcgacaagttcttgccatgaaatatcacttgtggagtctgtaagatctcgtatctctctgtctctcgttcttgttctcattatctctgtaactcattatcactgaacatctagacctggataaataatatgatgtcatgtcttatgtcatttttactggtttgaagatgttttgagatgcggaactaaaggtatcaaagaacaatcttggactagactaatggaaccacattaaaatgattccaccaatctttttttggtcatgagagagatcttaagattgtttggttctgcaagttttttgatgaacacacgctaaggtttgttacttattctaaaactcctcgtattaaaagatattatgcgacactctaatgaatgagcacatgtatgcaaaaggggctaaaggttcatacatgtcctaatctaaagaaagaatatacgtattcagctgaaaaaggtctttatcgaccacgagcaaaagagaataaatacgttcgaaatatctccttatttttgcataagcaaagaaattcatccaccatagtttatgtgtacccaatttgtggataaggatatgtcaattaggacaaaatgaataatagccgaaagaattgagttatttttggactgatcccacagttcccgacaagcttttgaggttttagagttgttgatccggtctatgactaaagttcgaccaaaaccaagttatttagtttggacaatataaatcagaaatatcaagaagataaattatatgattagttcataaagttttagttttagattgccaagaaaatattctaatatattaggtctgaacgaaagtgttaaatctgatgaaacctctctattggtaatgtcttttttttttttttttggttgccgtccttggtttgagaattatatatttaggctgaagataaggtcaaaagaaagatgcaatccggttttataataatagatcagttggacttttataaatgcattttcgtgacttttgtttgtatcaaacaactttcattataatattatgatttggactttgtaaatggtcttctcgtgtccttttgattgtatcaactttcgcgacctaagaagtcacgacgacgtacataaatggaacatgagcataatgatcaaaattagaacaagtgtgaaatatcgaaacaaaggcaagtcaatatcggacagcttcgtacgtgaaacctaacccccacttgaggttcttaatgttttaaaataaacaagcggacaatgttttaatcatttgaccttcatgagtgtcggccatattctcctaccaaacatgctgcagcttgattagataaatgataaaacaataaaacgatagttatgttttattcatgttctacgatcctgatataattgctatgatagtcaattttgttagaataaagatgaaaatacttgaagctttattatattcttaaatcttagtaataattaattaatatgaatctcttaaagtctttacttaaaatatcattgttcccctatgaaacttgaaagttacacgataaatgcgctaatttcaatctttaagaaacaaatagcgtatagtaatacataattacaaatatattgatagacatcctaaaacaaaattagaaacatgaagttgatgatgatcttctggttatctagtttgactagaatggaatgtttgtaacacagaatgtggcaacgtattattattttttgtcaacatgtatattactgatgaatattgcatgttcataaggagaaaccaaagacacaaattatttttcgaaaatgtgaaaatggaaatgatccacgcccacgcgtcaggactcaggagcattagtccgaccaaacccataaactaaaaattgattttatcttttatttttttgatctcaagattcggcttctaattaataatcgtaaattacaagatcaataaaatatgctaaaaaaaagaagtcccataaagcaaaagaatgcgtgtctcgtgaggttctttatgagattgatcgttgttacttgtgaagaagcttcggcaaaagcgtgaagagagccatcttcttcgatctctcattagtccttttgttctctattcactccacccaatcaccgattgtttcttactttattagtttagttttactagtttattacgttaacataaatttattagtttagatttactactttataacgttagtttagcgttaagccacaatggaccttggcacggcactgacattgacatatatgagttggttagatagagctgcggcgatcgcattttgttaatcttcacaaagttttgacttgttattatgctgcatttatattttggttacaattttgtgttctttctaaaaattatatgtgaaaacatgaatgtgggtgaatacaatgcacctaaagaaagtggtatgacatttgtgacacgaccgttacacataataaagggttttctttattgttcaactaagttagttaagaaacaataatagtttttgtgatacaattaatctctatttatagagtttaccattacgtatcgtatactactcactcactctaaatccattagtaacgtatcttatcttagttaaataagtaaatttgtttttgacaatcttaagtatgtaaaaaaaggattaatgtaaaaaaaagtatagcaaagagagataatagcttttgtttaggataatgtataattaaataaacatttttgtttgtcaaatataggtaaatatttggggtcaaatatgcaccaaaggattcgaaatttaggatatttatggatagtgtgaatttggaaatatgttttccaacattgtttgattgcatttgaatgttgtctaacgttctactgctaaatccatgacggatctcatattggatactcgatttttttttttctattatcaaattaatcgtatatgagtataatatttaattaaatatttaattggcctataaacctcaggcgtatcattttttttttgttttgaactttgaagtacaagttaaaagagataagctctctaaaataagtaaatacaaaactctgacgaatctttcacatcgccacgtcatgaagatatcattgcgttctcaacttcgaggcttaataataatatcttatttttttccggatagtatttctctgataatcaaatgtgtataaatgaaatctctttcttctttagaattactgtttctctccgctacaaataccagatttttctctctctcgtcgaaagcaaaacagtctcctttctctatcttctgctcatatcagccattgacacagttgctttgggtttccctcaaacggcgccgattgtctggttcgtctccctaaatctctcttcatagctcctatatacgtgcctttgcgtatgtataggtgttttctcatctctgtgactatctatattcgccggcaaaatttctcggtctgttgattttgatttttttctctgtaccatttagatttgaattggtgttgaattttccttgaggtgatgagtttgttgtctctctgtttctgctaaagtctttctctaatcattctctttcttgggtttcgataaatttctcgaatttgtaagctaaacttaatccgacgatgatcaatggaaaatttggatgattggttatgagttttcggaagattctaactttcaatcccaagtttttatgggtcgtttttaatttcatctgtttccaaaatttcaaattttagggttcttcgataatatagggttttagattttctggattttttaaaatcttttgcattttttctgattaacctaattctcatctggataaaaataggctatctttgtgtgtttcacttgtaaatcttataatatattgcattcaatctggatctaatgttggggaaataaacacatttttttttcaggattttgaccactgatggccttagatcaatcttttgaagatgctgctttacttggagaactctatggagaaggtgcattttgtttcaagagcaagaaacctgaacccattacagtctcggttccttctgatgatactgatgattcgaattttgactgcaatatttgcttagactcggtgcaagaacctgttgtgactctctgtggtcacctcttttgctggccttgtattcacaaatggcttgatgtacagagcttctcaacaagtgatgaataccaaagacatagacagtgtcctgtttgtaaatctaaagtttctcattctactttggttcctttgtatggtagaggccgttgtactactcaggaggaaggtaaaaacagtgtgcctaaaagacccgtaggaccggtttatcggcttgaaatgccgaattcaccttatgcaagtactgatctgcggttatcacaacgggttcatttcaatagcccacaggaaggttactaccctgtctcaggggtgatgagctcgaacagtttatcatactctgctgttttggatccggtgatggtgatggttggagaaatggtagctacgaggttgtttggaacacgagtgatggatagatttgcgtatccggacacttacaatctcgcagggactagcgggccgaggatgagaaggcggataatgcaggcagataaatcgctgggaagaatcttcttcttctttatgtgttgtgttgttctgtgtcttctcttgttttaggttttcatagctagcttggttctgctactgttcagtttcttcaggtgtaaggaaaacatagtcaaagaaatgtacatttgtgttggaaacaaatcaaagttgcttaatgttgaggaatgaggagtttatgttgggttaaatcttgtgtagatttggtctggaggatagtgttgtctacatgaaaggccaaactaataggcctgatctgcatgtgtttgtatagttcagcccatgtgtagaaagataagaactaggctttccagacacatggtactgaatcactgatagtgatccattccataatcttccagcactattgtattattgtttttctatttgtttcattaaagattgtatgtcgataaaagggcctgcattaagagagtctctctttagtcaagcttcagcaactcttcttgtctgtctgatatccttctccactcggtcagcctctcttccttgtttagtcaagtttcagtcagaagtcgagctgtcttttcttttttgaactatttgtgtaatgatttataactttagatggagcttatctagatagaattgaggcacaaagggcaacaaacgtgcatgtctcgtgaccaactgagacgaagatccttccctatgaatctgataaacaacagcttatgctcactcaattcacaagattcccttcaagctggaggagactctgtggcagagttctttatcaatctcaggtttaccgatatttttgaccttcctggtgaatattttcaaatgattccagagatgtttagcgcactgagtgatggggacaaagaatggcttgggaaattgagaagccatggaacactgctgcctgctggcatgtttcaagaacgatcgaggagattatattcttcgtcttgctgctacatggggtctggaacgagtgaagagcattgtctcactctttccatgtcttctattggagccaaactcaaaggctcagcttacaatccatgtggaggctcgtgcgggtcagtcaactattgttgaggctcttgctaggataataacatttgaatcagctacactatctgatggagaagagagggggaggttgaatctatatattctcaaagacataggttgaaaaccatgaagcttacaagaccatcggtgccattagaccatggaggaatactcttttccttcaatagcaaagaaatattaaattagccgctatggtttggactttgaagcgtctgtaaccttaagtcctgaactatgggtatttatcgattaacacgttaacatccagaataaaatatacatggttacaattttattagaaaaacagaaagctataacttcattcatctgatgcagtgtacacatcaacaatatttttgttgtcaccagcagccaaaagcttaaggaaatagggatagtagaaaatgtgtcgaagaaggggttgggcatgagcatatggagacacataaggaacaaggagcagcaacaaaaccaataggaagatgattccaatacccaaaacgaaataaccaagcaaggggagatggcttaccgcaacatacgtgccagccataaatgctattgacattgatgtaagagcaagtccgagaaatggaagtgctatgttgaaggctttgagtatgatagaaagatcaccgagttgtgcccaaatgagagcaactattgttatgatagaagagtacattgccaatgtgtcgcatacaagaaagacttgaaaagccgttctcttggccaaaacggccattcccaagtggggaaaagagtcgttgtacccaccaggtaatgtgaatcctgcagtgaaagtcatagtggctactagagttgcaaccaacataagagtattgactcgatctttgtactttccaccatctggcttcttgaatgatctaagattttctgtaattggagtagaactttttggtgcaccagcattgatcaaagccatccaagtcaatctctgtatatacacacataaggattattatggaaaagtttatacaaagtaatattaggagcaaaaacgacttttagcatgtgcaactagaattttcaaattgattaatggttttactataaccttcaaataagttgagacagccctcatagggagagacatcttgtcacattacctggtgaactatgtagctcgaatcaatgttctcctcagcaacatctaaagctgtgaaaccaatgtagtttctttttttcaggtcaactctatggtcccaagtaaacatactcacaactttagggtgccagtttatggtggctagatgcaacggtgtgtttccattcacatcttgttcattaatcaactttttcttgttcttatccttacaacagcttaggataaacttgatgactttgagtttcccatactttgccgcaaggtgaagaatattttgaccgtctctatcaagcaactcaattgcctctggacaatgcttaagaatttcctcaagaatttgaacatgaccatacttggccgccatatgagttggaaataagccatcatcatcgctgacataaaccttgtctcgatttttgtcgaaaagataggaaaacccttgataatatcctatggatgctccaaaagaaagagaagtccttccttcatctctcaagttgataagacttgcatctttgctaagtaaagcatcaaggatatctattgaagaaattattttgggattaaacgtagcatgaacaagaacttacaatttagtgtaaatatgtttagtagaagttaacaacaaacctttcctattagccttcaatgctgcatgtacaatggatcttcctccaacctttgaacttaattcatttgttccgtgacacattgttgtcacaagacttgtatgtccagcttcaatagcaagatacaagggagaaaacccatctctgtttgcaacaaaagacaaagatttcgctgcagagaccaaataggaagcgaccacctcatgtttccctttcaaagcaacatgcaaagcagtgtcttggtttttgttcttagcaaaatatatcctttttgcaacaggaaggttagtacaagatatatcatttatgaaatcaattagattccatacaacatctagatggcctgcttctgctgccaaatggagagcaacttctcccatcatatttgacttcagtagcaaacctgggcatttctggattatataacgcacaaggcttacgtgacccgatgaagcagcaagatgaagtattgtatttccacggtcgttcactaaggttggagcaacactaatgtaactgttattacttctcaggtaattttccttacctgctcttactgcagccatcgtctttggatccatcggcttagtttcactggtttcgtcgaagagagtggacaaatcgagagatggtgtggatctgacattgtttcttggtattgcctgatggttttctgctactcgtcgatccaagtgcacatccggccttcccattgaaaatcccactcctgaaaatattcctagcttgctgtttatgaaaaaaaaaaacagttttgtagcttttccactgaatttgcttagcacgtagattaaaagatacgaaataataattcttataagctcaggttcaggaatgtctacacgtccctttctgttttcgtcaatatgaaaagaaaattatggccagtttaattttaatcgatagcgccattattgaatctctccacgcaccttttgttgtatacgaaaggctacttggaaattgagtgatttctaattacattattccaactagctaaaatttttttaaaatacaacttgaaaatttgataaagcatgcaatggcttactgaaataattagtctcacaataaaaaatttcacacaaagacaacacgaaacgacgaagtatgttgcagacgacatcacatcgtattgttgcaaagcgtgagcgatttttaacagggatttgctgcatagaacaacaaaacgattaattgactaaacggagttagccttgtacgataacgtactagtggaaaactaactgggctttataaatgattgggtcctaaaagcccactactagcaaacccccaataactccacagtctgaagcctgaaccgatcacctccgccctttatattctttccgatgtatctcgttggagagttgcacacataagctttttatacatttaacataacatagaatcataaataagccaaactagattgtgaagttttggatttttttaatcacatatgcttgtcaatacgccgtcgtttttagcaatgctttgaagaaaaaaaaggcccaaataaaaaacactcaaaattctcaagggcccaaaatcttaacgtctaagactaaaattaaaatggagttctttccgtacgacgaaaatttaacatcctccgatttacctgatttcttcagatgtccgagactcgttcttcatcagtcggcggaagtcgccttgttcccgatgattgagtccgagatcccgaagaatacgagaccggaagtgaaaattgctctctttctcgaacggctaaagcaccgaggatcaaaatcaaagggagagtaggatggtttctggatatgcgagtatgagatcgtcaatctaggagcagctgaagaagatccattctagagtctagactattaccttgctttccgttgaaatcttcctgagtaagcgggacctatcatcaccacaagctttctccatctgattgaaatgttttttttaagtctactttgttcaataatagagaattttttttttcctgaatagtttaagtctacttcgttcccacttcccaaaattgcatgttacatatttgttatttaatttgtaaactatccaaagcatgaacagccgactagtccaagattcttacactattcacgttctcagagaatttagattggtatttgaataagataatctgtaactatgtactatgaatatgaatgtcatcgtgcttcttgaagagtcccagagtttcaaagtcacaagcatacagctctctgcatccttgagaagaagacctataacacaagtttgaatagtaagatcactttattacatctatggatcctgagacttatagggcagtggttatgggtaaggttcaagagtttgaaaaggttatggaggagaatgaaattcctgttcttgatcaggtcacttttcaggggaatacgattctgcatcttgcagctatttatggtcatgaccacctagtgcggcgtatccttgcctatgagctaaacattcttagaaattggaaacgtggcttaaattgcaacttcgtcccaagtttctctcattatcagactcttttggtgagacgaaactacaagggagaccttgctctccatgtagcagctgctgcaggacacaagttgatagttggccttcttattgattgcctaaggcagcttccgcaagatataactatggtgattggatcagagcaaatggtaattggaaacattttcagagtttccaacaatgatgggaatactgcattgcacctctccctgaaaggaaaccatgtatctgtttctttgcaacttgttcgtgaagatcgtagcacttgctttcttctggacaaggaggatgtatctccactgtatatggcagctgaagctggatatgtttcacttgtggagcatatgttacggggtttggatgcaagctttgttgggaaatccgttttgtgtgctgcagtgaaaagccagaatcttggtcagttttgtacattttgatccagtaaatttcatctttctcctatgaaaaaatgttaaagatcctttgtattcatttgttttttaatgtcaaggcagatatattgacagctgtattagagagtgactcagatctggtagaatcgagggatgaagatggaagaactccacttgccactgcagcatccattggttatgacattggagtgcagcatatgctaaccagatttgcaagttctacacaggttgcttacattaagaatgaagatggttctttccccatccactcagcctgcagtgctaggtgcacctcagctctcaaggtgatcttaaaacaccacccagacacaatagaaatgcttaactcacagggtcaaaacgttcttcatgtcgctgctaaaagcgggaatgcacgagctgttggctatctgctcagaaaatctgacgtcaaaaggttaatcaatgaacaagacatagaaggaaacacaccgttacatttagccagcagtaattctcatcccaaggttgtaagtctcttcatacatgatagaagagttgacttaaaaatactgaattacaaagggttcaccgctttagatgcagctgaggatcatatggcgacgattccttcactccaagaggtttggcctgcttttgtacggcattggatatatttgtactcatttatatgaagctgttgacatcactgaacatattctatgttatacccatttacagtggttgatatggatggcattggtggctgctggtaccactagagctccacgagttcatctgagagcagacatccctggtctgacaacagatgaggacttaatcctaaaaattcacaaggatagagtaaacactctccttgtggtggcaacactagtggctacaatggcttttgctgcaggcttgagtgtgccactaggttacaacagcacagagttcaagtcaaatgtcaaacattcttacgaagaatctgcatttcatgcttttgtcatctgcaatagcattgccgtatatactgctgttatatcgacagttgctcttatagggacacaattggctgacctaaaatgcatgctgaccaccttcaagtttattgtgccactcctggggttttctattatcgccatgtctttggcttttgttgcaggcttatacctggtcttgggacatcattattggcttgccatatttgtcttggcctcaggcggtttctatctcatggctctacttctgctcatcatcccttacgcttcgccttatacttttagtccgctattttttcgctactttttgcggtttcccttttcaatgttggtttcctttgcatactggagggatggcactgatggggaatgctcgtcacgagtttttcgttggtcatttcttggttaagaagatcaagacttgaaaattcctgaattcccttgtctcatgatgttttagcttgagtttgaattatgcggtgctggtagtagttaaattggtttcgggaagtttgccttaaaaaccacattgtatcttgcttcctaacatgtctcccatgagttgcaaagtgtattcttatgttgactaataaatactttcaactttttgttacagtggtgttattctcttactttctattgtggtaatcaatgaagctatgtagagaactcaattttcctttaacggcgaagaaagatatttaattagccattatggtctgaagcctctatgactagctctgatgtgtcttcattcatctgttgctgcattgacataattgttgctctttgcagcactatcaagaagcctgaattctttagtacagaatatgtcgaaggaagatgttgattccgtaaatcaactagttcctgcaccaacagaagagttgggtatgacttatatggagacgaatagggaacaaggagcagcatcaaaaccaacaggaagatgtcaccattaaccacgcaaagggaggtcgcttactgcaagatacattgccataaacgctattgacattgatgtaagcgaaaagaactggaagtgcgatgttgaaggcttttgagttgagagaaagatactattgtcatgatagaggaatacatcgccaatatgtcacatacaagaaagaattggaaagctgttttctgagccaaagtggccattcccaagttgggaacagagcctttgtgaccacctggtaatgtgaatcctgcagtaaaagtcatggtggttacaagagttgcaaccaataaacggaagaattgacatgatctttgtactttccaccttctggcttgaatgatctaagactttctgaaactggactggaacttcttggtgcaccagcattgatcaaagccatccaagtcaatcgctgtatacaaggtaatattggggtaacatctttgtcatattacctgttgaaacacgtagctccaatcaatgttctactacatctaaagctgtggaaccattatagtttggttttttcaggtcacctctatgatggtcccaagaaaacatactcacaactttagggtgccagttttggtggctagacagcaaaataatagcggcttgacagctctggatatcgccgaactaaatcccaaccccactacatcttttgagaggtatttctaatttcccactacaacattaccttttctcgatcagtttgtcggtttgacctttgaatcttggttgatagaaaccgactaagagtttggctctgtgtcttctcttgttttgggatttcttatcgccagcttggtgctactgttcagtttttcatatgtgagaaaacataaacaaagaaacatacattttgtgttagaaacaaatcggagttgcttaacgttcatgagtttgtatatagattcggtagatggtggcttgatttttgaggttttgttgttctgttttgtttcttgactttcagagttcagacattggttttaatacaaataaaattagacggcaaaacaaaaagatggtggcttgatttacataagtcaatgcaatttcaataaatttttatttttttcataatataataaacaaattaccttcactctgtttctacactgactttggttttataaaatggacgaaaagagtatactaactcagatcctaagtatgaatctgaatcgactcttttgctgggagggaaggatttcaatggtaataccatgctgatcgaatgtgaaccctaaaccaccatcttgcaacaaatagtctaccaacgatgccactcgctcctatcttttcttccaaaggaatggttcgttcacatcttctccgtgccacgccagaagcttctccgcttaaaccggcatcgtctccgtcaaactgcaggttgtcactttctcccgttgaacttagattatattttattagggacgacgacttcaaagtcaaagtcgttagttataactaacattataactaacagcaattcaaagtcgttagttatatactaacattatataactcgggtcttttattttatttatatgttttcaggacattttcaaaacgtcatatcaaaactccctgtttgaattgccgtgttgtgacaagtcaggtactcaggtttgaggcttctttgaaaatgactttacctccattcctgcgtttactatttcctcttaaacaattcgaaagaccttccactaatttataggtgaccatcacactcacagtgatctccaaacaaagggtttttatataaatgaatcaatttatattatctctctctccctacaagcttaagcaaatcctcttgtcttatcccattctttcacttggtaagtctctctttggccactcttcttggaatcatttacttttctcttggtgggggaactgaaaagtaaaatcctcttttcaaacaatttgtgtcacgattaaagtttgagatggattattgtgaagcacgtctagatacaatccaggtacataggtcaacggttgtgtgtcttgacaccgaatctgttccagagttccttaccagtctcagattttcggatcttttcaacctccctggtgaatatgtgccgatgaatcctgagatctttagcgcaatgagagcggggaacatagagcttctggaaaagttgaaaagctacgaaacgccaatggcatgtcttaagagcgatggcggagattctgttcttcaccttgctgctgcttcgggtcatcttgaactagtgaagaacataatcactgaatgtccttgtcttttattggagccaaactcgaagtatcagattccgcttcatgtggccgctcgtgctggccgttcagcagttgtgaaggctcttgttgcttctgtattatatttttcacctagagtgcctgaagaagatagggatagactgaatatatatgttctgaaggacatagatggagatactcctctgcatgcggccttgaaagacctccatgaaaaagcagaggtaagccatgtaagataaaacatatttgtgtgaggaatgaagacttttgtttttatcagtcaaatttaagtttagggtataagaaataagacactcgtaaagtttgctacaaaattttctatatcaatggactttactaattttgttccatgtttctatgctttgttgaattccttgttgcattaggatccgcctcttactcgtctttgttttagaccaaatatcttgatcgtctaatcttatctccaacagcttacctatgtgtctgatgaatctataatttctgtcctagcttttgagatatcaggagcgcatcagaaaactatccttgtctcaccttattatgcattggcgacgtagcagatgcatttcattttctgatgcatcaacacgccaaatggagacagctgcctgtctagtgaatgcagaccaacatgcctcatttcttgcgaataaagatggaacatctcccttgtatttggcagttgaagctggtaatgtatcacttgtgagagcgatgttgaaccgtcctggtaataaaatccaaggaaaaacctctaccttagcttcacaattggaagggagaaaatcgcttttacacgcagccctcaaggccaaaaatacaggtctgtctccaaatttagttgttcaaaagttctttgctagaagaaactaattgaaatactacttgtttgggcagatgttcttaatgttattcttaatgatgacccgagccttgtcaacgagcgagatgaagaagggcgaacttgtctttctgttggagcatccatggggtattacaaaggaatatgtaagctattagatcgatcaacaaagagtgtttatgaatgcgacaaagatggttcctttccaattcatatggctgtagagaaaggtcatttgaaagttgtgaaagagattctaaaacgttgtccagattcgaaagagctggttaacaaacaaggtcaaaacatgcttcacattgcagcaaagagtgcgaaagtgggatcttttcttttgggttatataaggagacttgatacggagaatcatctgatcgaggagcaagatgtggatgggaatgcacctttgcacctagccaccataaattggcgctgtcgaactgttgataaacttgctgcctttgcttctaccgaaacaaaaatcctgaatatacagaacaaagatggattgagacctctggatattgcagagttaaatctacagcctgactacgttttacgggaggtgtataacatttatttttccatgtattcctttttgttccaatgtcaaaccaaatagagctcattgcctttgtctctatcttacttgggataacagagattgacgttgatggtactgctgtgcgtttacgcaccgaaaagtgttggttggctaccgacgagtggaatgacactaagaagcagatcagagcctctagacgctaaaaaatacaaagaccatatcaacgctcttctgctggtggcaactcttgtagccactgttacatttgctgcaggttttacaatacctggtggctttaacagctctgctccaaacatgggtatggccactttggccgatgactccaccctcttcttttttctggtattagacaccttggcgatgcaaagctctattgtagcaatagttgctctgatttaggcacagttgggggatcctgcaatcgttcacagagcttttcatttggctttgccatcactcttcgtttctctactctccatgtcatgggcattcgtttctgccttgcaggctacagttaagcaaaacactttgctcataaacttcatatccattatatctctgatcttctatggtgtgatgatcgtcctccttgcgccttacgttatcccacaggttcctggcatcccttttcttcaaagatggactcgtatttctcttgtcgttcttttgttttttgttaatgaagacgatgctgaaagatattagacctctggctctggtcacacttgtgtgaagagtcagtgggatcctcaggcgcagatcaagtgcaaaagtcgaaagtagattcttcttaaacatatatctctttctgaatacatgtatataatcttattagcactttcttgtgtgtaattctatatctccaacccttcttttgtggtttgttaatgatgtcgattgaaaacatcagaactcttgtatcaataacttttgtggccaagttggagttcgtggagatcaggttgaaacgtcaaatctcctcaaatggttgtattcgtacttggtatagaggcatttgatcaaatatgatgtttgattttgagaaaaatactgacaggaggtatgagtctgatttgatcactgtgtatattttggcaaatagattcttggtatactcgtggttgtagaaagaatcccatgctagagctgctcattgccttgcagggcaataaaacctcttcatacaaaataattaacggcttgacaactttgtatcgccgaactaaatcccaaccccactacttattttgaaaggtatgtctaattttccaccacaacattactttttttcttgatcagtttgtcatcttggtcgttcgactaagagtttggctctgtttcttttcttattttaggatttctcgtcgccaccttggtgctattgttcagtttttttaaatgtgaggaaacctagacgaaaaatatacattttgtgctagaaataaatcgaagttgcttaaggttcatgagtttgggactttggggcttaaaactctaccattttccctaccagcctaaaactctctgatcgagaggtataacttataccgtataaggttcactttgctttgaaagattacgttctgtttctgtattgactagtttagtttagtaatttcgttctgcagtttttaacagattacgtttattgtttaaatataaatttagatgtcaaaagtcgtcattagctttcagtggagaataaaaaacttccgtcattaacggactaacatgtttatttcgaaatgttaactcagtcaacttgttctagccttctaggagtctaagttgaagtttttaaagttggaatttagagatttttcataaaatacgaaacaaattacccatttacagcctacaagacctcactcacatcgagatgttaggttttacttcggattaaaaaaagaccttcactctgttttctacactgactttggttttataaaatggatgaacatggagtctctctttcatcaagctttagcgactcctcctgcaattcttatcttcttcttccttcacttggtaagtcgtctcttcccttttgacttggtatgtttactcttttttttcttttattgttggagaactaaaactgttacttcaaacaatttgtgggatgactttaggtttgagatggatgtttctgaagcacgtctaagtagaattgagtcacagagttcaattgattcgtctcatgaccaaaggagacaaggatatttctccatgaacaagataaacaacggtcttcgctcactcagttcacgaggtttccttcgaaacagaggaaaagccataccgctgccaatgaaagataccgagaagactgtgccggagttcttagttaatctcaaattttccgatcttttcgatctccctggtgaatatgtgctgatgaatgcggagatgcttagcacacttgggaacgaagaatggctggagaaattgagaagccatggaacaccactaacatgtctcaagaacgatcgaggagattctgttcttcatcttgctgctacatggagtcatctagaactagttaagaacattgtctctgaatgttcttgccttctaatggagtcaaactctaaggaccagcttccacttcatgtggcagctcgaatgggtcacttagctgttgttgaggatcttgttgcgtcggttacatttttctcagctagactggctgaagaagatagggagatactgaatccatatcttctgaaggacataaatggagatactgctctgaacttggccttgaaaggacactatacggaggttgctctctgtttggtgaatgcaaaccgacaagcttcctttcttgcatgtaaagacggaatatctcccttgtatttagcagtagaagccaaggatgcatcacttgtaaaagcaatgttgggaaatgatggtcctcaaaggaaaaatttgaacttagaagggagaaaatatcttgcacacgctgcattgaattccttgagcacaggtttgttttgttttttccaatttgcaggatcataagttcaaacctgaattaactgaatcttcttatgtacggtaagtgatatacctacttttttgagcagatatccttgatgttattcttaatgaatatccaagtcttgtggatgagcgagatgaagaaggaaggacttgtctttcgtttggagcatccattgggtatcataaaggagtatgcaacctgttaaaccgatcaagaaagggtgtttttgtatgtgatgatgatggttcctatccaatccacctggcagtagagaaaggtcgtattaaagttgtcaaagagatttgcaaacgttgtccatattcaaagcttttgcttaacaaaaaaggtcagaacctccttcacatcgcagctgaaagtgggaaatttagaattctacgccacttgacagcacatgaacaaataaaccatctagctaacgagaaagatgtggatgggaatacaccactgcatctagccacaatatattggcgtcctcgagctgttcgtgagcttggagggaagaaaaacctgttgatacaaaacaataacggcttggtagctctggatattgctgagtcaaaactgcaaccacactacatctttcgagaggtatgtctagcttacctctttctaatatcggatcaattatttacagcttttgacccttgagttttgattacagaggttgacactgctagctttagtacaacttcacttccaaaatgatcctagatgcgcacatactatgattcaaacaagaccaataatgcctcaaggcggaaacaaagattacatcaacgctcttctagtagtggcagctcttataaccaccgtaacgtttacgtctggatttactataccaggtggttttaaagactctactccaaacgtgggcatggcaaatctaataactaaccctcgtctcatccttttcctgatatttgacattttggcactggaaacctcatttttagcagtagtttctctcatattggcgcaattaggtgatccgacattatatcagagttccgtaagggtggccatgatatcactgtatttcgctatgtatttcatgaccttagcattcttttttgtcatggttattgcagctgggaatgttagatggcttgtttatgtcatcttctgtttaattttctccattttaactctggcgttctcaaggtttatgcctcatcttctactacattattgtggctctagttataagttgatgatgccatttgttagttttgcaaattcatgtgatgatgacggacacgaaagtcctcagttctctgcgcacaagtctgagaagatctcaaacaatgatcaagttgaaatgtcagacactacttaaaatgggaatgtttctgatgcagggcgtccactagtttctacgtactttggttttctcatttatttgatgtacaccttttctttatcttggataatttgtttttttattttattttttatatataacttttgattagcctccacgtgagataaatcagttatttatttttgattttttgagcgaaatgttattaaaaaaaattgaacgaatgtaaaatgttgttttgagaggatctaataggaagtaaaaccaagaataaaaaatgcagacaagagttttagtttcttgaggcgaaccaatccgaagccaatcttcaagcttgcaccaaacggttgataaactgatcaattggtcaggcaaacttgggagctttccgtgtcgacgtcttactttcaagccaaatagaatgaacgattcttttaagtacaaggttttgtgttttgactaaaaggttatacgaattttttgattaaacttcgtgaaaattcctaaaaaaaaccgaactatttaaattctgccagaaaattaccttaaatttttttcgttgtcagaaaaatacacaaattaatttgggttggaaataaaaacacgttttttttttcctactacagtagaaactctataaattaatattcgataaattaataaacacgataaattaataaattttgctggtcccaaggtcaggtcaatgtaaaaattaaccaaaatcgataagataataagataatattttttttgaaatccctatgtaaaaatatggtcccaataatatcataaattaataatcataaatcttaagcatatattctaacactaattttatatgattattttattcaaaccacaattacaactctttctagagtacagttggtatgatcttttttgtactcacataactgtttgcgtatttatctgtcatatttggttttgtaacattttttaatcattgttaagatttgtacaaagaaaaattggattaaccctcgtgttaacgtcgtaaataaaacggacacaatattttgtaggaaaataaattaaaaagtcaagagaaaaatattttttttaacataattgaatataaaaacaacaaaacataagaaaaactaaattaaaaaacatttttaaaagaatttagtattgtattttacgtaaatatttctataaattaatatttattttttaacctataaattaatatttattaatttatagaataaattaatatcagtataaattaataaaatctcatggtcccaacattattaatttatagagtttctactgtacctctcttcactcttacgaaacggcgtcgcggagatgaaaagactatattaaactgcgcccaaattttgttgaactttataggcccaattgtgaacacaacgttgagttcgacttttcattgtaaaaactaaaaagctttgaactaaaatgggccatttgtaacctattataggcctaatattacacacctttgtcgagtgcgacttttttcactagtgcatgatgcgcctcctcctacgtcgttcaaactaaatcggcggagacggctaatagaatttatgcggccgtcgaatatcgccgagccataaatcccagatgttccggcctccatcaccatcatctgtaaaatggtggaactgctcttttacagagtgtaatcacgtaaagggcaacaatcacaatcaaaaatcgaagagaaacgcagatgtggagaattgaggacggtgcactactctcaacatcgtgaactggatatggtggatcaaccgacaaaagatcggtcttgtcgccgattgtttttctaattcgttgacctcaaaccaaaaaaaaaaaaagagaggaattttttatagctagctaattagcctattattgcgtccgcttttcttcaagactttcaagagtaatggaatttttggatagtagcttggagagatgttgacaagggatgagatagttgaccttagaagttgaataaacccataagtcgttgactttctatataaataatagtataagtatcccacaaaatgctttcttcttttggatcatgtcttgttttctttgtaatattacaaataaggtagacttgagaaaccccttacaaattataagggttttttatctgttgaatttgatgcttccttttttctgatgggaaaggaaaaacaaagaaggtacgcgtttgcttccttttaaatagttgactatttcttcttccgtgatggacaatagtaaaatcttaagacttcttttttctgtagataccacttaccaatctatatctcaagcattgtggagttggttctgcaagcatttggaaatattgaagttgggaaaagccttccctgagccctccagcatcaagtcgttgcttcggctgacgaataaggtgagaaacctcaagcttactttttactctgttttcattgttttctttctctttgagcttctgttatatgaagattcaggcaactatgttagtgcatgatatacaattaccttgcggttcaatcattaaatataaaacctttgagtctcaatgatctaagcatatttgtttctacttcatcaattcatcgtatgtagtttttttaaaaaaatttattccttattgtttaggcgccaaattatcaatatgggaaggtctgatctggattttgaccgtcagaagaaagacgcaagctctaggatgttttatgcagacgaaaccgggcgtacgcactctctcgatttgtcaactctcttcaatgacacaagtgaaactgtgccaatgggtccaaagaccatcgccgctgtaagagcaggtgatgaaacttacctgagagatatgaaatttgatgttaacattgctttaagctcagtgaacgatcatgggaatacaatgcttcatcttgctgcagccgcgggtcacaccgacttagtgtgttatatactcaatgcgtacccaggtctgcttatgaagtcaaattccatgggggaagttgctctccatgttgcagcaggtgcaggccatctcgctgttgttgaggctctggttagttttatcaaagatatatcttgtaataagcctggtgttgccaaaaagatatactttgccaaggacagacaccaagacaatgctttacatgtctctttaaaaagaaaacatttgaaggtggcttcctgtttggtttgtgcagagcaaagtttgtcttttgtagcaaacaacgatggggtttctcccttgtatttagctgttgaagctggacaggctgatcttgcaaaaacaatgtggcaacattcaaataatggatcaagtagcacatctactttagcttcaaagattggaggaagatccatagtacatggcgcgatgaaggctaggagaaaaggttcgttctttcgataaaccttaactagcactttatgtgtcttgttcaagttatttacaatgccaaaaaatacctttttagcagatattcttgttgctatacttagtgaagatgcaagtcttattaactttagagatgaaggaaggacttgtctttcttttggagcatccttagggtattatgaagggttttgctatctgttagacaaggctctagacagtgtttatgtcagtgatgatgatgggtcctttccaattcatatggccgtgaagtatggttatgtcaaaattctcaaggcaattcttaaacgttgtccagacgcacttgagttacttgacagagaaaatcaaaatgttcttcatgttgcggcaaagaatggaaaaatcgaagtcctcaaatttattttaagatgttgtaaggataagaacaaggaaaagttgattaatgaagaagatgcaaatggaaacacgccattgcatttggccaccaaaaactggcaccctaaagttgtgagtatgctcacttgggacaacagagttgacctgaaaacgctgaaccatgacggtgtcacagctctagatatcgctgagaaaaacatggattccagctacacattttttgaggtatggtgtataaattatcattataaaccggtaatgcttatgtatgtactttatataatttgcttcattctggtgatactacagaggttgacttggatggctttgatatctgctggtgcaccaagaggtcccaaactaatattatcgactccagtaacacaaaactcagatggtggaaagtacaaagatcgggttaatacacttctgttagtggccactcttgtagccactatgactttcactgcagggtttacactaccagggggttacaatggttctgttcccaactttggaatggcaacattggccaagaaaacagcgttccaagtgtttctggtattcgacaccttggcgatgtactgttctatcataacaatagttgctctcatttgggcgcaattgggcgatctttctcttatcatgaaagctttcaaccttgcgttgccacttctcggacttgcgcttacatccatgtcaatagcttttatggctggcacgtatgctgcagtaagccacctccctttgcttgcgtatttcatattgggcatcggcttgatcttcctcttggttttgctgctgatcattattccatatgtgtccccacattctcctacccaaccctttcttagacacatcttttactacccctatttccttatgcttttggtcgctggtgacaacagaaacaagtactaaagctatccgcggtaaatcactacgcagctttctgttttaccaaaatgtgtcatgtaagttacgtcagatgtatcgagtaaacgtgattgcatttttcaccagcttattattagatatcactaggttggtgtagtactttatgtctagcttggttatcaactctggttaagagtcttagtatttaagtctttctttgtacatcttttacgattgaatgaagatattttacaattctgtttctctctcgatctcaatatgagagaaactaatacttatagttggttttgaggcagcctctatgattctggccatgctttgtaatctatgttagtatacgacatgttgttgattcaatagttgttttacataattagctttccatgttggttcatgcctcagtctccatattgacttttttcatcgtagtagagctagactttccaattctttatctaaaaggtggcatccacactcatacctaacttctccgggtgctggcacattgcttgaaagtttggagcactaaagggattattgaaataaacgaagatatatttccctcttctttatatggttgatgggttctctgttttttcttatggttggggaactgatactgtcttttcataatctttgtgtgaggacttagttcttaaatggatttttctgaagtttcgtatcgggaacgcatcttgagctttgtttttctgattttcatttgtataaccgcagcctccttagtccttaccccttatgtgatcccgcaggtttacgggcttcttattgttggagttttgactagttcatatcttgattttctattgctgtttgttaatgaagatgatgatgaaaaaaattacaccaccggctcatctcacacgtgtgtgaagagtggggagtccatgggatcttcaagcggggtccaagcggaaaagtcgaaagtgctttaaagaattgcatcgtttgaaattgccttgtctttatttgatcactatagttttggcgtttactttcctgctcgtaataaacgcggctagtgttaaggttttttttcgttggttgtaatgtaagaattttactgcagcagaaaagagaaaaacgttttaacagtcaaatgttagctaatttgaattgttttgaaagaattttttaaaaatgaaactaaattagaagagagttggaaagaaatcccaaaaatcccaaacttagctttgggtacaaagtctggggttttaattgctacaagcctattataacgacctcttttttcgaagacacgtgtttagagtatggagagatgtttctttagtacacccatatacatatgttgtgtttctgcaaaactatactcttgattgacaataacaacatatcacgttcaagaaaccagcaagtcgttggatatttattatccattgaatgctttcttctttttgatcatgtcttgtttcttttaccattccttcttacttagaggatgtatatagaagctggagccttctttgtttctataaatgctgcttatcatcgtggagttggttctgtaaacatttgaaaattctgaacagtttcacctgccattggatgctttgtttcaatttcaggtgcgttagaaggtttgcagagtagctagagaatctcgtatcttcactttctgctacttggtatcagcttcgtcactttatatcaacacattcttaatatacaatactactttttcatccattaatccccttacaatgtcgagtaaacgaagcatctgtcccctggtattgtcttcgagcttggtgtgtttttctagccagccccaagttctcgagttgatcattgtttgtattctgacacattatttggggacgagatgttttgttgactcgatataagaaggggctttatggaagaaattgtagtattatatattgagaatggctctccaaaccatgttcttcctcgtgctgaccacttagctattattaaagcgtttgttgcatcgatatcatagattcagctaggctgtctgagagaggttgagactggaaaaaaaaaggacttgtctttcttttggagcatccttaggatattatgaagggttttgctatctgttagacaaagctctagacagtgtttatgtcagtgatgatcggcttgatcttccttttgattttgctgctgatcattattccatatgttgtccccacattctcctacccatccctttcttagacacatcatttactctccctattttcttatgtttttggctgctggtgacaacagaaacaagtactgaaagtatccgaggtagatcactactcagctttttcttttaccaaaatgtgtcatgtaagttacgtcagatgtattgaataaacgtgattgcattttcgctagcttatagttggttttgaggcagcctctatgattctggcttgccgtgatttctaatcttgagctctgtttttagagatctcctagcaattctgataagaatcaagtattgatactgtcttcttacatttgaatcaaggttaagaactctcccaaagccaaaaggctcccaactatatttatcctagaatgcctaacaatttcagtacatgatctgtggttatgtaaaaccaatacatgtttctcacggatatgtggaaaaactttgttgaaagactctaacttggtgtggcacttggttagtatacgacatgttgttcattcaatggttgtttgacataattcgctttcctttttgttcatgcctcagtctctgtgttgactttttttctataatcatttgggtttagagccagactttccaattctttatgtaaaaggtggcattcacactcatagctacttctccgggtgctgccacattgcttgaaagtttggaacactaaagggattatagtaataaacgaagatctatatgatcgaaaggaaagagatggatatactgctatgcatttgaccttcacaggtcgccatgtggagctagctgatgtcttgtcaatatgaaccaatgtcttcattttttgcgaataaagatggaaaatctcccttgtatttggcagtagaagcttgtaacgtttcacttatgacagaaatgttgagaactagaggcaatgatggacttggagggagaaagtctaactttaattcagttggaagggtagaaaatttcttctatacatggatttttaggcgaagaatacaggtttgtttttgatgcttcttacccattagtagctatgtttagtttgttcaaatttctatattcagctagtattgagacggaagactaaatctttgcatgtgggctaatttatacagatgaccttaatgcttttcttaaagaagatccaagtcttggaaatgaacgagatgaagaaggaataacttgtctttcatctagagcatccatagcgtttcataaaggagtaatgcaacctgttagatcgatcaacaaaggttgtttacgtgtaaacgatgataaatgttttccaacccatatcgcagcaaagagtggccacgtcaaggttgtcaaaagagattctaaaacgttttccagactcaaaacacctgattaacatgcatggtcagaacgttgttcacattgcagcaaatactgggaaattacatctatatcatttcacaaactgtgataaaaccaaatatttacctctactggtggtatgtcttgtaggcttgtagttgtagccacagtaactttttctgtaggttttacaatggcaggaggctttgacaactcttctccaaacttgggaatggcaacattagccaatgcccccaacctcttctattttcttatcttgtatttgacacccttgcaatgcaaatctctgttatgacaatacttaactcggatttatgtgcagttgagggatcctacactcgctcacagatccttttaagtggcgtcaccattactgttttttgctatattctgcatgccctgcgttctatttttgggtggttattacagtaggaaattgtagaggacttgtcatagtcttttccattacatctataatcttcttgggttatattaatttatatacccagaaaacataaaaattaagaatatacctataatttttgtataattagttctctttcctcaacttatataagttggacaaaaatacccttccgctcatcttaaattatttaacaacataagaaaattattacagacgtcttttatctgattcaaatgatattgtttatcaaatatataaataaaagtatattatgaattaactgataactattatgttaacatgataacaaaatatagatcaataagtttataaatatattatgttaaattatattatatcgcgataagattataaatataccgtattaaatcatattatatcgcgataaatttataatttatgtgatatattatgttaacagtgatattttgttaactatactttttatgtatttgaattttagtttttatgttttctaggtatataaattaactattttgttatcttgttaacatagttattagtttattgtaaaaaataaaagaaattgtaaaaggtaaaatcgtctaaaataagttaacagtaacatttgtacagttaacaactagtcaaactaattataaggtcttccatgtgtacagagtgatattacccgatcttcttctctcttgccatgtctttttttttttttgctaagagagtaaatatcaatatatgaaaatgtagttgtcacaaacttacaatagtagaagacctaaagagtttgatccatgccaaaaaaagagagcttaaaaacagggatcaatttacaatatgcatctatccttagtggagccacaagctcatgaggtttctcaatttcttcatcttccttctcctggctgtgatagaaatttataaactgatcacggtcatgttcttttgtaatcgctgcgtcagcaatcagcgacacaaagttataacttacttgcatgtaaagtatgtggagagtattttaccacgacatgatccacgacatactaagttataacttacttgcatgtaaagtatgtggagagtattaaatagcacgaatattctctaaataaagattgaaacttggaagatgtctgtacaagacaaattttattctaaataattctaccgaatatttttctcttaaattttagttttaagtatatttgattttttttgtatttgttttgattttccaggaaatgagtaaatttcgtcgagtccctctaatattgaatctagtgttttttataattattttagtaatgcatttatgatgttttatttttgtggctacgagaagaaaggccttgaaatcttcgatagaattttgtcttgttcagacatcttccaggtttctattttgttttttgtaaggaatcttccaagtcttcatgcgggcggacaaagctactatcggtctaagtctccgcctatgagtctcctgctatcttcctttttaatcttcttggtgatagttacgttgagatatgcggttgcctttttaagcttaaaacttaagcttctttaattttataattccaacgacagctttacacgaaacaaacaaggcacagagattaatgacgagggcgtttcatctgatcattgactgcattactggagacactggatctattcaaatgctcgttacgaatctttatgacttacccggagaatatgtgtcgatgaatcctgagatctttagcgcaatgagagcagggaacgtaaagtttttggataagatgaagactaacaacaatacaccattggcatgtttcaggaacgaaacaggagatttcactcttcaccttgctgctgcttggggtcgacttgagctagtgaagagaatcgtctctgaatgcccatgtcttcttttggaaacaaactccaaggaccagattccgcttcatgccgctgccgctgctggccgtttagctgttgttgaggcttttgttgcgagagtaaatgaaatttcagatggactctctgaagaagagagggagagagtgaatctatatgctatgaaggatatagatggaaataccgctctgcacttagccttgaaaggcggccatttgaagacagctgcatgtctggtaaaggccaaccaccttgcttcgtttcttgcaaataaccatggagtatctcctttgtttacggctataattgctggaagtctaaccctagtggaagcaatgatgtacgttcctggacagacatgtaacttggcatcaaagttagaagggagaaagtcgcttgtacacgcggctctaaaggccaaaaactcaggtttgtgtttcatccagttattcatttttgcttgcgagaaaaaactaattctagtttttctttctatcacatttgcttcctcaaaaagataatcaagtatttgtgtgagcagatatccttgatgttattctcagtgaagacccaagtcttgtcaatgaacgagatgaagaaggacggacctgcctttcagttgcagcatacgtagggtactataaaggggtagtcaatctcttacaccgatcaacatcaaatgtctttgagtgtgatgatgatggttcctatccaatccacatggcagtggagaagggtcgcgtcaaaattttcctaaagcttctcaagtgttgtcccgattcacaatacctacttaacaaacaaggtcagaacattcttcacattgcggcaaaaagtgggaaaactggaacttacctattacaagtcatcaaggcttatgatttgataaagaatgatctgattatggagcaagatgtggatgggaatacacctctgcacttagccaccttaacgtggcgtcctcgaactgttaatatacttaataagttcactttgggaaaccacctacatatacgtaacaaagatggcttgagtgctctggatatagcggagtcgaatctgcagtccaattacgtctttcgagaggtatatctgtctgtacgttattttgtttttgatacaatataaagccttttctcttatttccatttgttcatcttctttggataacagagaatgacgttgatggtcttattgtgcacttgttcgccaagagggtttaaaatgatacccacaagtggaataacattaaaaagcagatcagaaaaagtagccggtaacaaatacaaagacagtatcaatgtacttctacttgtggcaactctagtagctactgtggcatttgctgcaggtattgccataccaggaggatttagtagttctactccaaaaaggggaattgcaattttggacgatgatgacttcctctcgatttttctggtgtttaacacattggcgatgcaaagctctgttctggcaatagttgctctaatatgggcacaactgggggatccagtacttgttcataaaacctttcatttggcattgccagcactctttgtttctctagtttcaatgtcctcagcattcttctgcggcgtggtggctacaacaaagcacaatccttggctttttgatagcattatctttatctctatcatcttcctttttgtggtagcttatctccttgccccttacgctatccctcagtttccgggcactccttttcttcaaagaattactaaatgttatctcgactttatgttgttgtttgttaatgaagatgatgttgatattgtctgcgagaagaagcaggagaccgtccatctttatgtcgcgaactaagtcgaaaggtaaaatatcctaaaaaatgtctttaaagaaataatatcatttcatctgtttgattaagatgttgtttaaacgttattggcttttcggtgtttcgtgatttatctatgagtttttatttatggtttccatcattccatgtactctattttgtcaaaatacataatatattgtgtggagactctctagagctagagaatggagcttctgttgctatgttgattcatgtgttcagaacattcttcacattgtcacattaaaaccaaaaaccaaaaaaaaaaaaacattcttcacattgcagcaaaatgtgggatagttagataaacggcgtcgctgagataaaagggattactaaaaactgggcccatttgtgttaaactttataggcccaattgtgaacaccacgttgagttcgacttttttagtaggcagttgtccaaattatgacaaaaaaataaaataaaataaaatgggcggttcggctgagacagctaatcgggtatttgcggccgtgtgatgccgccgtacaattatatccatggtcatggctcatcattagtcgcactgctctccttttctcaaagtttaaattcgacatttggtaaaatgatgaaacctcgatggaactgctctctttatggaatcacggaatggacaaataatcaaaatcagaaatcgaagcgaaaagggaggagaaaaacgcagatttggaggattggggacagattagatactgttgaatgcatcactctaatgctatcagcctattaatagcgtcctatattttcgaagacttttaatgtttagggttatggatttttcgagcgaagcatggagagatgttgaattggatactataggatttggtacaacacatacatatgttctgcttctgcaaaactaacatatcaagttcagagaaaccagtaagtcgttgaatattttattatccattcaacgctttcttcttttggatcatgtcttgtttgcttgaccacttcttcttgcttaagaggatggacaatatataaaaactggagccttctttttctatgaatgcttatcatcgcggagttgatctgttcaattcacctgccattggatgctttttttatatatacttcactgttcaatttcagatgctttagaaggtttgcggagtagctagagaatctggtatcttcagttcttcaatttcagctacttggtatcagcttcgtcattgtatatcaacacattcttaatatataatactactttttcatccattaaaccccttacaatgtcgagtaaacgaagcatctgtcccctggtattgtcttcgagcttggtgtttttttctagccaactccaagttctcgagttgatcattgtttgtattcttgagacattatttggggacgagatgttttgttgactcgatataagaaggggctttatggaagaaattgtagtattatatatcgagagtggctctctaaaccatgttcttcctcgtgctgaccacttagctattattgaagcgtttgttgcatcgatatcatagattcagctaggctgtctgagagaggttgagactgaatctatgtaatctggaggacagagtggagatactgctatgcatttggccttgaaaggtcgccatgtggagatagctgcatgtctggttaatgtaaccagtttcttgccaatagaaatggaatatctccctagtctttggcagtgcgaagttggtaatgtcccacttgcgatagcaatcttgagaactacaggcaataagggagaaagacgaactttgattgacggttggaaacgtggctttgaaggccaagaatacaggtttgtttgcatcttaccattagtagctccgaacttgggcatgatggccattttttccaataatcaacttattatttatggtatatgacaatgtggcaatgcagagctccttgtagcaatagttgctcttatctgggctcagttgggtgatctcgaagactcgactcgttcacagagccttttagttggctttgccgtcactagcctttgctctagtcttcatgtcagccacattctatcatgccttgcttgctacaacaagtcacaatctttttatagttcacttccatcttctcggtgccacgtttggagcattctccgcttaaaccccgcctcaattttccccggaaattatgctgcttctttggttagttaaggttacagggtcacgttgttactgttttgccaacaattttagactttattaagagacgacattaaagtctttgacttaaaacgagtgttagttaggtctttttttaatatctcgctttccaagacacctttctggtttaagacaaagtcaaatactcaaccttgaatgtttcctctaaatatttctgagtaaataaagaccaatacttaatttataggtgaacaatgtgctcttggcacgcacatggacatggcatgatggcacgacgaggcgagtttaaatataaatgtctttagcaaatcctcttccatttctcatctcctttttccacttggtaagtcttttgtctgcctccctcttcttggtgtagttgactttttatatatcggtggtttaaaacaagttatgtgatggatttcaggattaaggatggacaactctgaagcacatctagatagaattgaggcacagaggtcaacagatgaccaacataaacgaagatgcttccctgtgaatgtgataaaaaatctaggcacactcagttcacgcagtttccttcgacgcagaggagatgaagccacaccacctacgactacgatagacattgaatctgtgccaaagttccttaccactctcagattgttggatctttacaaccaccccggtgaatatgtggcaatgaattcagagatctccagcgcaatgcgagctgggaacaaagaatttctggagaagatggaaagctacgaaacaccaatgtcatgcttcaagaacaacaaaggagattccattcttcaccttgctgctgcttttggtcatcttgagctagtaaagagcatagtctctaaattcccatctcttctgttggagttaaattttaaggatcagcttccgcttcatgtggctgctcgtgatggtcatttaacagttgttaaagctcttgtagcatcggtaacattttgttcagatagactggctgaagaagatagggagaggctgaatccatatattctaaaggacaaaaatggagatactgctctccactcagccttgaaagacctccatgaaaaaacaaaagaactccatgaaaaaacaaaggtatcgcacataatatcagttaaatgacctaagagactctttagttaatagtatttatcacgacaaaaccttctgtacatcaaagcaaaatttatatcgaatgttattgcaccaattttctctcaagtgatccatgtctaatcctgaccttaactcgtactattttcactcgatggtaatttttttttttttgcttgtatcccttgttatattaggattcgactcttggttacctctgttggtcttataattctcttaatacctccaacagttttaccaatcattattttcctaacttttgatgtatcagcaacaatccataaacttaggatccttgattccctatctattctacaggatatgcattggctacgacgtagcaaatccaagtcactttctaatgaatctacacacctaatggagacagctgcttgtctagtcaatgcgaaccaagatgtttcgtttcttgcaaataaagatgaaatctcccccttgtatttggcagttgaagctggtaacgtatcacttgtaaatgcaatgttgaacagccatgttaataacgttcaagacaaaacctttaacttagccacacaattgaaagggagaaaatcgcttgtgcatgcagctttaaaggcaaagaatacaggtgcgtaccaaattaagcgttcagacttctttactcgaagaacctaaccaagttcctacttgtttctgcagatgttcttgatgttattctcggtaaatacccgagtcttgtcaaagagcgagacgaaaaaggacgaacttgtctttcggttggagcatctgtagggttttatcaaggcatatgcaagctgttagacacatcaacgctaagcatctttgattgcgacgatgatggttcatttcccatccataaggcagtggagaaaggtcatgagaatgttgttaaagagcttctaaaacgttttccggattcagtagagcagcttaacaaagaaggtcagaacattttccacatatcagcaaagagtggcaaatccacattgtttcttatggaacatatcaataaagtcgatacgaagaatcatcttatggaggagcaagatatggatgggaatacacctttgcacctggccaccataaattggcgccctaaaactgttcgtatgcttactaaatttctttccatcagaaaaaaactcttggataaacataactccgttggcttgagacctctggatatcgcagagataaatctgcagtctgactacgtttttcgagaggtataacatatctcttcctatacatacagttctttttgttccaatatcaaaccacatagatcttatatagtttttttacatctttctggggacacaatagagaatgactttgatggtcttgctaggcgtttacaatctaagacagagaggtatttctttgctaccgactagcgggatgacactaagaagtagatcagaaaaactaggtgatggtgaaaaatacaaagaccgtgtcaacattcttctactggtggcagctcttgtagccactatgacgtttgctgcaggttttacaatgcccggtggctttagcagctctgctccaaacactggcatggctattttggtcgatgaccgttacctcacaacatttattatgaatgacactattgcaatgcttacctcagttttagcaatagttgctcttatctgggcacagttaggagatccagaactcgcgcacagagcgtttcatttggctttaccagcactcttcgttgctctactcttcatgtgtttcacattcttttatggcgttctggctacaatacagcataacatcgtgctttcacgcatcataagctttgtatttattatcttatttattatgaccggaaccctccttaccccttacgtgatcccgcaggtttacggccttcctattattggagttttgactagttcatatcttgattttctattgctgtttgttaatgaagatgatgatgaaaaacattacaccaccggctcatctcacacgtgtgtgaagagtggggagtccatgggatcttcaagcggggtccaagcggaaaagtcgaaagtgctttaaagagattgcatcgtttcaaattagctttccttatttgggtcactaaagtcttggcatttactttcctgcttgtaataaacgcggctactgttaatgttttttcttggttgtttgtacaattgtacttagtaatgtaatagcaacaaaaaaaaaagaaatcgaagcgaaaaaagatgtagaaaagtctggatttttaattgctactagtctcgacctctatattcgaggacttatgtatgtttagagtaatggaatttttgagtgaagcacggagagatgttgaaaattggatactatatggttgttattagactacgcaggagctgatttggtacacacatacatatgttctgcttctttcaaaactaacatatcaagttcaagaaaccagtaagtcgtttatctattccatgctttcttcttttgaatcatgccttgttgtttgtttgaacatatcttcttacttagtggatggactatatttaaaaagctgcagccctctttttagcatagtataaccgctgatgtacacctaccagcttgataactctttttcgtggtttctgtgtactcgtttctgtttgtacagatacttcttgttcaatttcagatgctttagaaggttttcggagtggctagagatctgttatctgtatgaacagctacttggtatcagcttcgtcattttatcaacacattcttaatatacaatacttctttttcatgcattaagccccttacaatgtcgagtaaacaaagcatgtgtccgctaatattgtcttcgagcttggtatttttgtattctgatacggtatttggggacgacatcttttgttgactcgatataagaagggggtttgtggaagaaattgtagtattatatatcaagaatggctctccaaaccatgttgctggccacttagctattatcgaagcgtttgttgcaacatcaatatcatatcttcagctattctgttttagagaggttgagactgaatctatatgatctgaaggacggagatactgctatgcatttggccttgacaggtcgccatgtggagatagctgcatgtctggtaaatgtgaaccaatgtgcttcatttcttgcgagtaaagttggaatatctcccttgtatttggcagtggaagctggcaatgtcccactcgtggtatcaaagttgagaactacaagcaatgaaggaagaaagacgaactttgattttgtacacgtggctttgaaggccaagagtagaagtttgttttgcttcttaccaattagtagctctgtttagtttgtttgactagtttgggacagaagactaaatatttgcatgtgggctaatttatacagatccaagtcttggggatgagtgatgtgaagaagggataaattctctttcaattggagcatccatagggttttataaaggagtatgtaacctgttagtacgattaacgaagagtgtttacgtgtgaaacaatgatggaccctttccactcatttggcagcaacgaatggccatatcagaattgtcaaagagactctaaaacattgtccagattcaaaacacctgcttaacaagcttggttagaacgttctttgcattgcaacaaatagtgggaaatgtaagtgtttgattccgttgttgttatatatgcaattctgtttcattttatttccgcactttgggttgaattgtcctgtttctctatttaaagaaaaaagtgcttcattttgatgctttgtcgatcaaactgaggtttgattcccaagagacacatacagattgtatcataattagctaggtccagtttgatcactgtgattgtagttgacagatagtcaaaatgacctcttgttgttttgctggtgatcattatttcagtacctaagttttttttacccaaccctcacttcaacacatcttttgctgccaccatttcctttcgctttcggccgctggtcacaactcacaacagcaacaatgactaaaagaatctgcactaagtcaatttccagcttcttgttttattaaggaaaatctcgtgccatgtaaattgtcagacttttggtttgtttccagctcatacctggttttgaggtagtctatgttcttggcttgccatttctttttaatcttgagctatgttcttagaggcggctaagcagttcaggacttggttgttggttaacttattgtagcaatacttgttcttatttgggctttgctgggtgatccagaactcggccacaaagcctttcagtttgcctttccatttctgtctttggctctaaactccatgtaggtcgcattctattttggcgtgctcgctacaacaagtgatatactagttattttttttcgttcttcactaaatactagattttaacccgcggtacaccgcggaaacaatttattttttaaagttagtatacataaaagtttgcaaattgtatctatctataaatatttttattttatagtttacaattgttattaagtaacgtcctgccaaacccgtcccgccaacccgtcccataaaaaaaacatttattttattaatgttaatcttatttatgatatgtttatgaattattgtctaaatattttgtaattttgtaataattaaatgctatcaaatatctctgcgatttgacgattataattaaattgttatagtcatggagaaaaacaatatcaaaaatgataattttgtagtaaataaatgatattaaatattttgaaagttttattttagtaactaatcgtgtagttaatgtggagagatttagggaagattgttaaatgtcaaatatttaatttgaagattttttttctaattatcaaaaacaaacattaaaatccagtggcagctattgtaaataagtcccaactataagatttatttcacaaaattgctgcaaaaatgtatatatagatattcagcgcgtattttattttgtgctctattttcttcttgcctattacactgtcccatatattcctggctttggtcgttgtcactgggcaacggatatcctctccgaatgctattatggtttgttgatgaagaagatgctgaaacatatcacacctctggctctggtccgtgtgattgaaacaaaaaagacgaaaggatgtcttcttatctatttgattcagttgttgttttcataactagtaatttattacgttggtttggaaagagtcagtaagcggggatagctcagttgggagagcgtcagactgaagatctcgatccacgctcaccgcattacgttgtcttttcgtttttattttctttctatatatcttttactcattgattgtgttacatgaagcggggatagctcagttgggagagcgtcagactgaagatctgaaggtcgcgtgttcgatccacgctcaccgcaatatttagtcatttaatttttttcccaaagccatgcaaacgacgtcgtttaaaaccaaaacacacagagatagtcatatacggtgtcgctttatgaaaagctcgaattatactaacggtggttttacaatatgaagttcaaaaagcccattaaaaagcccactacatatcccaccgcctttacctctgaaccgactattttttttccaccctttatattcgttgtaacagcagagatttttatagtttggtttctttgaccggagaatctcgattaggttacgatggtgtttctctcgattccaaacgggaagactttatcgatcgacgtgaaccctaattcaaccaccatctccgccttcgaacaattggcccaccaacgtagtgatgttccacaatctttccttcgttactctctccgtatgcgaaaccctagccgcgtgtttgtagattcaaaggattccgattcgatcttattgtccgatctcggtgtttctcgtttctctactgtgattatccatgtcctgcttttgggtggtatgcaagcggctccgccgaagcctcgtcttgatttcctcaattctaagcctccgtcaaattatgtagcgggtttgggtcgtggtgctactgggtttactactcgatctgatattggtcctgctcgtgctgctccggatcttcctgatcggtctgctttggctacagcggctgctccaggagtaggtcgtggagcagggaagccaagtgaagcggaagcggaggacgatgaagaagctgaggagaaaaggtacgatgagaatcagacgtttgatgagtttgaagggaatgatgttggtttgttcgctaatgctgagtacgatgaggatgataaagaggctgatgccatctgggagtctattgatcagaggatggattcgaggaggaaagatcggagagaagcgaagctgaaggaagaaatcgagaaataccgagcctcgaaccctaagattactgagcagtttgcggatttgaagaggaaattacacactttgtctgcggatgagtgggatagtattcctgagattggggattactcgctgaggaacaagaagaagaagtttgagagctttgtgcctattcctgatacgcttttggagaaggcgaagaaagaaaaggagcttgtcatggccttagacccaaagagcagagccgctggtgggtcggagacaccatgggggcagacgccggtgacagacttgactgctgtcggtgagggaagaggtacggtgttgtctctgaagcttgataacctatcagattcagtttcggggcaaactgtagtggatcctaaaggctacttaactgacctgaagagtatgaaaagaaccactgatgaagagatatacgatcgcaatagagctagattgttatacaagagtctgacccagtcgaatccaaagaatccaaatggctggattgctgctgctagagtggaggaggtggatgggaagattaaagcagctaggtttcagattcagaggggctgcgaagagtgcccgaaaaatgaggatgtttggcttgaagcttgtaggttagctaatccagaagatgccaagggggttattgcgaagggagttaagctgatacccaattcagtgaagctatggttggaggctgcaaagctggagcatgatgtggagaacaagagtagggtgttgagaaagggactggaacatattccagactctgtaagactatggaaggctgttgttgagttggctaatgaggaggatgcaaggattttgcttcacagggctgtggagtgctgccctttgcatctggagctatgggtggcacttgcgaggctcgaaacatatgctgaatcaaagaaggtgttgaacaaagcgagagagaagctcccaaaggagcctgcaatttggatcaccgctgctaagttagaagaagctaatgggaagctagatgaagctaatgataacacggctatggtgggaaagattattgataggggtataaagactctccagagagaaggggttgttattgaccgagaaaattggatgagtgaggctgaggcatgtgagagagttggatctgtcgctacatgccaggccattattaagaacacaataggtattggagtggaagaagaggatagaaagagaacttgggttgctgatgcagatgagtgcaagaagaggggttccattgagaccgcaagagcaatatacgcccatgctcttagtgtattcttgaccaagaaaagtatctggcttaaagcggcgcagcttgagaagagccatgggagtcgggagtcccttgatgccttgttgcgtaaggctgtaacatatgtcccgcaagctgaggttctctggctcatgggtgccaaagagaagtggctcgctggagatgttccagcagcccgtgctattctacaagaggcttatgctgcaattcccaactctgaggaaatctggcttgctgctttcaagcttgagtttgagaacaaggagccggagagggcaagaatgctgcttgcaaaagcaagggaaagaggagggactgaaagggtctggatgaaatcagccattgttgagagagaacttggcaacgtagaggaggagaggagattgcttaatgaaggtttgaagcaattcccaacattcttcaagctttggttaatgcttgggcagctcgaggaacggttcaagcatctagaacaggccaggaaagcttatgacactggtttgaagcactgtccccactgcataccactgtggctctcactcgctgatcttgaagagaaagtgaatgggctaaacaaagctcgggctattctcaccacggccaggaagaagaatcctgggggggctgagctatggttagctgctattcgcgctgaactgaggcatgacaacaagagagaagcagagcacttgatgtcaaaggctctgcaagactgtcccaagagtggtatcctctgggctgcggacattgagatggcgccacgtcctcgacggaaaacaaagagtattgatgctatgaagaagtgtgatcgcgaccctcatgtcaccatagctgttgccaagctcttttggcaagacaagaaggtggagaaagccagagcatggtttgaacgtgctgttaccgttggcccagatattggcgatttctgggcgttgttctacaaatttgaacttcaacatggctctgatgaggacaggaaggaagttgtggcgaagtgtgtagcttgtgagccgaagcatggcgagaaatggcaagccatctccaaagcggttgaaaatgctcaccagcctattgaagttatcttgaagagagttgtgaatgcgttgagcaaggaagagaattctgcttgagagtatcaattttcttatgtttttcatgatcaagctctgctcatagcacattacaccttagttcttgttttctctttgcaggctcaacttttaaccattcatgtttttcttcagtagcgagacctgatattgatttacaggagtgtttcaccagatacatgtagaattctcagtttactaaatgcttcagttttctttgtgagtctctgtgtgctgcagtgttcagctattaaacttcttttgttatttgtataactgatcatttgttgttcgtttcatgccttagccttcatccttagggagcttttgtctgcctggtgactaagattggtgcgtgggcaagtcatgaaacccacactcccaacgcttctttagacagtgtaagaaaactaacccctgacacagtttttagagttctttgtccattaacactagctgtgatagtaattcttagaagaagatattggtaacctttttagccttaatactaataaacctcttgcctgttaaaatcaaccaactagtttatttgccttcttttggagagctgattctcaaacaaaggcgacttgttttcctatcttcagtagacccttgactttgagaaccttttggtcgctctcatcctgtggtaacactgcaatttgttttattgttgggtaaaactagtttgcaagtacaaaggttgatttgttctagtcttttgccgagtacctctggtgaggcatgagaaacaacaggatatattgtgtggacagtccattagtttcgattcaaccgaagataagagagaactgaaagtgagaccagtttcctcgtgatggccgtctgtgaaactcctgcatttccagtatttggtcagctttcaagtgtataataattggcgttgaggaagttccctcagaacattgtgactgccataatcaggatcaactccgatcagaacagaccgcactaaaaaaaaaaaaaaagaggaccaaatcaaagacaatctgtttggtttaccaaaagcggaccacaataggctgtatttagcaattagcatatcacaactaatcacctcatctatatctagtttctaaagactagttataccattatccaaatttattatgtattgttcttttggagaacacatggcgacaacgtgtccaaaatatggacccaaaagtgctaccaaaaaacataacaaaaggcaaaataaaataaaaatgcaatattaggtttgcaatcatcatcatatgatgatggggacaagaacatgttcgttaacattttttccaaaagattaacacaaatagataacgttatcgttggttaaatgtataatgcgaatgtggagctaaatagcaaaatataaagtaagtggatatatacgaaccgcatatttgactttggtaccatcaaatgtccgtgcctagttggttgttgaacattttaattactttatcaaaatatcttatatgttagacttttgtgctcttgttatttctgtggtatggttagaggtttatagttgatgttaattagataagacatcatctaaaccatcttcttaaacaaatcatatctcctcgtgagtgttacataaaactgtgatcggtagccgaacacgataatgtatttaattggcccaacaatccaattcatttatgatgaagaataaaaagaaattcaagtgtagttggtttaacgttttttttttttaatataagatgttgttttggttctgtttaatgttcttgagtcgtaaaatataggtaagttttgttacggaatctgtgcaaaatgcacatgtgatcatttcctctaagtcagtacttactctttactgctaacagattaattacattgtatataaaattaattagatatgaagtaagggcgggcaaaaaaaccggaaccgatgaaccgaaccaaaatcgatctgaaaaatttgatctgattcgaacccaaacccgaagaattattctattgaatcctatatttttttacccgaaaaaccgaatccgaacccgaaaatatccgaatattttaatcgaaaatctgaattttattcgatacccaaaattttaccaaaaaatctggctatttacccgaaaattcgggtataggttccaaaagaggctccaaaaatctatacatgaacccatgcgaacccgattggatccgaaccgaaaccgaaccgatattttagatttaccctattaactcctaaacttctctacttgaaagacgcatacccgatcggattttacccgaacccgacccgctttacccgaatgcccgccccctaatatgaagtgtaaaaataaagcaaaaaaactggtcgacgtcaaataaacaacggaaaatccagtcctcagcacatcgacaacgtgaattcaggtcgagaagaaacccaaaaacatcactttcttagattgtttctgtttgcaagtaatgataatagtaatatatttttggtctgaaattaatgtacactatttattacgcgaaaatgaaatgtgccgaccacttaaataatttgttaggaaatgattcattccatttaagtaaacaaaaaagagttagaaggtgtctagaaaaatcggtggagggaccaaacactgaacactccatcaagtcaatttacaaatctaatctaaggtccacgttctttgatttttctccgtcacatgtttgacatttttgtcttcagaggtcccacttttcttttccattttataacaagtcttttcaattttgttaatctatttaattctaattttctaaattttaaatcgatattcaaatatacaaaaatcttataaaaaattataattttcagaataaatcaacaatttataccttttacaatattggtaactaatagctcttagctatagctgtaagctttttcagaatactgcaacaatatataaaaaaaattatactacaagaaagctgtgaaaaaaactaaaaatagaatttttgataacacttttgtgattagtaactgtcaaaactttatattttgtaacgttttttaccgtttggtaaagtgattatcaataacatcataatatatgttatgcaataagtgtatttttaaaattcttgtgtcaagtaaaaaaaaaacactatagagatcgattttattatacctctacaaaaacaactaattgatttttcgtgttttgttatatattctttgtaacttgaggttgaattaggtattttatgtcaatatttatattgaaaattcaaaacaaaaattacttcaaaacggaacaaatcatgatgtataaatcagaatttataatgtgtcaccattcagatttaaagatagacaattctttaaaacacacaaaaataccacattatagtgatccagtgatcaataaaacacacaaaaatcatcagctttgatttatgtatttgggtaaaaacagttacaaatatgatgagattgttacacttgctactcctttaaagtattactgaggtacaagaacaagaccctctcaatcaatgtttatcaagaaacaagaaaccactcttttcaacaaatcagcacttataatatatgacatctcccattgatgctactttaaagctattctacacccaaaacgttgaaaccgctgtacttgtgtgttaaggaaacgctcagtcctcttcacggctgccactgctactccaaccactggacaaacacggtatattgcgaccagggaaaaaagtaatctccttgccacttgagaccaacaagaaaaacaaaaagagatacaaaatctacatttgaactcatcagtatatagcaacggatttgtttcagccacggtgagccattcttgagaagtagttgaagtcatggtgttggactcttagctgttttagccaagaatccgcaacacttagaagcgaaagaactcgctcttgatcttgaccttgatcgtcttccgagagccaaacattgccttgcatcttataagtggctaacccaaaaggaagcaaagttacaccttctccttccttccggatcctctccttttccccgccattttcttctggctccatatctgaaaatcaagaccataacggttacatattcgcgggatataacacatcgaaggacttgaatccgagaggattgagaagattagtaccttggaaagaagatgaaagagtgtgataagtgaggaaacaagtggacaaatctttgatggtccttcccattggaatatggtaaatagggtaccacgctaccgccatccaacttgccggggaaagatctacgcttcgcaacgacattagtcccgggtacctttgagccaattcattgatctgaaatcaaccaaaatcatatgtctcatttcaagtcttgaataataatatattctaatctatacatacatactttttcgcctattgctaattaggaatcaaccaagtgactaatcctagtaatcaaagaagctgatcttatgaagctgcattgagttaccttatccatgagaggaactcgagcataaggagctgatctctcaaagtattgcagataaagatatcccaaccgatcattaggatgcaagagagcgtcatgttcaagtccttcatcagaagcacatctcgaaagtttatcactttcactctcatcactatatgaatcactaaacgaatctctgctttccccatcttcagaatcatccctaatcaagaacaacccaaaaaaaagagtcagtcacaatagattcatcaaaggatcaaactttaaaatctaaacgtatcaaagcggcaatataaaaagcaatgaatggtaccttaagcggatcaaggaagaacgagaggtgaaaatctgaatagcagagagatagggaacataatattgaacaagagattctccattagagagacgaattggaacaccagctccataagcactccattcatcataacaatcccatagatcactcaatctgaaaaactcaaccttttgtctctcccatggatgccaaatcctattcaaactcctaatctccgcctgccagaatccacaaccaatttaaatattaccattaagagaagaaagaagaagaagaaagaaagaatgattcaaaaccttggatagagattggggtggcactacaggtgttgtgcaatgaaggaatctgtcaaggtttgacccttttccaaacaccatgatgggattcttgtaagagagaaagaggggtttcttgattcttttctttgaaataacccagaaaccaaaagagaaagagaaagagagagtttaagagagggagacacgcaagcgagtgtctgagatttgacgttaggacagctgaatttaaggaaaacggaaattatggacaagaaatttttataactttaaaaatatcaatttgaagaagaaaaaaccgaaatctgctcagttacttgcagaagaatgaaagaaaagtcttcttttttttctgtggagagagcctattttacggtagttttgtttgttttttatgatcggaaaaccagaaacgagaaaattccaaaacagaggagaaaaatgcagacttgtcaagaaaataaaaaaaaacagagtaatttttggttctgttacaattttgccggaaaaaggaaagaccagtggatatatattgagagacgaaacagaggtggagaggttatatatataaaggtgagagaatcgatttgctttctctagaaaatattctttcttttacttgatcaaaatcctctgtttttgggttttttcttttctttaaatttagacgataaaatatagaaaagttgagattaaaattgaattaaaaaggataaagacagatttgaggaagagaaggttctgaattctggatattaataagaaaaagtacaacaaacacctaatcaatcaaaaatttatctcaaagtttgacgattttcctcgtccatagcttatgatcctcacgtggtttggttttgttatatttaatctctttcgtcgactctatttttaaagtattcgattagaaaaattcattctagaaaaaaaactagtcgataatacttaagagttaaagaactttctacatgtacaatgttgtctaaaaatactacatgagcataagattgtgattagtgtggtagttttgctgtgagaattgttaatgccagtgtataagaacattaatcgagcatttttattgttttttatcgtggaaattttcagtacatattacggaaaatgttatttgttcatatgacgtatttgaaaagttgtatataattaggctgcctaacttattatcattactagtttcagtactgtgtattttgattggctatcatgatacaatgtggtacgttcgtaggaagagaaataaaatgttagtcctagaaaatattgttattgatggttactgcttagtacttactattattgagtctatagtatactatacaaattttttataattaatatgaaaaaaacttagttctgaaagttgttattatttaaattattttatttttctttcatgtgatatatatagaaatatatattataagtgcaccttaacatacaaaaaagaagattattcgttcaactggttgataaaatcaatcgtaggtaaatatttatttcgaaaataatatttaaatgaagtcaaatatagaaataaaaatatattatttttctttcaatttcagcaaaattaggttttgccaatttgaggtaacttgatgtttagggtatttaaaactaggtatcacaaaaaaaactgaagttacgctctatttggccgttattgctcgcatatttcatattttattagatacaatgatcgtatacagtacttacttttcctaatttatgatataagagtatatatagacttgaattactatttactaacacaagaagttataataaatcgaaatagtcattggacggacaataaaaatcaaacgaatcaacagttttggacgtaatattggggaaaaatggttgtgacgtgtgattttgtaactaattatgcaaatcaataatctctaataaatatcacgttattgaacggtacgtctactaattgtaacatcagtagtcacaagcaaatcacgtgaaaaatgtcaattacgtggaagcataccaacttttctgaattttgtggttttggcctttgcgccatgtggtagttttcgtgacacgtgccgaattaacttaatttctatttacctaatctattgatatttatcaaaccgaatttgtaaattgagaaaaccggtatgttggtaagggtaaatgaccggtttatctgacggcgggatgctagatgggtgtgatgactaagcgatcatcgtgatttggggaactgaaaaagaagttgatgagagtgacgttgtacgaccgatggctgaatctaaaatgttggatttttaccaagtgacgttatttgttatccaccacattccacagctacaaaaagatttggatcctatcgtattgagaaaagagtttgggcctaaatccagtatcttggatcttttatatgtttgagcccaaataggtccgacgatttctgtaaaacccaatgagactcacaaggcctcctcttaggacaactttgattgatctacgtatgtagatggaatttcggatttagaattagtaactgatgatgtaaaaacaagaacacgagtacacacaatatttaacatataatatgcagctcatttacattgctttgctaaatttggattacactgacattgaatatttgttggtcataatacttcttattaggcatgcagacataacacacataagtgatcaaactcaaatctaaaatttaggccggtttatccctgaagttgagataatcattgttggcaaaattaatcattagactatttatctacaatggttactcatttacaacacccactttttcacttttaacactccacatcatcttttctttctaccacatcattattcaacacctacataatttttaacattacaacagttttgtttaataaaattacaatatcttactccaccatttttattttatattttaacctatttttttttttgggtctaaaaatggttttttatcttgtatctaaatcaaatgaaagtagtcagaatgaaaaattataaattttcatataaatttttatatatttatgtataaatattatgaaataattgaagttatataattaagacgaagcaaaaagaaaagaaattaaagcaacaaataaaattataacacttgtcacatttatcttctcccttctactttcatgggtgttgaaatttattaatattaaatttgccgcatcagctacttttggattacaacataccattgtagtggaattatttttttttcaactgttgtaaaatggtttacagcaaaccattgtaactagtcttattggtagatgcagagaagttgagacttgagattaaattacaaacgagtaataagttgtttaacacaattttgtcttttagattttcactccatatcatatcaatcaatctcatcaagattctacattattccaacaaactactaattgattgtctagtttcaaaaaccatcgctaagaactagaaaacaaagcttagcacttaacagtgagagttgagagattatcgtgtgagctatacagtttgatgatacgatttagagccatataacacaggaatggtgaaatagacccaccaccacatgacatgaatcgctatcatacacatgggatgatgatgatgatgccgttccttttcttctagcacaagacatccttttttacttattttccaacacctttctcttttcttattttatggattttttgaaaatatataaatatttcgaacctttaattttagtttccattattgcatggttcttgtgattgggaggtgtgacacccaaattagatttatcaaactcaatttatatatgtatgtaataattttacaataatccggataatatatcagaatttaaatctatataacaatcaccaaaataaattaaattacactgacaatatgaataaattcaaaaaagtacatactattgtactacaatctattgtcggcagtacataataaatcttaacgttagttctatgggattttgtgttttgtaaaagccaaaagaaccttacaagacttttgcaaataataatatggatacatttgaatctcaatcgttaaacaatttgtaagctttaattcaaaaaacaacagaaaagagtttaacaaaacaaaacatatgaaaggaaaaagagaaatggatttggatgtgaagaaaaaagtggaagaaacatattggctttgtactttaacaaaaagaaaaaaacatattggttttgcttccaaatagtgactgcgttttgcggtacgggaaaagtgcggtgcagttcaaatagtaacgaaaatacatagatatatatatatgtagagattttgatattgttacaacactgttgcgatgcgattttgggtatggtttcggttaccattcatagcctttgtagtagtggctatacaaatctaatcttgatcgttgtgttgctttaattaggaaatacaagggagggaagatataaaaatatatctaaaaggttatttgattgatatcgacatatgaaatttcgaagtatgaacacatgaaagagtgtttacacatttacatatgtatttttcaacacaactagaaaagtttacaagataagatgaatccaagtggatgaaattatctgtcacttgcatatacatacactcaaaatctgaaaagtcagaacttgtgaaatgattaaataaaataaagttcgacacaaaaaagggatgaatcatgtaggtgacgagagacaggtattactgttagtgatgcaatataatcaaagcttagattcaggcccatcctcatcatcatagcctgcggcaacaatcaagaaaacatgttttagattcaaatgcaattttttatttttattttattttcatttccgatgaacaaaaaaatacttaaaagcaactaacttagttacatgctaattttatattgtaaacattttttttatataattaatatgggattaaagaaaattttaaaatagacaaatctagtactcttgtctttgtgcgcaagatattaaggttttgaatggatattgtggttagtgctgactgatccgtcagcggttcaattcatattatttttggggcggacaataaaccgctacaaacttagtttaaagatggtctgcagttagtacacagcgcttttcttttattttcttgaattcgcactattacagagtatagttttgtgagtatagtttgtgaacgataaataaaaagcggtccgatatataaacggttttgtgcgcttggacatgtgtcaccattcaaagcctaagatcattaagtccatgacatgtagacatgtttttttctgcaatatacggcaaacatatttgcttgcgacattctaaacctttgttaagttttgcaccattagatacgataaactcaattctcttggaattaaaccatatatacatggtataaaaacctttagaagagacttctactatacattaagtttttttgtttttattattatagaaagtaatcatttgtgatggagagtgtatggacttgattagtttgggaaaattattcaaaatttcatttcatacaaaatgtggtttagaatttagaaaggtaatttgcaaagcactaaagcagctttaatatatctctttcatgaatttttaaaaaataaaaagatacgattttttttggggaaactaaaatctttgtttttctctcttatctctctttgtgtgtttcaattagtgagaaattagtaactctctttctcactctctctctctctctgtttcaactgtctgtgaatcaactgttcttgatctccagaaacctctacacaaacaaaaggtgcgttcttttgcgttgaaatggctcatatctcaaatcgtttgtttctctttgtgggtttcttgttgttaccatgtttaaggcaaactgtctgatctgctcagacatttagttgtttttcctcttcatcactctgcgctagttttgtttccgaattcttttgagacaatattggtttagtttcttcttactcgattcacactttacgacattggattcctataaagtgatttacttttctctaaaaacggcaactttgttgcttaagaatctctctgttcttcaggatttgcattaacgtctctcgtttcctgaaaggaattgatgatttacgccagtagaatttgaatattgtctatgtggcagatgtaaagaacaagttacaaagagatattcacaagaatccgtctggattcatgtgtgaatagaaatatgagcaaactctgttcttgatctttgtgctttcttttcataaggattcatgttttgtgattcttgtaggtcctactttgattaatttaatcacagggattagtaaacaagtctcagaacatagattaataagatccccaatggtgataaacaatctcaagacagtctttttggtaatacatacctttattctattgctaagatcacatgctagaatttggtctttactacttcttgaggtttatttatctctgtgatcttattgaaactgctgttaaactatctacttaatcatttgtctctattgcttttaggtcatagtccatcgttgaccaagatttgaatccaaggctttcccggagagtatatactagttaacaaaacactcataaaaagctctggcttgaccaaattttctacttaagcataacggtggagatctgtttttttgtgtgtggctatataacaaccttattgtctaggctgggattaaacaatggggggttgtgtgtcgactagtagtaagagtacgtgtagcagctggagcaatggagagaagcctgtgcgtcgaccatatctcgggattggttgttgtgtgagcaaaagggcgaagagaacgttttcagaccacattgtctcgttgcagaacttgacttctataccaaatcggatcaccagcagcagcaagagcaggagctcttgcattttcactcaacaaggacgcaagggtattaatcaggacgccatgattgtgtgggaagtgagttcttcagactctttctattgtatttctaacactatggtcaactataaagccggatttctttgttgctttgtaggattttatgtctgaagatgtgacattttgtggtgtatttgatggtcatggtccttatggccatcttgttgctcgtaaagtgagagatacattgcctgtgaagttacagtttttctttcagacgcttcagtcgaagcaaaactgttctaaaggaactcgattcagaagaaattcaagcaaatcagctgtccaagaagctgttaaagaaggatctgacgaggataaacttaaaggcttatggggagaagctttcttgaaatcttttaaagccatggataaggaactgcggtctcatcctaatctggactgtttttgtagtggcagcactggcgtaacaattcttaaacaggtacacttagagaacaaagagctctctttcagcttcaaccatgttttctttaatcatctcttttgattgttcaggggtctaatctcttcatgggaaacatcgggattctcgggccatccttggatcaaaagacagtaacgattctatggtggcaactcaactgacagttgatctgaagccggatttacctagtatgcttaacactttttcgaaatcttttttcctggcttgtatgcatttatctaataggatgttactgttttgtgggtctgataggggaagctgagaggatcaaacggtgtaaaggtcgagtatttgcgatggaagacgagccagaggtgccgcgagtctggctaccttatgatgatgcacctggattagccatggccagggcgtttggtgacttctgtctaaaagagtatggagtcatttcagtacctgagttcactcaccgtgttcttacagacagagatcaattcattgttcttgcctctgacggagtaagtaaacgagtgatcttattagcctatgagcctcaagacaaaggctttactgatttttgagctttattgaacaggtatgggatgtgttaagcaacgaagaagtggttgacattgtagcttcagctacaagccgggcatcagcggctaggaccttggtgaactcggctgcgcgtgaatggaaactgaagtacccgacttccaaaatggatgattgtgcagtggtatgtttgtttctggatgggaaaatggattctgagtcggattatgatgaacaaggcttctcttcagccacaaatgctgtagaatcagatgatggccaaagatcagaaccatgtctccaaagaaacttcacagttagatcatcatcagatcaagaaaacgagacttatggtaacgtgaatacagagactgatgcagaggatgagaaaacggtaggagatcaaaactggttgggtctacaaggcgtcacacgcgtgaactcacttgtccagcttccgagattctctgaagagaaatcgaagacttgagattagcttttaatgttatttctgaggactgatcttgaagaatgttgtcatttttcgttgttatgcttgagcattgtgcgcagcttgatctgtatttgttttgctggtgtttcgtgtttgatgtatctgtattgcacaatggatttgcctcatcgattctctcttggaatccatgaatcaaatgtgtatatacattgcttttaggtatctctctaaacaaaaaaaaagtatatatgtgcttgtgttcttcatccacctcctgttagagtctatagaatctagaatctacatgctgatatcacctaatcctgtcaagtatttgcaggcacaaattagcttagatgaacactctgaacaaacattcaaacgctcaagactaatttttgaagagagattcttggaaaaaaggaacacttggcaaacctcgcttgagtgagaactggagttcgtttcctctgatgcttgcgcctcagctttttcgttcgagtaacttccagaattcgaaatgaaaatcaggcaaccgatattagcaacacaaaacttctcttcatgatagccacaaagctaatatgtgcaacactttcaaatacattggataaaaaagattgaagttgaagaaggctcacgttgataatatagtgacccatatgagttcaatacaatctacccaaagaagcctttggtctacagggattacaccgtatgtaaccaagtgtgccaatggccagagtttccagcctgcctgcatagacaaaatcatgacataacctttagataaaatcaacagactaactttaagctttatatatgatcacgaagacacagggcaaggagagttaattacagtgagcattggcaaaaatgttgtcttgatttcgctgaaaatgtcagctggagattggaaacgcaagagccctaaaactgtaaagtagatactgttccaaattgcagaccatacggtttgatcaaatgcgacttttgcagggactacccaccattcttgaaaaggaaagagagccttgtacaaagaaaagattttagctttcagcccgttgttaatacaacatatcttgacagagcaaagattgatttttacctcacagaattggtagtaatagtgagacagtgaaccatggagtgtgaatccaacaagacctgatctaagaacacgagttcgatcaaactcaaacagcggttttccttcgtaacactgcataaagttacagccaaaatggtcagagagaactcaaattaagaagctttttagagtatttttagtttcttacttgtgcaatccaatctcctaaagaatacacaattccactaatcgccattttcgccaaaacagggtttgttttgagaatttgttcatacgcaaaccaattatgttcaggtgcatacctaagtatctcgtagagagtccaaccctaagaagaacaacaacaatcgtgatatcaatttcagtataatcccataaaggagcaagctttgcagagatagaagaaccaatcaatcacaagagagataaagaaaaccctaagcttacttgccaatagtcatgatcaatggttaaaagcttagtaaccgcaacggtaccggcggcgagaactatagctgcgttgatacctcgactcatcagccgatctgtatcttctactttatcttctgatagttcttcctctgccttgaaattgtcatttttaacatcgattgcttctctgtcttcaatgatcgatttaacgatcaagtttcttctctctgtaatcaatcgtttctgattcttaaaagggttgattcggggtaatgggcctgcggttttaatccgtgaagaaaccttcccggagacgatgatggtggtgggacaacaacagagagctgccatggacttgcacttctcaaaggaagatactttttctcttctcgttggctctctcacagccaaaggagaggtttttagacttagagaacaaaaaagaagcagcagactttggtgaccaaacggtaggaactgagccgaaccgagtttcggttaaattaaaaccaataaccggtgggttttaatttggttaaaaaccggtttgcacaatctcaaaaccgaagccgaaaacaaaggtcctaccgagatttgaactcgggttactggattcagagtccaatgtcctgaccactagaccataggaccagttgcttcgagtcctaccgttttggtttaagatctagacatgttcaaggactacaccatcgtggtctccgccgatacggcagtctgatcaaaacgattcaagagaatcaggcggaaggttttttctgaaattcataaaatcgggtgatctttgcaatatgcatacgtatatccttggtaaatgtattggctttgtttggttaacgatgttgataggattaggttgtgatcaaattagaaaaaaattgggtcttttctgattttttttggccaattctctgattatgagttttggaatggttggaatggtagaggagggtttaggcgtaaggtaagagaaaatgggattgaacccaatttgcatacttcaaattctctggtgagcttgatgtttcattgatttgacaaagcatgtatttgagattgtgggcagttgcaggatcagactacatgttacttacaacaggcatgatcaaggagtattgtaaggtagggtagagaaatgatatgacaatgatgcaggttttgagtattgcctagctttgtatcaagatttggatgagaagtgactttcaggcttgtagtttagtgattggagattctgcaagaagggaaaattacatgaaggttatgtggtttttctgcaatatgattcgttaaggaggccaagccaaatgtagtcaaatacaccacgttaatgattcatccgtatggggacagcttagatttttctgtgtgttgcatccaaagatgtactgtgtacccaaattccgagttcaccaaccagggatgaatgatactgtgtacctaaattccaaagatgtactgtgtaccctaacagttttcgtctggttaggagataatcacttcttgaaagcagtttgaatgtttctcaaagaatggtcatgtactacccacgttttttgtttggttatcttggaggtaagatgagctggtgacaattctgtttttggcttatactaagattaacgtggagctagtcctttgctttacggagctttgataagatgttttaggatttaattacccatcaagaagataatgagggagaaaaaggctaaagagattcattcgacttgcaaaaccatggttggaattttgtgcacatagtgattgaggagagagatagaaagtgaagggactttaaatgttagacccgttgaaactagtggtgggcctgtgaaggttgaggttgagggaagagccagcctgcccaaaagaaaaaatatcttgtgcaacttgtgatgcttggtagctttggtcctacatgcttatccagatatttgcagagaaagaaacatcaaaaggttagccacattataggaagaactaaaattttctaatgctattttgctcaaataggtgtttgagagctctgttcatttaataatgtccatatttgtggctatgttcactgaattattaacagggaaagcagttgaaagatagctaacatgatgtaggggttttggtttttaggaggcaaagaggctttcatgggaccacactggatgatagttgcaaaatacattgtggttaaggtttgtctcttgagcacatgttgagactgggatactcttctgtgagaacgcattaatagctgtattaagtgttgatagaatttgtggacggtaattcccgtgacatttatggaggtatctgtgatgtttttcctattaaaaagacaaataaggagacccaaaaaaggtgagaacaactatacacacaaagaaatttcttttgtctgaagacaaagggagtggtcaatgaccagtactcccctatatgttgggttaggacttctactcattttgcatcgttgagatactatactgccttgaaagacttggtattggatggaaactgtagaagcggggcatgatgatgttattggttggttcgagcatgtgtcggaaaatgcctgcaaggtccaaagcgagacgctacgaaggattcttgagctcaactccggagtggagtatctgaggaaatggcttgggactgttgatgtagaaaagatggacgattatactttggaaactctctttacttccttggtgcctattgtttcacatgctgatttagatccttatattcaaagaattgcagatggagagacttctccattacttacacaagaacccatcactgttctgtccctcaggtatatttctacatgcatctatggatatctgtgtttatgtgtatgtgatatatgttctgtattgatcccttttcactccctttatgacgcagctctggaacaacagaagggagacaaaagtatgttccgtttactcgccatagcgcgcaaactactcttcagattttccgattatcagcggcttacagatcaaggtctgttttcatttcttgtctattcttttccattaaaaagttcttcattatctcataaattcctactatgctttcttttaaaggttttatccaataagggaaggagggaggattcttgagtttatatacgccgggaaggaatttaagacgctaggaggattgacagtaggaacggccacaacacattactatgcgagcgaagagtttaaaactaagcaagagacaacaaaatccttcacttgtagcccacaagaggtcatctcaggaggtgatttcggtcagtgcacgtattgtcatctcctacttggtctccattactccagccaagtagagtttgtcgcctctgctttttcttacaccattgtccaagctttctcctttttcgaagaaatctggagagagatatgtgctgacatcaaggaaggtaatcttagctcaagaatcactctgcccaagatgagaaaagctgtattggctctgatcagaccaaacccgtctcttgcttctcatatcgaggagatctgcttagagctggaaacaaatctcggatggttcggtttgatttcaaagctttggccaaatgcaaaatttatctcctcaatcatgacgggttctatgctgccgtacctgaataagctgaggcattacgctggcggtttgcccctggtgagcgcagattacgggtcaaccgagagctggattggtgtgaacgttgatcctcatcttcccccagaagacgtgagctttgctgtgattcccacttttagttacttcgagtttataccactttacaggcggcagaatcaatcagacatatgcattgacggtgactttgtcgaagataaacctgtgccgctctctcaagtcaaactcgggcaggagtatgaacttgttctaaccactttcacaggtaaagaaaaacctcctctgcattttccataaccaattgttataatcaacgagctttttgcgtcatctgtttcaccacttactctgttttatcgctctgttcaggtctttataggtacagattaggagacgtagttgaagtgaccagttttcacaaaggcacaccgaagctaagtttcatatacagaagaaaactcatcttaaccatcaacattgacaaaaacacagagaaggatcttcagagagttgttgacaaggcgtctcagcttctgagccgatccacacgagctgaagtcgttgactttacaagccacgcagacgttatagctcgtcctggtcactatgtaatctactgggaaatcagaggagaagcagatgataaggctcttgaagaatgttgcagagagatggatactgcttttgtggactatggttatgtagtgtcgaggcgcatgaactcgatcggaccgcttgagctacgagttgtggaacgaggaacgtttgggaaagtggcggaaaggtgcgttgggaaatgcggtggcttgaaccagtttaagactcctaggtgtacgaccaattctgttatgcttgacatacttaatgattctactatcaagagatttcgcagttcagcttatgactagaaacctgattactaaatttagttttgtgtttttatctttgtgattccatggcggctgtgttagtgtactcagttttgaccatttacaatgaagaataaaaggattatgttactcttttggttaaaaacaatggagttactaaattttggtatttcgaaaattagaaaatcgtttctttttcagtttatatgattatgagacatcgacaacaccagcttaaaccaaggatacaaatcccgatagtctttacaagttgttataaaggtaagtggaaaagaatgtttgttagtaagtactaagtagttaagaacttaagattactatatagtgcatgcataagtcattcacaacttcataaaattgcattgatttagcatacaaactagattttttcttcgcattgttttttttttcttttctttgcattgttccactataagcttaaggtgaaataaccatacaatagtcaatactcaatagtgtggggtggcataaagttgttggtcgagagatcatgtcacaagtataactatacataattttgataagggccatataacacgattgaaaaatgaagaatgcatgataaaaggaaaaagaagtggcataattttgataaaaatcaaacaataaaaacatttattagatgtctcaaagaagcattaaaaggcaaaggcagagagagagacaagtgggctaaattgaattgatagaatacaaaatggaaaagaaaacatttattagatgttgaataatgttgaattgatgttgagggagtgatggcgcatactgttactgttaactaagagtgtgtggcacacatttttcttgcttttacattctaaccagat

SEQ ID NO: 520 - DNA, 116448 bp, Arabidopsis thaliana
aagcttcttcacaagtaacaacgatcaatctcataaagaacctcacgagacacgcattcttttgctttatgggacttcttttttttagcatattttattgatcttgtaatttacgattattaattagaagccgaatcttgagatcaaaaaaataaaagataaaatcaatttttagtttatgggtttggtcggactaatgctcctgagtcctgacgcgtgggcgtggatcatttccattttcacattttcgaaaaataatttgtgtctttggtttctccttatgaacatgcaatattcatcagtaatatacatgttgacaaaaaataataatacgttgccacattctgtgttacaaacattccattctagtcaaactagataaccagaagatcatcatcaacttcatgtttctaattttgttttaggatgtctatcaatatatttgtaattatgtattactatacgctatttgtttcttaaagattgaaattagcgcatttatcgtgtaactttcaagtttcataggggaacaatgatattttaagtaaagactttaagagattcatattaattaattattactaagatttaagaatataataaagcttcaagtattttcatctttattctaacaaaattgactatcatagcaattatatcaggatcgtagaacatgaataaaacataactatcgttttattgttttatcatttatctaatcaagctgcagcatgtttggtaggagaatatggccgacactcatgaaggtcaaatgattaaaacattgtccgcttgtttattttaaaacattaagaacctcaagtgggggttaggtttcacgtacgaagctgtccgatattgacttgcctttgtttcgatatttcacacttgttctaattttgatcattatgctcatgttccatttatgtacgtcgtcgtgacttcttaggtcgcgaaagttgatacaatcaaaaggacacgagaagaccatttacaaagtccaaatcataatattataatgaaagttgtttgatacaaacaaaagtcacgaaaatgcatttataaaagtccaactgatctattattataaaaccggattgcatctttcttttgaccttatcttcagcctaaatatataattctcaaaccaaggacggcaaccaaaaaaaaaaaaaaaagacattaccaatagagaggtttcatcagatttaacactttcgttcagacctaatatattagaatattttcttggcaatctaaaactaaaactttatgaactaatcatataatttatcttcttgatatttctgatttatattgtccaaactaaataacttggttttggtcgaactttagtcatagaccggatcaacaactctaaaacctcaaaagcttgtcgggaactgtgggatcagtccaaaaataactcaattctttcggctattattcattttgtcctaattgacatatccttatccacaaattgggtacacataaactatggtggatgaatttctttgcttatgcaaaaataaggagatatttcgaacgtatttattctcttttgctcgtggtcgataaagacctttttcagctgaatacgtatattctttctttagattaggacatgtatgaacctttagccccttttgcatacatgtgctcattcattagagtgtcgcataatatcttttaatacgaggagttttagaataagtaacaaaccttagcgtgtgttcatcaaaaaacttgcagaaccaaacaatcttaagatctctctcatgaccaaaaaaagattggtggaatcattttaatgtggttccattagtctagtccaagattgttctttgatacctttagttccgcatctcaaaacatcttcaaaccagtaaaaatgacataagacatgacatcatattatttatccaggtctagatgttcagtgataatgagttacagagataatgagaacaagaacgagagacagagagatacgagatcttacagactccacaagtgatatttcatggcaagaacttgtcgaggctagatgtgagtgtggttttgggcactgcacctatgattgtatccttcttctcgccaccgacaaagatcatgatcgttgggatgcttctaactccgtactggccgggagtattaggagattcatcagtgtttaatttgtagaacttgatcttcccagtgtaatgctgtgctagatcgtttacaagcggatcaatcatcttgcaaggtccacaccatggtgcccaaaagtcgacaactacaggcccagttgctttaagaactagagagtcccatgtcgagtcattgaccacttgaactgcaggatcaataacacaaatcaacaccttattgccaaagcttttagaatcatgaatgaaaacaaaatatatcagccaaggtggacgaataaaacaaagagacagctgacccgtttatccatcttcagctagatcagtatgttgtagcaagtctatatgatatttcctaaaaatgatctagaagtgaaagtttttcaaaatagaaatttgatagatccagtgaaggataaagctttatgttttcaccagagaggagagaccaatgactgagttaacattgtagcagataatactgctaatctcaccaaacacattatcacggaaaaggacttacctatctaaaatcgtagaatatcaatgctagtgataaccaaaatcgttatctgctggtatagagaatcaagatatgtttactctaaagcacaaaaagcaacattcttctctcatgagccaaataactgtttcttgtcacaatgtgtatgatccaaccaataaaatatctgagtaggtacccaacctaatttctaggtttgttagagagactttgcattaatcaagtaaaatatccccaaaaaagaagtgatcctaaaaagcaaccttcttcaaatttcacgcaaatggcatgaatcgttcctctaacagaaacctcattttcagcaagaattttctcaaaaggtatactctcctaaagaaactcttcttcctcctccagattcactaatctgtaactaatctcaagtttttagcagattactaaatgctacaacaagaacaacaacacaaattcaagcaccttgcttctaatttccctcgcacaaatcaataatcagttctcaaaatccaccaacgagcacgaatcaaagacaagttaataaccaaaatcgaaaaaggaatagtgagaaaacatactatcggtagtagtttcctgagcttcacagacgacggctcttcgtaatcgagaaaccctaggttgatgaatcgaggtcaacgaagccggagagagagaaagacggattctcaaacctgatgattccggtaagacggcgaacatccgccgagaagagagagaagaagccgatggtgatgaggatacgattctggtctcggagcggagagaaatcggaggacgagaggtacaagtgaaagcagccatggctatagatagagagaggagaggtttctccaaatccccaagtgaaaaaataatatccagatagatagagaaaataaaaagataacgaaactaatggaagagaaaatgtagacaaaacactgatgcagattttttatatatacatcaacacaaacaaatatttttggaaaaataagtatttctactaaaaatacaattaaaatacagttgtgaaaaaaatcgagaaataataaattgaaatatttttgaatttttttgatttgttgagctgtagatatcatttgcccaaaataaccgaaaaaagtagaaaacgaaaacatattgtaaattgtttttttaattgtttgggtaagatagtgctctgactaagcccatctgtaataagcccataaaacttttgagatattttttattgggctcatattaggccagttgcactttttttttttaatccagtcacttgtggatttaacagaaattttaacaaagttccgttacccgcaatttgtgatctcgggtcaatttaatgactattttggcaacatcaacaaaaagttagcgactgaaataagaagtcactaaaagttgactattgaaatgaaaagtcaataaaatttaaacgtattattttaccccacactaatttttttttttttttttttttttttgtatttttgaacatttgaagatctcctgacattttttcgcaattgtttttctcaaaattttctttaaaaaaataaataaattataacgcttgcttataagataactaaaagtctaaaattttgaataaaaaactatttggcatgaaaaattcgcttttgttaacaattttcttcaaaattggttcgttgaatcctaaataatatctgatgacaaaaaaaaagattatagcaaaagtattttcttggaaaaccaacattttaaaacttgattggtaatggtatgacaattagctcttgaaaaatgaaaacaaaaacaaaatcttaaaaatctataaaactttcaaaaccaacattttggatctgcctctttttctttttcttatatacctctagtattgaggaaccacttcaaagtctttcctctgatgtcactttagctcgctgacatctcttctactcctcaatttctttataatctcggtagatctctctactaaagaaattcctcctttcttggtttcttctcaatattttgttttatttttgttttctctttccacatgtctctttttattatgttacaaaaatttcctcaatgttttctacgatgttaggttcaatgcgtccggtcaccacttatgttttcactgtaagaactcattattccccagccctatgcgaagaaagaaaatggtggtagctagagaccaagtgatggatttttacaaacgtgttcatagtgtcctcacagataaagagttgtcgaaattagaagatttgaggcagcttattcgatcaaaataatcttacaataaagaagttatcttcaacaccgacatcatatctcttttatatgattcacagtgtcattgatgaaatgaaaagttggttgataatatttgttgcgttggggatgggttatttgatgttcgaatcctgggttttgtttaaaaatttcgtctattaatgtatatagcttagattgttgtatataagcttagtttggttagtatagatttcatatagagtctgtacaggttggtattctataaaccaatcttaattttggtttagaggcttatggtttaggccaatatcagtttgtatataaacccccaattgtactcttttgctaattaatgagaatgagattgttttactaatatggtatcagagcaaaatatctcgatctcagtctcgtaacaaacttttccgatttgatttcactggaatctcaccggagtttgttcatcttctcattttttttcttctcttgaacttctacacgttttctcttcgtttcctttgcgatccagtctcatttgttagctgtttcgattctccatgggtaaacgaaatggaaagagtgttcgtcggagtagttcaccggatctacttgtcattgcttcatcgaagattcatgagcagtcttctggttcatcagcaagagctccaggatcctcgattcatgctgcgattcatcaaccagctcaatacagctcatcgcgtcactttgaggtatcggattctcctgataatagtcacagtccttatcatcttgttagctccgatcatcctggtttagtcttagctccagaactgttagatggaaacagctatggtacctggattatagccatgactactagcattgaagctaagaataagcttggatttgtggatggatctattccaaaacctgatgatgatgatccttattgcaaaatctggcgtcgttgtaacagtatggttaagtcttggcttctgaatagtgtatcgaaggagatctatacaagcatcttgtattttcccacagccgctgcaatctggaaagatctctatactcgatttcacaaatctagcctccctcgactttacaagctgcgtcaacagattcactctcttcgtcaaggcaatctggatttgtcatcgtatcatactcgtaaacaaactctttgggaagaattgacgagtcttcaggctattccacggactgtagaagatcttctgattgaaagagagactaatagagtcattgattttcttatgggactcaatgattgttatgatgctgttagaagtcagattctcatgaagaaaactttgccttctttgtctgaggtattcaacatgattgatcaggatgaaattcaacgttctgcaaggatttctactactccaggaatgacttcatcagtgtttgcagtctccaatcagtcttcacaatctgttcttaatggagacacctatcagaaaaaggagaggccagtttgtacttactgtagtcgccctggtcatgttgaagacacttgttacaagaaacatggttatccaacttctttcaagtctaagcaaattgcaaatactgaattgcaaattgtagatccgttcaccaagcttttgtatccatcgcacttccaacgtctaataagcaagatgggtctactcaacatcttcgtcccatcttgagggggactattaatgtatatagcttagattgttgtatataagcttagtttggttagtatagatttcatatagagtctgtacaggttggtattctataaaccaatcttaattttggtttagaggcttatggtttaggccaatgtcagtttgtatataaacccccaattgtactcttttgctaattaatgagaatgagattgttttactaatatcgtcaacaatctcatcgtctttttcccaacaaatgttggttttgaagttgaatgatgtgggttctataatgttcatggactcagtctgcttatacgattctaagtttcttgactagaaactaatggtaaatttgttataatgattgatcagcacaagtactaattactaccaaacgaataaaattttagtcatttgtattagtatcaatgtgttatcacttatcacttaagtttgttaaatatttttataattgttaattgtaaactaaatatttttttagtcatttgtatcagtaacaatgtagtcttgaatctccaaatattatagaatttttttgctttagatttcagttaacaatttttctacaaggtttgttcatacgatatatccgccacaaggtatgttaataagctattggtcgtcgctggtttttgatcttcatacttgataagtgataactaaatcttggtagttggtttaaagaaaacaataatgttaaaacaatgcaaaaggaaacgggcttgggatgttaacacgttctaagttcgattcacctgctctgcgaaacttaaatatattttcttggatatcttatatctacatagatatgggtccatgtttacggttcatttcaatatctgaagaaaggattttatctatgagatgcaccttcctcagagattattttggattctttcgtaggtttatgattctaaattaacaaaaaaaaaaaatgacataaacttaaatcattttgaaactaagtttctataattggattaaattataaacgtaggagaatgttcaatttcttctcttcatgtgaaaacacttttaagtaataataggtcacccacttcaagacactaatatttccataaactcataaaagtcatacaacaaaactctaactttgctttcactgacttataccatctaaagcaatgttagttcgaatgtcagaaagaaagaaaaattcaaattaaatgtaaaattataactaaaaaagactcgacgacttgttgttggtaattatgaatatatatatatatatatatatagagtatatatacaaaataacctttgacttgaaaacaataaacaaaataactttggaccaaatagtacttgtctgctacagaaattttggcaatatttagtctattttattctttctcttttttcttctttttctttttttttcatgttctttacgaaactttagccatgaagttctctttctctcttcatctttaacacaattcatcttcttcaaattcaccatgtcattttctttttctacttttctctccctctcctagaatatcttcaccacctctcataaaatttatcatcatatctctttattttgttcacccacatgttctctctttctttttccatagaaatctctctatctttcattctttgttttctctttttgcctgaattcttcatcaatgtcgttgtgatataagagattatatttgattttaaaacaaatgtctgattttaaaatgcatgtattttaagaacaaaacatgttattaacactgatatattaatatttgtcatgctatccaacaaaaattcatgtaatatataaatatttgtcatgttatccaataaaaactcatgtaatattgtaacaattctatatgtttttaaaaaacttcgcgatgtataacagaattgcatgcttttaataaatatatcgtgttatttcagagaaacatatatatcgtgtatatatattctgtatgtatttataaaaattgcatgcttttttgtaaatatatcatgttattttagacaaatacataaaaactttataactacaactaccgatatttttataaaaacaagaatattttaatatattatccaccctataaaaggttatttatctaagttttttgatacaaggctattctctcaattgttttcaattccatggttactctcgaatattactcatatatactgctgagaaaaaagaatagatacaaatacttatggttatattagaaaaaaatgtcaaaattaatatacaagcccggcagacaaaaacaccgaagattcacctataagttaggacaacggctcaatgaaaaatgataattgtttcttctatgatgtcatcgttcatgaatctaacaataataatataaactacgacatttgtttttcaacaatgcatactctacatctttaattccaaactatgacatttttttataacaaaatattgactttgagggctatgtttttcaaataattaataaccattgtatagtttaccatgacatcaattttggagtatctatatacattatgtgcggttgaaatttaatactttttgtatttctgatgaagcatttttgttttgtagttccacatgtcataaagtcataaagagaaaaatagtcgtgtgttgaaaatgagacgatgacggtgaagatagttgaaaaatctcagctaacagcacatcccactcaattatatatatattgttgattaccaattagtttgtttattcagtttatgtgtatgtgttacgttcttacacttctccctgatgtctttgtgttcttacatatttttctgtttcatctagaaatttttattaccgttcgatggtgaagttgacaaagagaataggagggcttgtgctgcgattggcagcgtttggtgcggctcttgccgcattgatcgttatgatcactagccgcgagagagcttccttcttagccatctcccttgaagctaagtacaccgatatggcagcgtttaagtatgtacaaaatttcttcttattttcttgttgagtcattgtatgtaaattatacatctatgagttatgcgaatatgtggtaacagaataaaacatgtttggcaggtattttgtaatagcaaacgctgttgtgagtgtttacagctttctagttctgtttcttccaaaggagagtttgctttggaaattcgtcgtcgtcttggatttggtaccaatttttattctctgcatgcattcatttgcataatatattataagttcccttggttattataaagtgatgttgttacttatacctggttaatatatattaacaactgatcctaaatattatttaaaaagattttttgtttttcatcgcatattaacaacattatttattggcaacaaaaatgcaatgaaattagtattttgtagcaacattttcacaactattttgcagcatgtagattgtgattttctcgttatactaagttttaagtggtgtaatataagaattgaaaattatgatgttactaatttgtgttattcttataatgatcattagctcaatttgtgttaaatatccacctgactttttattcgagtgtactgttttttttttttttctgttacaatttgagtgtagtgacgattttatatatatttttgttaaagactatctctctagattaattaaaaacttatctatactcgaagttgatatattggttctaaaacgaaaacgctcgatgtattttaagaaagtgttatgaaaaaatgatagcaacttgaacacaaaacgactgcatacatagtagatgattgattgtctaaattaatttatttccattcgaatataatttgatggtgatttgtgtgtaagaaggataggtgaatcgttgggtggaaagttaaaacgtttgaatgcatatctaattactaactagtattcgtgtcttaatacaaagatttcttatcgtttcgtttgttaggtgaagattagctaaaataattaatatgtttaatttgaattggtgtatcatttttttgtcattaaccgtgatgaaggtgatgacaatgctgcttacgtcaagcttatcggcggctctagcggtggcacaagtgggaaagaagggaaacgcaaacgcaggttggcttccgatttgcgggcaagttccaaagttttgcgatcagatcactggagctttaattgccggtttcgttgcactcgtcctctatgtactcttactcttatattctctccacgccgtcgtcgacccttttctccttcaaaaatcttgaatctacctttttttttttgagtatcgatctaattttatgtctctcatacatatatagatagtagacacataaacataaatttgctcgatgtcgatttgagacgtagttcgtgtgttgtgcttgtataatttccactgaaaagaacgttttctaaaagttcatgaccataacacgtaaagaggcgaatgaaggtaatattaatgtgggacatagtgttttgcgtgatccaaattattttagtatcgcaaaccggcctgtcttaaatggacatttgtagtaacaaaaccgaccatcagcaaattaacgttaacgttgctctaatcgtgtgtatttttctaatgcttggtgaagcacatgcgaccatttgttgtgtcagaacaaaaggaagattccacatttagaatttagattataatcccacatgcctattatttaaacatatgtatactgtaataaattagtcccagaagagcatttcatcatactgtataattaatcaaatttaaaaaacatttgtgttgaagagaagatgactagattcacttgattttttttaatactgattggtcgtttgaccagtcaggatccagactgaaatattctcaaaaggtatgaactattttaatgaaatatttgagctgagaatttgcttatgggacattctatccttctaaagaaatcattagaaaatggagaaaaagttactagaaaaagagagggaaatggggcgagagtatgaagaaagggtcccatgtgaatctaataattgaaaagcaaatatgagatttattttagggttcttgttttagcgtccaaagcggtcgcagttgccgttcagcgacttttctctgtttatgaaataaaaacgctccacttgttcttttcttctttcaacccactttgttataactattaacaaatattgcttggtccaaattttattatactgaattattttagtttttttgtatcatcatcctcaatgttagttttgaaatcctaggtcagtaagtcaataacgaaaatgacaagtttaattttgtaattggaacttacatgtcacggtctttgtttacgatcattgccacgaattgtttagatacgggctttttttttctttccgtgttgatgattatcgtttcttcttacatatcttgatcaatcactaacatttacataacctacaattttgtaatataattgcaatactcgagatcttcaaatggtgatactgttaataaaattacgaacttttaatcatcatcaaaatctatagaaaaagatacataggaccaaaacaagcctaaaacaaagagttataatttacaaataaatgcatgtattttgttacttttgttaaggattttcatatcaatgcatgcataatgcattctctttttattttatttataatgcattcttttataatattcggatccaaaattatgaattaattccagattgccataaatgtctttctttgtttatgctgacttttttcttttcttaacttatatagtaagtaaaccagaaaggtggaagatacaaagcaatttcattgcattaataaacttcaaatgtattatccaataatcaaaatttatctagtaattcacaaaaaaaaaaaaatctgtctatcattcaaaatttcaccaatttggataaatatctagaaaattttaaaatacaattcaataacactattaacatatcaatcaatatataacattgcaaaagtttacttgatcattagtatattcattttaaggttaaaagatctttaagaaaaggaaattcaaattatattgttggaaaaaaatacaaatcaaagacagcaaaaaaagtaacaaaaaaaaaaggtagaagaaactgaaacgcggaaaggaggcaaaatcttctcgtcgtcgttgtcgccgtcttcagagctacaaacgaaaaaactcgcttccgtttcgatttctccattgttattgtttcttcagtgaagcttttttcttcgagaaatttctaagatctaccacatgctactatgagcctccgccaccgcaccgtcccgccgcaaaccggacggccgttggcggcggaagctgtcggaatcgaagaggagccgtacaatatcattcccgttaacaatctcctcgccgaccatccttcactccgttttcccgaggttcgtgccgccgctgctgctcttaaaaccgttggagaccttcgtcgtccgccgtatgttcaatggcgttctcactacgatctcctcgactggctcgccttgttcttcggtttccagaaagataacgttcgtaaccagcgtgagcatatggtgcttcatctcgcaaatgctcagatgcgtctctctccgccgccggataatattgattctctcgattccgcggttgttcgtcggtttcgtcggaaacttctcgctaactactctagctggtgttcgtatttggggaaaaaatcaaatatctggatctcagatcggaaccctgattcgagacgagagcttctctatgttggactctatcttctcatttggggagaggctgcgaatcttcggttcatgcctgaatgtatctgttacatcttccataacatggcctctgagctcaacaaaatcttagaggattgcctcgatgagaacaccggccaaccttacttgccttctctctcaggcgaaaacgctttcttaaccggcgtcgttaaacctatttacgatactatccaagctgagattgatgagagcaagaacggtacagttgcgcattgtaagtggaggaactacgacgatatcaatgagtacttctggactgatcggtgtttcagcaaattgaaatggccgcttgatttgggaagcaatttctttaagagtagaggcaaaagtgtagggaaaactggtttcgtggagcgcaggacgttcttctacctttacaggagttttgatcgactttgggtgatgctagctttgttccttcaagccgccattatagtagcttgggaggaaaagccagatacctcgtcggtaacaaggcagctgtggaatgctctgaaggcaagagatgttcaggtgagactattgaccgtgttcttgacatggagtggtatgcgactcttgcaggctgtgctggacgcggcttcacaatatcccctcgtttccagagagaccaaaaggcattttttcagaatgctgatgaaggttatagctgccgcagtttggattgtagctttcactgtcctctacactaacatctggaagcagaagaggcaagacaggcagtggtccaatgccgcgacgactaagatataccaattcctttacgctgtgggggccttcttggtgcccgaaatcctggctttggctttgtttattatcccatggatgagaaacttcctggaagagaccaattggaaaatattctttgctctaacttggtggtttcaaggcaaaagctttgtgggtcgaggtttgagagagggtttagtggacaacatcaagtactcgactttctggatctttgtcctagctacaaagtttacatttagttacttcctgcaggttaagccaatgattaaaccctcaaagctgctatggaacttaaaggatgtcgattatgagtggcatcagttttatggagacagcaataggttttctgtcgcattgttatggttgccagttgtgttgatatatctgatggatatccaaatttggtacgcaatctattcttcgattgttggtgctgttgttgggctgtttgatcatctgggggagatcagggacatgggacagctgaggctaaggtttcaattctttgctagtgctattcaattcaacctaatgcctgaggaacaactcctgaatgctagaggctttggtaacaagttcaaggacggcattcataggtagtccgtggaagcatgctactaatattcctaaataattttctgtacaacgcttgacttgactgtacaagctgtgaaattttacttttgttaacgcagatgctgcatataattaaatttttcaatattgtaataacttgaggttgtgtactgtatgcagattgaagctaaggtatggatttgggaggccgtttaagaaacttgagtcgaatcaggtcgaggccaacaagtttgcgttgatctggaacgaaatcatcttagctttcagagaagaggatatagtttctgatcgtgaagtagagctactggagctgccaaagaattcctgggatgtgacggttattcgctggccgtgtttcttgttgtgcaatgagcttttgcttgcactgagccaggccagagagctgatagacgcacctgataaatggctgtggcacaaaatatgcaagaatgaatacaggcgttgtgctgtagttgaggcatatgacagcatcaaacatctattgctctcaatcatcaaagttgacactgaagaacattcgataattacggtcttctttcagataattaatcagtccattcagtcagagcagttcaccaagacctttagagtggacctgctgccaaaaatttatgaaacactgcagaaattggttgggctggtaaatgatgaggaaacagatagtgggcgggtggtgaatgttctgcagtctctttatgagattgcaactcgacagttctttatagagaagaagacaactgaacagctatctaatgaaggtttaactcctcgagacccagcctcaaagttgctgtttcaaaatgctattaggcttcctgatgcaagcaatgaagacttctaccggcaggttaggcgtttacacacgattctcacctctagggactctatgcacagcgtccctgtgaatctagaggcgagacggcggattgctttcttcagtaattcgcttttcatgaacatgcctcatgcccctcaggttgagaaaatgatggcgttcagtgttctgactccatattacagtgaggaagttgtatacagcaaagaacagctccgaaatgagactgaggatgggatttccaccctatactacctgcagacaatttatgctgatgaatggaaaaatttcaaggaacggatgcatagggaaggaatcaagacagatagtgagttgtggacaaccaagctgagagacctcaggctttgggcttcctacagaggtcagacattggcacgtacagttcgtgggatgatgtactactaccgggctcttaagatgctcgcttttcttgactctgcgtctgaaatggacattcgggagggtgctcaggagcttggttcagtgaggaatttgcagggagaactgggtggtcaatctgatgggtttgtctctgaaaacgaccgatcttccttaagcagagcaagtagttccgtgagtacgctgtataaaggccatgagtatgggactgcattgatgaaattcacatatgttgtggcgtgtcagatctacgggtctcaaaaagcaaagaaagagcctcaggcagaggaaattctgtatctgatgaagcagaacgaagctctccgtattgcatatgtggatgaggtgcctgcgggaagaggagagactgattattactccgttctggtgaaatacgatcaccagttggagaaggaagtggaaatattccgtgtgaagctacctggtccagtgaagctgggcgagggaaagccagagaaccagaatcatgcaatgatctttacccgtggtgatgctgttcagaccattgatatgaaccaagacagttattttgaggaagctctcaagatgagaaatttgctccaggagtacaaccattatcatggtatcagaaaaccaactattcttggtgtcagggagcatatcttcacgggatcagtctcgtcactggcgtggttcatgtctgctcaggagacaagttttgtcactcttggtcagcgtgttcttgcaaacccactgaaggtcagaatgcattatggccaccctgatgtatttgacagattctggttcttgagtcgaggcggcatcagtaaggcttccagagttataaatatcagtgaggacatctttgccgggtttaactgcacgttaagggggggaaacgtcacccaccacgagtacattcaggttgggaagggtccacaatttggattatttctaactaactatactgctacaacgtttttttaacgtttttaacgtttattaattatgcaatctacttttgttataattatgtaatttaacgttttttaatcttctaaattcaaaaaatttgagtaacctttgtctttatgcatttttcaggtcgggaagggacgggatgttggattgaatcagatatcaatgtttgaggctaaggtagccagtgggaacggagagcaggttctcagccgagatgtgtaccggctcgggcacaggcttgatttcttcagaatgttatcatttttctacacaactgtagggtttttcttcaacacaatgatggtcattcttactgtttacgctttcctctggggacgggtttatctggctctcagcggggttgagaagtccgctctagcagacagtacggacaccaacgccgcgcttggggtgatcctgaaccagcagttcatcattcagctcggtctgttcactgccctgccaatgattgttgaatggtctctcgaggagggtttccttctagcgatatggaatttcattcgaatgcagattcagctttcagctgtcttctacacattctcaatggggaccagagctcactatttcggtcgaactattctccatggtggggccaagtatagagccactggacgtggatttgttgtcgagcacaagggattcactgagaactaccgactgtatgcacgcagtcactttgtgaaggccatcgagcttgggctgatcctcatagtctacgcttcgcacagtccgattgccaaagactcgttgatttacatagccatgactatcaccagctggtttcttgtgatttcatggataatggccccatttgtgtttaacccatcaggattcgactggcttaagacagtctatgactttgaagacttcatgaactggatctggtaccaaggcagaatctcaacgaaatctgaacaaagctgggaaaaatggtggtacgaggaacaggaccacctgagaaacaccgggaaggcaggattatttgtggagatcatcttggtcctccggtttttcttcttccagtatgggattgtataccagcttaaaattgcaaacggatccaccagcctttttgtctacttgttctcatggatatacatctttgctatatttgtgctcttcctagtcatccaatacgcccgtgacaagtactcggcaaaagctcacatacggtacaggcttgtccaattcctcctgatcgtgcttgctatactggtgattgttgctttgctcgagttcacgcatttcagcttcatcgatatcttcacaagccttcttgcattcatcccaactggctggggaattctgctgatcgcacagactcaaaggaagtggctgaagaattacactattttctggaatgctgttgtctctgttgctcgcatgtatgacatattgtttgggatactcataatggttccagtagcgttcttgtcatggatgcctggattccagtcaatgcaaacgaggatattattcaatgaagcttttagcagaggacttcgcatcatgcagattgtcactgggaagaaatcaaaaggcgatgtctaagtttaaaaaacggtaaagctccttgttctcaacaccttatgttatgatcgtttaaatcctggatttcacaccaatgcgggctttaaatttgtgtaggtcttaagaagtaaatggtagttcaaatcctattggtatgtggcgaaggaatcagttggaggttagttttcccgaaacaaccgaattcgaagttttgtttcgtctaaagaaaaactcagatgctgatgatttatctttgtattttaaacaggtttttggagagtttggttggatgaggaatcgggaagttggtttgattcggttagatgggtttagggagatatttgattgtcagtgtgtgtggagggaactctgattcttgtatggtttttgttctaaaggtacagcaatttgtgtagtgaggctttgtgtatttgttctccttctctcattatagagctttagagcatttttagtttatattcagattgttatctaatgtcatctcgcagagcttttgttcacatttcacatcttttcttctccttcttagtagagatcagtttcagattagatacttgtccatattccactactctcgtctattatcggtttctgcttgtcaatttctgggtccaaaattgaaataaatttatataattggaccacaacaccactttgtcggttttgacttttctacttggatgctcctgaacttcttgctcccttttctattacaaattgggaaacaatcagtgtgaattggggaataaaaaaaaacagaattgagcaattaaagccacgtggcaagaaatcgacgagggaccaacgtgtttgtctgcaagatctaatccttttattaacaaaacggcgactgatctaacgggaaacttttaaaatcgagaaattgttaataataaattcaactacttctgggccatcatcatcaatcttgttcgtcttccttttgatcttatcaaactacagtcaaatcactcagagaaagctactaggtctctcctcgacatttgctttcaattcgatccagtaattttcttctcatcggagagagaaaaaaaaaatggaagacccgttgattggtagagatagtcttggtggtggtggtacggatcgggttcgtcgatcagaagctatcacgcatggtactccgtttcagaaagcagctgcactcgttgatctggttctcttattctcttacaccctaattttgaattcgttttcctctttgacttttcaaaaagtttctatacatggatcacatcgcctccaagagagattctatgtattttatcagttcattaagtcagtgtttttgttaagctgagaagatgaatcgtttcttcttctgagtgatttcttcgtataaggattagtcaatgcttttgtgtgtatatcctcacgaaattagcattgtttgaaaattgggaatggagatatctgttgtttcattgtctctaaagtcttatgtcaagaggattgttggattgactctgatttgtggtatgtaggctgaagatggtattggtcttcctgtggaaatacttgatcagtcgagtttcggggagtctgctaggtattacttcatcttcacacgtttggatctgatctggtcactcaactatttcgctctgcttttccttaacttcttcgaggtcagcacatttctttggtatacaccaaccttgcttgaaaaatttatagaaaatcacaacttgaaagtaatcacacacttttcctgtcttttgcagcaaccattgtggtgtgaaaaaaaccctaaaccgtcttgcaaagatagagattactattacctgggagagttaccgtacttgaccaatgcagaatccattatctatgaggcaagtaattacacttaagtcttgtttgcctttgtttttttgctatagatgcatagatttagtgcagatgggctcatgatatacatgtacatccacttgaaagtttaagacttgaattgccttatgtttgttttctttaaatcttgagaagccttgagtatttattcaagactagtttatctcgtttaattcgtcgttaagaacttaatatcaacactcacatcttattttggatatgtttattataaggactggccaagatccttttctcattgtgctgaaattataatattctttgctgtccaaataggtgattaccctggctatactccttgtacatactttcttcccgatatcctatgaaggttcccgaatcttttggactagtcgcctgaatctagtgaaggtatttccttactagccacttcacagttttgtgtttcttctttttgttgaaaatcgatcagaaagtaagaaattccttttcttcgtgcaacaatttgtcttcatattgattccaggttgcttgcgtggtaattttgtttgttgatgtgctggttgactttctgtatctgtctccactggctttcgactttctcccttttagaatcgccccatacgtgagagttatcatattcatcctcagcataaggtatccgtagatctctgcttcttttctatcaactatatgggttatatgtctttatttctatagacaaagatgcgcagatcatgtcatgtatgataaatgtcgacgtgtgattatttgacctactattcctcctattaaatctctaaatacagcacattccccaaagttatgattctttacatttctgtacagggaacttcgggacacccttgtccttctgtctggaatgcttggcacatacttgaatatcttggtcagtggccttccccaatcatttttgactttcagataagtaattaactcatattgattgtcatcctatttacttaactccttgaatattttcacaggctctatggatgctgttccttctatttgccagttggattgcttttgttatgtttgaggacacgcagcagggcctcacggtcttcacttcatatggtgcaactctttaccagatgtttattttgttcacaacatccaacaatcctgatgtctggattcctgcatacaagtaagtattaggtgaaatcccatttgtgtctcagtttgcttgtatggcgttgcatccagtaatttagtgacttatttgttctgtcctctaaggtcttctcgctggtcttcggtgttcttcgtgctctacgtgctaattggcgtctactttgtcacaaacttgattcttgccgttgtttatgacagtttcaaagaacaggtggattaaggatttgatgtttgtatggttcttatgtcagcttttaaaacaaaagtattaacctcttttgacaccttgtgtcatatcatatctattctgtttgcagctcgcaaagcaagtatctggaatggatcaaatgaagagaagaatgttggagaaagcctttggtcttatagactcagacgtaagttcatctacgcatagtgattatatctactcctagagatatccggagaagttctccttgggcaaagatcttcatgaatggagagtctttgtatagttaaccactttgctgagcatatatttcttcgttctttatttcatgttttaacagaaaaacggggagattgataagaaccaatgcattaagctctttgaacagttgactaattacaggtttgttgctatgatctttggtattttcaatctttcctatgtttcgaaaaagaaatacatcttttatatacttgtttgtggtttcttcccttttgtatgttaacttgtgagacctgataatgatatgcattcatttttccttataggacgttgccgaagatatcaaaagaagaattcggattgatatttgatgagcttgacgatactcgtgactttaaggtagagatctgtgaaggatgtggcacatatgatcaggatacaccttaagattactattcacctaaacctcttgacgactaacagattctttgtcccctttttgtttcctgttgagcagataaacaaggatgagtttgctgacctctgccaggccattgctttaagattccaaaaggaggaagtagtaagttcacatatactttattttccttctctcaaaatttacttacctccaccatatgtttacattagcgatcctttttgttttcattgcagccgtctctctttgaacattttccgcaaatttaccattccgccttatcacaacaactgagagcctttgttcgaagccccaactttggctacgctatttctttcatcctcattatcaatttcattgctgtcgttgttgaaacaacggtatatcatgttcccatatttctttgacatgcgattcctaattctttcataagccataacagattttggtatgcagcttgatatcgaagaaagctcggctcagaagccatggcaggttgccgagtttgtctttggtaagaacttgaataggtttccactatcttctctccattttgtatttttcttctatttgatgctttgtgaagtgtataatctatggttactgagaaatatgatgaaaagatgaagaatgaaatagaagttaagctatttcctgtgttattacactgagtagagtacttctatggatcatattagattgtaacagccgaattttattgaccaccttttcagagtcttaactttttcttcttttaatttctatctttgaatgtttttacaggttggatatatgtgttggagatggctctgaagatctatacatatggatttgagaattattggagagagggtgctaaccgatttgattttctagtcacatgggtcataggtaacctattgaagcagcattttcatcttgttttgctgattgagtgattgatggctatgctataagtgataatctttgtatctgcagttattggggaaacagctaccttcataactccagacgagaatactttcttctcaaatggagaatggtgaggaataacgatgacatatttgttacaatggtcttcttttgtactaacccagactctggttctcattgataggatccggtaccttctcctggcgagaatgttaagactgataaggcttcttatgaacgtccagcgataccgagcatttattgcgacgttcataactcttattccaagtttgatgccatatttagggaccattttctgcgtgctgtgtatctactgctctattggcgtacaggtaaatcagactactgagttttttgtctgaaaaatgcaagcttatgatgaagccttggtcaatggtcattctcgtcatttttgattattctaagcctcttgaaattcttcatctttccgttcatctgaatgttttaggaaccgctgaactgctactctcatgtgttttccctgtcttctctcacgggttctatttcccaaatcagatataaaaatttcttcatctcatttctccgtaggtctttggagggcttgtgaatgctgggaacaaaaagctctttgaaaccgaattggctgaggatgagtatcctttttaactttctgaaaaacttttaatgcactcaacacagtcttagtacaccttctctgttcctgtgattgctagtgtgtttttaattttttattactggggtaaaaacgttttcagtataagatcgtttcttgacgggaaaaactcagctaccttttgttcaacttcaatgactaccccaatggaatggtcacactcttcaatctgctagttatgggtaactggcaagtatggatggaggtaatttcactcttctgttagtcccaactttagactcattatagtttccaacaagaagtatcgcaagattcattggagctgaggaggccaatgctagatgtactataaacagcttgcttcttatttgccaatcactatggtgcaatggttttaactactcttaatttctttcagagctacaaagatttgacgggcacgtggtggagcattacatatttcgtcagtttctatgtcatcactattttacttctgttgaatttggtgagtttcactgacgccaactcctaagagctcgatcaaacagaggccatgattgttgtaaagaaacttaactctgcttcttagatcgacttataatgcgtgtttgtttcaggttgttgcctttgtcttggaggcgttctttactgagctggatcttgaagaagaagaaaaatgtcaaggacaggtttgttattgtctttgattcgccataaagttacagatgttggggagattagaaaagtaaagaaccttttggttcgtgttcaatcggcaatgttttcatctcgttattgtatcgttgcaggattctcaagaaaaaagaaacaggcgtcgatctgcagggtaagtagataggtcaaattgttggttggtaatatcatactagactcaaaatctgaaggtttattttgtttttatggttattaaaggtcgaagtctcggagtcagagagttgatacacttcttcatcacatgttgggtgatgaactcagcaaaccagagtgttccacttctgacacataaaacaaaacaagatcgttaagagcttatttatacgtttatactgtgaatctttgattctatatggagagatcaatagaatctagaaggtgactaaattttttcttcttttgggtgaagatttaatataagacgattgtgttataatttgtcatgaaaacatatgactatatgactatatgagcatcaatttctttaacacttttgtaatgtttactgagttttactttgaccttttaaaatgtaacttttattagtaaaaaatccaaaagaacatgaaattggaagagtacctatcactagtaatgttttgagaattaggcttccttattaggatttttgccaaaatagaaatctctctttaattgatcaatgtgtgatagtgatattccgaatcctcattactaattgaatcgaaaagatctatgaattgatcaaaatatccgctcaattggctataattggttacttgaacaaaactaaaattgtagaatcatattaaatatttgacgatacgactttcgatattttcctaaagcatccgattcgtgcgaatttgtcttccaactaatgaagagattttggtggaattgccacatatgaaattgagcacaattttgcaaagaaatagtccactcaatatcatttgactgaatagttgacccaactcattgttgtttgaagaaaccttcttttcaattggtatttttcgcgaaaaggaaacattaaataaccattccagcctttcaataagatttcgaatagctaagagagatatattggaccttacattttgaatgatttgagttttagtggggtttctatggttttaatgattttaggaaagttaatgtgatttttttgtaaaaaaatttcaaattccatctaaaatcatgaaatttatcatcaaacacataccccaaatttctcatgactctttatactttcctctagtctcacccatgatgatacaaatctcaccaaatcactagtcatttaaaaaaaaaaaaagctaaaaaatcaacccaaatatttttaaaattactcaaatctcaaatatggaaattccaccgatagagacaaccactgatgaatccaccgtcgcttgctctctgaacaaggacatatccgactccgacacaagagaagatgattattcctccgacggagaaaaagaaggagaagactacgaaagcaacggagaagaaggagacgaatatgatggcgaaagcaacgaagaggaagatgatgacgatgatgataacgaaagcgacagagaagaaggcgatacggaaagagagggagaagacaatggagatagtatagtggacgatggatattcaacaaacgatcaaccagagtgggaagtggataacttcgatgatttatatagcgatttctgttcacctgatgaagactgttataccgacgaagaagatgagcgtaaaagacgtctttatcgtcgaaatctccactttagtcgtgttcgtatatacatgattcgaaatttaggttttgtcttttcctaattcaaatgttatttagtgtataatgtaatttgttgggtttttgttttgaggtttagggttttctggtggaaaaagggattcatccacgttccgtatggattggtgcaatcttacttgaaccattggacagtgaacattctccggttaaaggaaggacacaacttcaatacgcacaagacatggtcaaattgtgtcttcgcaaatacaatgccttaaaggtaatttctgattttaacattgttttgtttgtttaagatgtgtgaattggccttgttattacttgtttttatttttcctttggttgtgttttcaggaaaccaatgtgacattggatcatgttgtaagagtgacagggtctttcactggtaggtgggtttcgtatattacttttatggcgaaagagtctgaggacgatgatacgcttgtggagtatcaagccaaggttgtgaagaaattacaatgtaagacttatcctatgttttgcaggcctagtcctaagctagatccagatttgtagttcaagttttcttttaatctttggatttaaaactaaataatttgatgattacatcgtcgttttttgcttcttgttttggatttattctaatggatgtttctccaaacattaaatagtattttcagagtgtttattagacatatctaagatttatcaaaacttgagagtgccaaatctataaacaaataattgtacacttatatggccttattggtaaaatcgtaaatagtcggcgcgtttagaggtgtgccgtttgttataatggaggctaaagggcatcgagacatccaaagactatgaataacttcaaactgtttagggagttatgtaaattttagttcataagaaaatgggtgcttagaaaatgaccttccccatttatcattacaactaaatatgtgatatgacagaagaagaatcaatttggagaaaaccatttgtttagctggtctacaataattgtactattaaccccatggtcatgtaaattaaacattgactagtccccgtctaaggtaatgcttatcttttcttttgccgaccaaatccctaaaaatattcaagattggtctcaactccgatccgattagtcttttaaattttgtatcttaattagtttttttctttttgcggtctgaatcaaataggatctgctcctaccttctctcgttacgctcgtggctatatctcgtgctattatattggcttttgtagatgaaaccttaaacacgagcgaaccaaaattcggaagaatccgatgaattctatcaagataagataaatacgttggccaatttatgggatcactaatggcttccatagacagtccgatcatatctcaatgttatctaagtgtaggtcacgtaaactgtgtaagacccataaaacccctctcaactccgcagcaatacgatttgacgctggtaaaaacatttctcgggcatgaaaagcagcgtccccatgatgattcctgacaatccaagctccgccacagatgtgaacatcattaagccaagaaacatgtatattacatttaagcgtatctagtggtggcttagtccatctaactgcacatctaggattcagcgaaagacgagttacagactgggttggcatcgtccttaacttgttccacaccttagattcttcaaaagcatgagctataagtgcatttaagtcgccttgtgttcccgccaataccgttgtgttccgatgtttccaaattccccaaagtaaccatggattggccattctcagagaaagagataaaccatcgttactcattaagttaaagacaaagtctaagttatcagtaatagacggtgtgaaaccatgagtgggcaaagggatgttaaccctctcccaaacttctcgagccggccaacaatgaaacaagacatgactaatcgattccctatcattttcgcacagagagcatggcgatcaatgtccttgaaaactgctgacggagagatagttatctggttatgaatgatgttattccgttagtgtggaaaagaagtagccgaagagttcttggtgaatcaaggctggggacctacaaatctcagtagttccccttccgttttgttttgttgtgcaggattgacaaatggaacgagagaaaaagagtagaatggctaataaagatgtacattgtgaattatataagagtttatctacagagagggatatatagggagatatatgttctacatgtaatcatgtaaaagtatactgcctgcaaaaacacaaaacttagacatataccaagaatcactttgatctttttttgtcatcaagaatcactttgatcctaatgtataggtttttgggttggtttttaattgatttttgctagcagtcaacaaaaatcaaatttgtattattaggttttagggaggcgctgaaagaaaaagtcagaatctgagagtctttgcgtattttaattttaggttttgctcttttttttcatggtggcttcctcagccctgtacaacattctttggttcaaaacggttttgttagcatattagtgcagtttggtttaaaattgtaaacccgaacagatttttgtggtttcaaaattaaattaaaattgttttcttttgtttataaatgggtagcaaaatatagttcacttactttaaaatttcaactcaaacgtctttttgagaagtccttgctcccttaaaagtcttttaactttttcctagtatgtggatttacattttttttttctctcttatgtcgtgcatcgacagttatacaccttagaaaaggataataagaaattgtaattctaagaggtcaattcaactcttttgttgtcattgttattttctttttctttttattatcaaccgatttttttacttcaaattacatatctgagtaatttcacagttatattccaaggattcaaatggtatgattaggattgttagatcaaggttcctcagcttttgatgttaggtgaattaattataacttgatgaacgaaacgttcctagattgcataattgatgctatgatgttttgtaaacatatcaaccatattaacaatagtgaaaccttcattaaagaagaattaagtaaaagaaaccttaatgaaatcgtgcaatttcaaataacaagcggcgcggttgctgtgaagagcgatcttttggggtttggctttagcagcagtaagagcctccgtatagaatagaagcgcctccttgtacttgccgtctctgtatagctgatgccctctctccaccttccctgacgccatcgatgccatactcggggagacgaaactgtagatttatcaaaatgctaacgagtaataattgtagaaaaaacactaaaccgtagattttttatcaagtactttactatgattgatttgattagtatgtagatggtggattgttcagcagttaatcctatataaaatcatgcatgaaaattaaatagaagatatgataaaatagatgaaataagttgcttaaaccgggaaaaacatagagcagcatcaaatatttaaataagtactttaagttccatagagcaaaaagaaagccgagacaaaaccaaaagttccaataataattaaaaaaaaaaaagataagagaagcgatcaatgatgctgataagtcatagcagaatccttaagcatccttctccacaatgttcttgttacaatctgcagctcacctttctcctggacacgtacgaggtcgactgatacaaaccagtccttgttactgaggccttgaagagcggttttcaaaatcatacgatccgacacttgggaaacacagttcatgttctttgcagattttgtctgtataataaacatgagtttagttactacaaaaaaaaaagttaccaaactaaaaaaaaaagttagagattatatatgaagagtcacctttgaaagcagatacgttatcatcactgtaaaggagtagccccaaacgggtatcaatactagtcttcacaaagtaattaagtgtttttgatttcccaaaacaaaacaaaaggcttttcatattcctctaagaaagaaactcgcttataaatctcaaacagagagagtggagtttcatttcttcttaacttcatcaaaaccttattttgcagattctctcttttcatcgttttttcgtcttctctcttttggtttatgactgttatttattgaaagggtttgaccagctcataacttctttctctttgggccaaataagtgggcctcacgttatttgaagagtaaagagaagaagagttgggtctttggtaatagaagcccacaaggtaggttttcttctagggtttgtgccgtgagttttaccttctcttgagcttcttcttgtaatctctttgagagctttgtgtaaccctgatttctagtggaagtttgagggcaagagatccctcacgagacatacgcataaccactcggggaactcgttaaatcttggtgtcacaaaagcaaacacttagaacaaggttgaatttacccctgcgttacataacaacttaattacttgaatttaacgatgtgagagttttctaatgcctcctccccgtccgataaaggctgctcatcagaggaaagttcaagatgaatagtactgttcatcaaagctgccatctctgccttcttcaatctcaacatcgttttctattgtatatcaaatggattggtataatcaaatatttttctagtcttgaaagacaaagattgccattattaatctttaagttcaatttggattagctgctttaaatactttattgtgaaccgaccaagaagtcattgtaaacttatacaaagagagttcttgagaaaaggaagaaattatttttttaaaggagaagaatgctaagagatatttaatcgaagtaaggtttgcatttggttaagtctcggttcatggtgtttgtcaaacacgaattgcgggaaattgaacccataagtaacagattgaaaaagtaaagctttgtatataatcatctcttgactacaagatgttagaattcaaaaaatcttcagatacctcaagaacgatgatataaaatcaaagttagtaaacacattacatatgagatattgttgaattctcacctatctaacctctctttggttagatctcttgctctcttctctctcacacagattttgtcttctttgttctagagagacacaaaagcgttttcctccaaagactacattgttaattacttggatatattacacaacacaaagacacatacatatagtcatatactactttcattacttgacactattgcacacttgcacttagacctaatcataactcttacacattagaccatactcctagttctaggtactcttacacaagcctcctacttgtgtgtagccacactactcattgggactctaagacaatagttaacatcactagttccttagatactttacttggtttacaacaaaacacacttaacttgttcggcctttttacttgcaggcccaccacacaaaacacattcttcatttgggcccttaatccatctgcagcccatttacacttctcttctttgtcgttgacccttctcttcacgatatctcttctccgacatcgacatcgtcttcttcttacgatgcttcttctgttcttcacaaccaagctttacttcttgcaggatttaatctaggattctcaattccaacagatatatatctaatcatgtttgagcatggacacagcaaatccgaactaccattagtttggttttaaggctttggtgtaggagtcggtctacagagaatgggatgcctctttctgtctaaagtaaccatacacttggcttgatactccacaagaggtccatccggtttctccctcgccataaatgtaatgtatgactttgatctcggtcctgcgcgataataacctctcacaatttcaaccaactccacattcgattcctacaaccacaataagaaaggaatgataatgttaatgccaagtttgcgttgaatacttttcagcgttgaaaattcttaaacaatagccagaacacaacttctaagaagcctgtcaacctaaccattgctactgttaacacctaagagactgaatcctcaagctcagacaaaataccaatccagacctctctaacagctagaccttttagttagtattcttgattcagacttatgagctatacccatctacactagtatgcaggaaaaggagaaagaactaaccttgtcttggttgagtttttggagacaaacatagaccatgtcttcccagtatgcgcgaaagtctttatcagtaagcgcatattgggaagagatggtctctgttttatacctctgtaaacccattggttttatacctatgtaatgatcaaatggcttaagcgctggatccccgtaaaatccctaaccacacacacacgttgtacttaagaaatcaccatctatcaatccactaagtttcaaggatgtagataaaaaaatcaaagaagtaggacgtaccttgctctcgatcatctggcgtttaaagaggcaatagtgttgtacagcttcctcggagaaaggttcctcatcggaggaaaataacacctccagagatgaataatcctctaaaccatcgaagctatccacatcccattcaagcacctttaagtaatctattcctccaccctcacgctcctcgattttggctttcccttcttctctctcaccatcgctctcttcctcctcctcctccgggtcgaattcggccttacgctttgtcccgtaagatgataaccatggaagaagatccttccatggaattttctatcatcgtctcttctgcgcattgattgagaagcatcttgatcgagtaaaaccctagatcccctccgagccaattatcttaagattctcgtccacgatcgcgtaaacccttttaatttggtcaaacggttcgattcgggtcagaactaccaaattttgggttggagaaaactgttccgaattgaaccgaaataaagtcagggttcattttggtactgaataaaccgaactcttttgttaaatcaacaattttagacaaaagaccagttttggagtaatgggccattgatgcatcgttggcccagtaaaaatcctgacttttgatctgggaatttttctcaaaatttaattctgcttcaaatgggggaacatcatttacctcaactcgctctagggttcaattatttaggattttaatctgtttgaccccttttggttgaatcaatttttgaaaccccccccccccacttattctcactacccctccccttcccaacatatttgaaatacaaatttacccttttcctttgtccctttcaattttctatttagtttttgctaccaaacaaactattaaaatctaccaatcatattcattctctctcctttttcattaaccacctaaacctacaaaaacctataaaaacggtggacaactgaaaccaataggtacaagtatgttgacggacttctacgaagatatataattacataccgttttctttttattttttattttcaggttataatcaaaaagacttcagtcatacgcgttgcttataatagatactattaattttcttgtcttatttatacaaattaatattttttgtttggtcaactaagtacaactaaggtctattcactttgctagttttctgaattttataaaatatgaaaatttaaaaccaaattaagaaaacttaaataatgcatacacaaaatacacaacaactttttaacaaaaattcatatttttataagttaatgaaatttttatcacaaaattccacattcatacactaacaatcttatactttcatggttacttggtctatttgaactaaaaattttaaagtttcttaaatacttatatttttataaatataaatactccaatacattgtactgttattttgatgagacaataacgttccacccaaaaataataatttagagttgataacaactaaatttactaaattttcgaaattgtacaattatgagcaaaaatgtgcaaccgagtacaactttacaattatgagcaaatttctactattaattaattattatttttaaatgatggtgtcatacaagatatttctcagctttttgtagatatttttttttttttatatttttaataaagcacttagttttatgggtgatttgcagaaataaccaattttgaaaaagttattaaatttatagcatcataagtttggaaattaagtgagtaacataagtagtgtttgaaaatacaaaaaaacccttactacaaaaaaaacaatgaggcgtatgtgaggctatgagaagagaagagaggagagtggagagagaggagagaaagagagagagagagagagagagagagagagagagagagagagagagagagagaggagagaaaaaaaatcaaaccttaagataacgtataagaaacccaaacaacaaaagtttcagatttctcattttaaattatattgaattcaatgaacccttaatccaaatttaactgtggcaaagagaaacaaagttacaaatgtctttattacatatattatacagaatattgctttgtttgttaattattgattttttgttggttatacaatcaaatttccgtagttttataattataaaaaactttttcttttctttcaaaacactcttgattttaaaaaataaaagactaacattcattgtttttagtgattttttttaattaaaatacttatatgcattttaattttttttcaaaatttttgtcaaaaaatcttaaattcatacataaacctagatacatagttgtacatgaacgtaccagttgtacatttttttttcttttcttttttcttttatagcttagaagtcaagcgtaacaaatgtatttcattgaagaaacgtaccagttgtacataaacgactaaattcatacataaatctagatacataattgcacatgaatttactagttgtacataaacgactagattcatacataactttagaaaccaaaataccaatcgaacaatagtaattaaacacgtagacacaaaaaccttatataccaaatcatcaaagcattttctttttctgcttctcattcttatttcctttttccttctccttctccttctccttctccttctcattctctttctccttctccttctttttttcttctctttctcattctcaattcaatattaaacatttaaaagaaatctcaaattccatataaacatggatggttttgggaaactctcacaatctcactatctaaaccataaaccaaagagatcaaagcaatatttatatagagtttattttcaacaaagttcaaaaacttatcccatagaggataaattgaaaggaggattcccaaaattcaaatcgaaaaaacggcaaactaaaatccgaaaatctatttacaaatcaaaatcttcaaaacccaacccaatccatccgtaaatcaaactcaagagcaaagatgtgaaattgaaaaggaaaaagaaaaggaagaccaagactgtgaatctgaagtggaattagccaacggtagttatgaggacaatcaaaactcatgaaagggatctcttattctgtctaaaaaatctctataaatggtggagagaacaaggggaattgagaatctgattgtgaatatggattttaaaatttcaggttggaagaatggatgatcagtttgtgaagcgatgggatccattcaatgagaaagatagcgtgaagctacctggaaaaagaaagaaaaaaattaagaatttaggttttttcttttatttttggatttgggaataaaagatccaaactcatatggatttagatccaaagtgtggttgggtcgtaaatatatcaaataccctcagatttatttgtcttttaccaattatctgtattaaaataaataaataaaagtattattcttatatggggggataagtagagaatgtttgaagcttggggggcgaagaagatgaaaatccaattatttacaacttctattatttacagcttcttctcttcctcaatggcatatgaattctcagattctacttagtaagggttgaatttggatcttcaacagttgcagaagaagaagaacgaagaacaagaagaagaagaagaagacgtaagaaaaatataagcaaggactgacgaacaaaggagaagaaaactaacaatggaagaagaaggagaataataagaagaaggtaatttctcgttcaggtcgccgcttgtcgacactaaactgaaaaagtgagaaattcataaaattttagggtttagttaacatactagaggattattgtgaagtagctgaatcttttgttgtttatggtttcaatttcagggaaatttggttgatgatgaagatgaggaaggatatgggccacttataggtaaaaaagctcaaacagattaaacagcccaatcctctaaatgaacaaaaacgggagcacgaagcccgacaaaaaagggaacaagaccaagccgatcaaggacaaggccgacaatatcaagcccaaccagttcagcctcaaagcaaaataccggtaattttgtcaacaatctcttaaaaataccctaatatttcttaaactcaagaaccgaaatgacttggaatcgaatcgttgacctgaatacccaaacacccaagactcttatttttgattgacacgacatcttttcataccttaactcttctttttatatttgtgtagctctttggtgatggcggcctcattcttacagattggacaacttcacatctaatcgatgatcctatcgatcaatacaaaggtacttcttacactcttaatttgagttttaattatcataattacccgatactatatttttgttgttgtttctaattgtatttattgtttctttttgcagatacttgtagttccgttgtcttcacaagacttacacaggcatcttacaacaaagatagacatattgccccacgccaaaacatgtcatatcgagatttggtagagtaccttaaaggaaaatccaaaggacgaaagctttccttccaaaatttaaatgaaccgatcaagtacatccaaaatgttgggcttcttaaagatgtgagtgagttatattataaattcttttaattcctaatcatatatatgaaagaagactaactctctcccacaacttgacacatcagcacatgagagcttgcaacctagacttcataaaataagtaatacataattagtaattaattcaacataacaactaaaataggagaatataattaatgagaacttgaaccatcactctttctacatttttttaattcaatatatcctctttaattttaagatccacttaagtggctatagtgatgataaaatccaaacatgttacacatattcctggcctaaaaattagacgattattatgaaagaaactaaatgaatatgcagattaaatatatctaagctttttgagatttatgctaagaaaacaagtaatttgaaagatatttgaggaactatccttataactaatacgtaagatataactgattttgtttcgaaagagaaatagttgatatagtatattgatagaaaacttgccactctaattacttttgtaggtcatctatcatgtaccagctgttataactgaaaaatgtgatgcacatgttatgtttgtcgtagcaaaagacatgataaaggctccgaatggagaaagcggatcggacggagcagatcaagcggatcaagcagatcaagctgaacaaaagcggatcaagtagatattgcggtacaaatgcggttcaagcggttcgaacgcttcaaaatatattttgaatagtgacatcaataaaattttgcgtctatattaaaaaaaaactttatctcacattatttattgatttggacattatttaattttcttaatttgattttctttagttttgaactttatattttaaataaaataacttatatactataataaaaattaaataaaatctgtaatagctaccttattattcaacataaagttctttacatttatatgtacaaatatttatatgatatgttataattaaaattaattatttttaaaatataattataataataataaaatagaataacaagaacaaaactagtatttatataatttatattctagtaattacagataaaataccaaaaaaattaataccataagattttggttaatctctaatctagtagttagaaataaacatgtctattttaaatatcaagaaaagaaagaaataaaaaacataagacaaaagcagaacaaactaaaaacacagcataatagtggtatttttactgtaacatgcggatccgtgtattttcttcacaagattgaactgcttgtggatgtactgcacttgttattttaataataaaattttgcagatcaattctattatcttgaatggaagatacaattgcattagtcccgctctgctttatatttgtaactcctctgctctcccattcaaacccaaagagtggattgcattttttggtgacccaaaatccatggggaaccgaacaaggcttatggctattattggttatcactacaggacgatggcaagtttaaaatattttggccactctcatagtggaaaatatttttttttttaacagcactggtttttatttcattttcgtcaaatgattgcatggtgattaacacttttctttaaacaatcttttgaatggattctcttattgtaaatcacattttattgtgttaataataagttacttgtcattagccatcatttataaaagaagtaaatcaaagatattaactctgtaaaaaaaacaaagaaaaatgatattaactgtttttagaaactacactgttacagatttaagagaaacttatttctttaccactcaaatatgtaaaaatgaaccaaattttagaaaagaaaactcaaacgaaagcagtgcttttaaagcaccactattctttaatagaaaagaaaatcttcttaataaagtgcaggacacataaataaccaaacaaaaacagacgaaattattaagaacatcagttaaaactggtaatgcatccattaaatcattaagaaacactataatatgacttcataaaataatacctttccctaagtccaccatgctcttagtctttcacctagttcacaaaacaacaacaacaacaaaaaaaaaaaaaaaaaagtaagcgagcaacacctatataccaattcgttatggaatgctcaaccaagacattatgttgagatgggtcttttattctcatattgtgatatatttctagaaaactatggacatgacaaacactatatcatattacatagcttcgaagccaaaaggcacatatgatgtttctctaaacatgtttgagcctactagactgagaaaatcaaagattggttaagagaaacaccatacaataaaacagttatggctttggtgtaggagtcggcctacagaggatgggatgcctctttctgtgtaaagtgaccatacacttggcttgatactcaccaagaggtccatctggcttcttccttaccatgaatgtaatgtatgacttcgatttaggtcctccgcgataataacctctcacaacttcaaccaactccacattcaaatcctacaaccacaataagaaagcaataataatgttaaagccaagcttgcgttgaatagttgaaaatttccaaaccattacttcaaagttcaaagaagcttgtaaatcctgtcaacctaaccattgctactgttaacacccgagattgaatcctcaagctcagataaaattccaatcgagacctctcttagagccagacctttagttttttagagaataaattagattttcgttttcgtgattcagtctaagctactaaactagaatggaaggtgcgtgatagattaaacaaacccacaaaaagaaaagggtaaaagagagagaacaaaccttgtcttggttaagtttttggagacaacatagaccatctcttccctgtactcgcgaaagttttttatacccctaatcgcttcccactccaaattcattggtctaaatcctttgtaatgatcagttggcttaagcgctggatccgcgtaaaatatccattaatccacaacaatttcaagaaatttagctcaaaattcaaaggattaggacataccttactctcgatgatctggcgtttatagctgcaatattgttctatttgttcttcggtgtaagattcatcggaggataatatattaatatcggctccagagatgaataatactctaaaccatcgaaactgtccacatcccattctggcaccttaaagtaataatctgttttagccttaggctcctcaattttggctttcccatcactgccttcttctttctcaccattgctttcttcctcatcctccgggtcgaactcggctttacgctttttcaggcacgaactaaccaccactgaagaagatgcttccatggaatcttttatcatcgttttctctgcgcattgattgagaagcatgttgatcgactaaaccctaaaactctctctgatccgaacaaattgggaaattgaaatcggaagattctctggaaataacgatggtatttaaattagattttaaatcacctagttaccttttgcccaggaaacgtgtgtgatattaacccaagtgccctcctaatttcattttcttttcgggacattttgaaaaataactcagatttctgttgaattttgcttctttttgtaaataatcaaaataacatgtaaaagatataatatgagataaaaattaaagtttaaaaaacattaccataactaataatttgagtaatttagaaaaaaaaaaattaccacaactattcttgatataatatgagtaaaaaacttcgaaacgagaagattgaaaatttaaattttatttttcgaattctagctaattggttctatttttttggggatatttaaaggtctatttgagacaattattcatatatttaaataatattaaaaatggaaaattttgggacatacgtaacgacatacttgttacattaagttaaacatattaaaaacaagattattatttgacagaaaaaacgggtattgtatatgacaaaaactcggatgaatacgagataagatagtttctgttctttaccggacatacctaatctttttgtttgataattttcaaaaccaacgcacagaagaacataccttcgagtcttctatattggtcaagtcttgggaatcaaacaaacgcaaaacagagttggattacataccttgctcttaacgatatatagtttatagatatgatagtatttattagctttttccatgtcgggataagactgttcatcgaaggaaagttacgaatttgaagatgtataatactccaaaccttcgaagctatgcacatcccattcaggcgccattaacatatcaaaattagcctcatgcacgtttgttttggtttcttcgtcgtcactggtatcttcgctctcatcagcttccacagattcgatttcttccatcaacttgctcaacttttcttctatcatcgtcacgtttgcacactgattgaggaccatgatgatcgactaaaccctaatcctctatctgaaatcccaaaatcctaagatgtaattctctagaccgagcgatggtatttaaattaccttattatcctagaaacatgtgaaatttaacataattgtcatccaatttggtctttcaaaaaaaaattcttttttttgctcagttaaaaaaaaaagttcaacaatatatgttccaaagacaaaaagattcacgcattttcatgattttagagttcttagaattttttgttataaaaggtttgcagacattaatttttttccccaaattagagtttttagttgaggtattagaattctttttatcaagaaaggtacttataaaaataagtatcagtgtgtgaaatccactacttcaatgttggaatgttacaccttcctcaagaaggaatttgagtaagaaagaagttgtgtaacccattattatatgatcttatcttcgcaaaacatgcctcttcaactagttgatgtagttttaagctactaaaataataaccgggtaacttaaatagtgaaaactgataacaaacttaataggatatgtaaatcacttggttattggtccatgtgttgaaattgtgtggcaatgaacccacaaacggataacaaatcatgattttcaatatctcaaatgagaagttgtgggacgatccattctagatactaaatgctgtcatcaagaaaaattatctaaccacaaacaaaaaaaattgagccaatgcatcatgaacttcttcattctactactaacaattgattttctaaattaactttacatttacattcgggagtgactcaagataatctagatcaaaattccctaaataatctaaaaatcaagaaccttaatatgagtcaaaatctcttctaataagcagaaaataagctaaaacagcacaaaaagcagcaacaacattgccttctttcaaaagaaccttaaacacaaatccgacaacttctctcgtaatcttccttccttcaaccactaaaactcttcttgatttcccaaagaaggcaagcaacaccaccaccgatatccaaatcaccatcaccgccggaaccgccaccgtcatagcagccaccatcgacatagctccaaacatcgcaccgagcaccaccgacgcgtataccgccggtaatcttgaaggagaataatctgaatttgatgacgtgtattgaagcttgtaccagttaagaactgatctcaggaggttccatgaagaagatacgagaattgcgtagacagcgatgaagagacaaacccatgtccgtcttttactcatgattgtgatgaagatatgatacgatcttggagattctgtttgatctgccattagagattggaagttcttgcttatcgatcgaatctgttttgagatttgtctgcgactgagcaaaataaaatagagcagtttatgagaatccttacactcagtcgtagcgcgtgtcgtgtacgcttctttgtgaatttgtttttgagctggcaatcgcgtggttatggttcacacgcgctttaatatatttttttttgtgaaatatgaaaaacatttggtcgaatttgtgagataatgaaatggtaattggaaagattgtgactgcattgtttttaataattaagtaaatttaaattctgtggaagtatatttaatcaataaactggaaaaacaaaagaaaagatttcgttaccataacgatttaaatttaagattttgttatacagaaaaagaaatgtagaagatttttttctaatttagaggagtcaaacaatgatatataacaaaaaaaatcacaatccggtggatttgtggggtaagtcattaatcttttactattttgtttggaaaaattagtagtcaatatcattatgactacatatatcagtgtcaaagactcaaagtaatggcttagatattttatgttaataaaaggaatatatatactgtgaaaaagacaagtttgtgtaagggatcgcatataatctcaactaatacaataaacaaagatatagccgttggcattaatcagctttggctagaccaaccagaagatcagaatcttgagaagatggagaagaatcaatctgatgatgatggaacggctctgatctttcttggaacaggctgctccggtgcagttcccgatttcagatgcttactccagccgtcagatcctccttgccatgtctgttctcagtccctctctttacttcctcaccttaaccctaactacaggtaaatcttgtcatcagtttcttctctttgggttttggtctttgaagctgtggagatttgtgaaatgtcaaatcttgttgctttccgtaaagacccttttgaagttgggagttttgattgaaaaaagagacatctactgttgtctatattcgtgttggagtttaggttttaatccattttaggtaaaaatgaaccatccgatttctagtgttcttgggaaattatttcagatatattagggtttggtgaacattcttgaatcttgattctctgttttttggcagatgcaatacatcgctcttgattgattattgcagcaaggaagaagatggtagacataagtacatacttattgatgttggcaagagttttagagagcaagtccttcgttggtttaccttttataagattcctcgagtcgattccgttaagccctttatatacttatcttcttgatctcttgcatctatttttttctctgaaatgaaatctaacttttactgactaatgcttgtatgattttgtgtagatcattctaactcatgagcacgcagatgcggttcatggcttagatgaaattcgatctcttcaacctcgtggtgcaactattgttgataccgatccacttcccgtctttctatctcaatttacaatggagaggtaccatcttcgattagtgttctctatctcaactctggcttaaagcttttcaaattagcatttgatgagacttttaaggcaacaaaaaattgtgcagtattgctacaaggtttccttatttggttgaaaagaaggtaaaagaagtacctagacgagtttcacttcttgactggaaaaacatcgaagagaattgtgacgaaccattcgctgcctcgggcttatctttcacgcctcttccggttaaatttcttttcacttttgagaaatcaaaacagtctaattcttccatgagaccttatagactcaacaatgttagttatgctttaggtgatgcatggagaggactacattgctttaggtttcctcttcggcgataaaagtaaagtggcttatatatcagacgtatcacggattccaccgagtaccgagtatggtaagagctcattatgttatgccctaatcattatacctctgtagttcacttctactaaagagaaagattgatattcttatgaatctttgattaagcagctatttccaaagctggggctggacagttagatcttcttatcctggatacaaatataccgtggaaggttcacatcatctcataacttttgtttaccgctttttcgatcttgataacctttcttgctgaccatctctttgataatagagaggaccacatcccacacacatctgttttacagaggtttgtttcaatggttctcttttttttcttcccaaagaatgcttcacttctctaaacctttttgagagtaagtttcaatattcctattctttaggctcttgagatcttaaagaggctatgtccaaagagagcgcttttaacgggtatgacacacgagtttgatcaccatgaatacaatgagatacttgcagaatggtctctaaggtatgcaatgaaacaatgttataagatttctataaatcaacatcgttgaatgctaatagagactatgttgatttctagggaaggaatccatgtacagcttgctcatgacggattacggcttccaatagacctatgagcaaattactaaagacaaatcttagaattcttgttacctatcaagaatacaaatgacaaaaatttccaaaattatatgagtagaatctatattttgatacagtaatgaaaatctctgtttctttacttgttctgggaatgattcaaaatctttaaaccaagcccttgaaacaacttctctaaatttgaaatctcattctcaatattcacttcatcttctcttgtgatcttttcatgcaacttggttagtctctgagtcccaacattcactccttctgcataatctctaagcgctcgtctcattgatccattttcgtcttgaacatctttgtatttccttttcagagatcggtatccgtcaatagatttgagtagctgttcagacaactctttgtttcttccctgtagaggcacattgttgtctcctggacctggaccatcaatatcttctttcttctccttattatgctctaccgcgcaattctgcactttcttaagtaatttctcattttgagccctaaaatcacttacaagctcctccatttcgtttaattcgtgagctttcctcgaaagctccaaagccattatctctttctccttccctaaacttgaacacatcatttgaagactctttcttgcagccatactcgcgcttaactcttttctcagtttctgaatatcttcaggatcgttctgtggtggctttgttggactcttggttagatcaggactccgtttcagatcggtgtagcatcgtctaagctcttttttcccagatgatgattgttgttgagctttctggattcgtgtctttagatcatcgagaatcgtcatcatagtgttgactctctgaactttccaatcatcgtggtgcctcgatgttgcttcgttgtgatcttgaacgagtttcagcagtagcttcacgttcgtagtgattccttaaaacagaaacaagaacacgtttaacatatttcttgccatgcaagtcacaagttgttttcttgcccaaaacggaaaatgaaacatgtcttaaatcgatctttatgagatgaatgtgattgatctaccttccaaaccagaatcttcatgagattggtgctctatggttcttgttggtgatgatgtaatagatccagaatctgaagggactaaatccggcgcagaaaatgctcggagacggctcatgttttccggttcagaaacgccgcctggagagaatcaatcagacaaaaaaatgatcaacagaggaagatgttggaaatttggacaaataacagataaaggttgttgtatttttgcaacttccatgttttgtgaggcgtaattagtggacagattatgcctttttcaactaaatttgcctgtcttacctcatttcacgctctaactttttttcctattaaaaattaacattgaatgttaaccatgtaaatgtgtgagataaaaacataatgggccttcggcccaatatatcactagaacatttgttttgttatactatgaggactaaattgtaaatttgtggagaagccgaaaggtccgaaactttactacacttcttctcatttaacttgacttgacgtttgaggtactcagaaaatggattcttcctcctcttcgcctatgaagtacgaggacaaaccgagaaactgggcggagcttctgccggaactaacggcgtccatcctccaccgtcttggcgtggttgagatacttgaaaacgctcagaaagtgtgcagaccatggcatcgcgtctgcaaagacccttcaatgtggcggaaaatcgatatgtgaatcccgaagagcctcaaaatcattgagtacgacatcattatgaacaatgaagattttaacgccgatgaactcctcactttcgtcgcctataggttatgttttgtacttctgtctctctagactccatatataactcgcaaatactcttttgaattttgttttgagaagttgtgttgttttaatcccacttgcttgtaacagtgtgctgattctaggtctgaattaaatttgttgtccttctcctttatgtcttagaccatgttttttgtaaactatttttcagatcaagtattctgaaacgccttggacgtatgatgtgtcatgccgttgctctcagccaaggcggctgtgtagagataaacattgaacattttggcactgattctctcctcacctacattgctgataggttctctctctacccctatcccacatgcacacaaatatttatcgttctaacgaagtttataaagttgtacgtctacataagtgggattgattttatatctaaaacggttatgctaatttctaggtctaattctagtcaggattgaagaacaaaatatctcagttggtttagtggtaaaggatatgtttgttccttagtgccttttccttatgaggattaggagaattattttggttaattcgtatttgacatcaacgtatattgagtatggacatactgtatataggttccacccgtctctcttcttatactcgcaagcattagcacacaggttttgagttcatcgctactagtacagtttcataatgatattatatttgtatcttgaattgttcttctatctcttgatttttgtttgttaactatacttgcagatcaagtaatttgagacaccttggacttgctaagtgcgatcaaataacgggcatgggactgttcacagaagccatgaaacttccattgcttgaagacctcgagctttcatactgcttaatcaaaggaaagaatttggaagctataggcttcgcttgcctgcatttgaagacattgaagctaaactgtcaaggtttcaagttccccggctttacgtatgatcatgatgccctaggcattgctaaaagaatgcccgaactgcgatgtctccagctttttgggaacagagtatcagacgtagggttgaacgcgattttcgacggttgtcctcacctggaacacctcgatttacgtcagtgtttcaacattaatcttgtaggggatctggagaagcgttgtatggagaggatcaaagatttgagacgccccaacgattcaactgctgattacccatatgatacaagtttgctcgatctaggcatttgaaatcgttttgaagtctgtttagctggtcttgactacatcaaacaattttaattatgggattaggctcgagacggctcattttattaagcccaagaacgatggaaatatatatatatatatatatatatatattttttttggttagcatttgaaagaactaatctattttaaatagtttttaacatcgaatggtaacaatgtattaatttcggaaaagacattatatgcataaatgtgtaataagcaaagaaagaaataaaataaattgctgtcacaagaaatttcttatcaacttttacacgaattatatcatacataaaactatttcatcatgtcaaattatacacaagtcactatcccgtcagtcgtgtcataacaaggagagtaaaaaaaatatgttgttaacattaacttttagaaaaattaaatgaataattggtttaaattctaagaaccagcttttatataatagccaaaaaactagattttagcattaattcttaacatttttctattttcttctttttgaagatgtccctggaatccatgataatccgaaaaaattgatctgaatccgtatccgaaaatttagatttattctattaggtcttaaactcataaatttgaatccgaatcaaaacctgaacctgaacccaaatccgaatgttttattcgaaaactcaaaattttcgcagaaatttatctcttttaacaaacccgaatatttacccaaaaataagatggttatagaaattctcatacgtatattgttttatttagtcaaattatgtatcaataaataaataaaatatgttagacactagaactcgacttcgtgatcaacgtacgcatcaataattgaaatatgatttggtcgagtatatatgaaatttttttggcagaaatcaatagtttaactaaccgttttcgtttatgtttacatcatgtttgtttaaatttttatgtcatgtctgtttcaaattttataagttgtaataattattaagatatttaaaattaaaatatttttattttaaaaagtccaagttaagaaccttttattacagtcaaaattttaatcttttaacaaaattcttaacgtcaaaattttcacaatcaattataaaaatattcctaataataatgctcttaagagcactactatcgaaggacgtctcaatttgtattggtttggagtaatccggcgtggctacacagacgaattgtagaagaagcttcactaagagcatttccattgcataaccttttattgatgtctttaagactaaccatagtaaaaatagattaaccatgattaaaactaaagacatttgcttttttgggtgtctaaaatgtcttagggaagacatatttgacatcaaaaaaggtgaatgtctttaattttaactatggttagtctttaaaacacacactagaagttatgcaatagggatggtctaagttctttgctaggttactttaattcttggatttttgaacattgctctgtttttttttttagtcaaacaacattgctctgtttccgaaacaatccgctatgatattggcctaatgtattgtatgatcctaggcccaatgcttattgggccagtaagcaattggcacaaattgtattcgtagattttttagtgcgatgaggactagatagtaaacttgtgatctcaacaattttccgattcccacagaaatggcttccttctcctcttcgtcgcagtacgatcctctgccgttgaaagacggagagtccagaaactgggcggagcttccgccggaactaacatcttcgattcttctccatctcagcacgattgagatactgagaaacgctcaaattgtatgcagatcgtggcgacgcgtctgcaaagacccatccatgtggcgcaaaatcgacatgagaaacaacggaatctttggttacgactacgacagtccgtcacgccgttgatctcagcgaaggtggtttagtcgaaatcaacatggtacacttcggcaacgattctctctactcctacatcgcccaaaggtttgtttctattcttagaatttttggttggtttcagtaaactttctagggtttagatcagattattaacaggattggagaaggaattgggcgaattagggcaaaatttaacaaagcttgtggtttttattaactggatatgttgccttgggattgtgtgaaggccttgcaagttagaggtcatgttgttgaatctgtggttttgataaagcagtgttctctaagatttaagatgaatatggttatgtggtatgtatatatgcttctgagttgataagtattgatattttatcacaattttctttttttcagatcaagtaatctgagatgccttaggcttgcaatgtgctatccactaactggcaatggatttgtcagtgcagtcatgaagctctcattccttgaggaactcgatatttcacagggctatacacaactggatttgaaagctataggccactcttgcccactactgaagacattcaagctaaaccgtccttctttcagccggttcgttaaatatgatgcataagggttccctttttctagacatttcaagtagaaagagaaatgaacagagttggaggaagacatgtagatgaagtgtggacttttgtctagacgcactcgggttagcgtttcgtcagacaaaactgctaatttcccatcgtgcccaactttaatccaatttttcaaatcgtctattctttgttctgaaacgtagctaactattagagcaagtattggctctagaatatataacctgcaattcttcatattttgctaaaagggacgatgataagttagaggaatgataaatatttggaacaattcaaggaaacttatttgtttaggtgcgaactgaaacatgtctgcagagtgtccacgatttggtatgacaatgatggcacgggaatgtggatggatgcttgactgagtaggaagattaggatcgacgttgatagggggctgttttatgtaaaggtttgtattgagcaaaacggtttacaaaagtgagtaataaaatggaagtttcaataaataattaatattccggagcgatcaagcttagtggggagaatgggtgtagttataaaaccatttcctgaaaatgttggagacgaggtaacggccgatgaacttgtttatatatttgtgccaaaaaatagtcaactaccacttgatttaataacgtaacatatgaaaacatagattcttaaatgaataacatatgaaaacatagattcttaagtggtccgcaaatgtgaagaacattaagaagaacaaaaatgaataaaaacatagattcttaagtttcttcgcaaatgtgaagaacaataagaagaacagaaatgaaatcagtacttatgaaacacatatgatgacatagaccaacgatactcattgaggttctgatggtccgaccaacactcaccgtaatcctcaaactcccaggaatttttgtatgttccttgatgacgtggaccaacctcgttaatatggaacattagcttatctccgaataagtcgacttcactaaatttatagcacattcgcttgtactcagtataaaattcccacggaattgatccatcgcaactatggagcatgatgtaaagtagaccagcatgtgaaaaaacatcttttatgccatccaaaatatcaatcacttcctggagctcacacatatgaaataccaacactaaactctaaagatatagggcatagggatttttgaaggcgaggcatttggtgtaaaacatgtggtaactagaaaattcttgagccatatgaatgaaaacaggggacttatctagtcgaacagaagaaagagtttcccttgaaaaaacagcggctttgcttcctccgttccctgattttcagatgcctgacacgtagctgctaatatactaatcttagtttttgaggacggtgtagatatgttaaaggcttggattcaatcatgactaaaacattacctgtatgtgaaattaaccaaatgttgatgacgaggctggacggcaaattgatttcccctaatatggtcaaggcacttggtggtcgccagtaatgtctagtaggggccatttatcgaagatgggtacatttgcctttctcgcagataattttgggcattctgtattatcaactcgaatagtactgaaagtggtgtaaaagtagcaatataaataagaaatttgaagtaaaccagaaaactaggatcgaacctcgcaaatgggaacagacttgagatagtgatagaatgggaaccctaatactctggaacactaaagaggggtggggagatgggttactggcggcatatgtggtgggccatacaaaataaaaaaaattagacatggcaataagtatatgtaaatcatgtgtgtccaaattatcatatccaaagttatatatctgcatggtatataccatatagacttctagaacatgtattgttacaagcaattcatgtggaactcatttattggggattcggttctagaattttgtttttgctttggtaaacatgtgaagagactaggttatacatacatagactgaactcattaaacaccaacaacaatgttagattgataagacttaggaaatataaaaatgtagatggaatagcaaacaagaatttcacataacaaagacagaacagtagacgcagaaatgcaaaagatacaagttttagaaaatataaacatgtagatggacagataatgatggacaacacattacgaacaccttttctttcaatatttgggacgattggttcctttgtgtgctcgggatttgcaacaagagcaacgtggactactctctcgcggacgtggctgagcccagtaagccccatcgatttgtacccatcctctttcttctccataagtctccatccataaactagctccatccatgtggattgttggccttaagacactttgtaaagaaatgataatagatggagtgcgacattgaccaccacataaaataccgagatctgtccaggcagacacaactaattgaattgtttttgacaaaaaaaaaagtttgcagttttactagaggttataatcgtgtcgatgggaaattttaccgctataaaacagtttttcaattttccggagggaactcaattcagaaacggggtaatgtgatctactatattatttgagacgtacacttaatgaggtgggcatgaagttttcaggaataacaagtttgccattgggttaaaattttatgtcatgaaaaacccgtttagaaacgcgcagatccttttgacccggattttaaaataatgggtaataacttctaatcttggccattcaattgaattgtttttagccgttcggtttcgtagtttcacttaaaaaaacacgcagattattttacccggttttaagaattcgggtactcgcgtttaatcttggccattgaattgaattgtttttagcattttgatttcatatttcacataaaaacacgcggttctttttatcccgtttaaaaaaatcggattctcgcgtgtaatcctggccattgaatagatttattactagccatacgattttttagtttcacgcaaaaaatcttccgactatatttcaggcaacgaatcgcattaatttcatttaattcattgcgtatatttgtttccagctttcaaatatatcacttctccataattatacatctaatatttcgtttggatcttcatttagaattatcataaattttccacaagtattccatatatatacataaccacttttacggtaaatgctaaacattttcctataattatgggatttgtgatatggaataaacttgaattccacgaataatatcttctgcgcatatgtttttgacctaagcatttattcttataaatatcagacgcctcatgtcaatctactcactcatcttcacctcatacattcatttctaaaatctctcaagccttacaagaacgcttggcgtattcaggttaaattgcttcatgtttggaggcaatattttgtaaaggctggtgaatccatcgaaatgattttggttgatgaagtcgtacgtattatatttttaacattatattttgtccagccttatagtgtgggcaagcatcattttcacttattaatgtagatttttaattcatatagggtgataagatgagtgctgctgtgagaagagagcagatcaagaagtttaaaaggtgcttaactgagggtgtttggaaaatcattacgaccgtcactctaaatcctacaagtggccagtatcctatttctgacttgaaatacaagattggttttgttttcaaaaccacggtctctccatgtgatagcgtctctgatgctttgtttctctcccttgctaaatttgacgtgatcctctccggatccgctaacccaaatatcttgcacggttagattaaagtttacattttaattttgaacatacatgccttatctcttccatagtcaatattttcataggttgttgatcgctctgaaatccaagatcttaacgctaacaacaagcccaccaaaaaaatcgatttccatttgagagatcagcagtaccaacaatctatattcatattccttcttaattaaatatttcctatttagttactatttactaataaatttcttctttccatttaagtgacactcgcttggcatgtacactttggcgaaagtatgctgagatcgttgaccaagcttgccagaagtcaaccgatggtattgttgtttgcttaatccgatatgcgaagatcaatctctacaacggtaattatattgatatgtactactacatatatatatatatattttttaaaacatgtccttttatttatacgcagataataggagtgtttctaattcttttgatgtttcacaagtcttcgttgattccacattggctgagttgagtctttttaaggaaaggtaactgtatttctatttcactaaatatatttgcttctttataatattaagcgaagtaaattaccaaccgatgggttaaatttgggaagttcgggatcatcccacaagagactctatgctccaagaactggggatgacgatggagattatccaaggcaaacaatcaaagaagtccttacagttactgatgtactatttatgaatttattttatctactaacctttctattattttttatttattttattttaaacttagtttgtgaaatcctcattatattcatttgaaggtggataagtgcaaaatagtttgtactgtttcggacattgatacggatttgtggtactatttttgttatcgtgctcacaacaagaaggttgtcaaagaggaagttatcaaacttgaacatgtcaagacacctcaaaagccatgattttggtgtggcatatgcaatggttttgcaaaaactgttcttgaaaagtgagtctttatgaaagctttatattgaatgtattttgaataataattcggtgtttaaaagataataatcctatttatattttaggttttggttacatctccatattatggaccaaaccggcgaagctagatgcatgttatttgatagtcatgtaaatgatattcttggcaccactgtccctgaattgcttaatggtttatttgatgaggtatattgccttttaaaaaataaactctttgattaaaatgactacgttcatgttacaataatctatatttttctgtagatcgaagacccaactgatttgcctgatgtgatcaatggtttgaaagggaagcttttccagtttctattatgtatgcaaagggaaaacatatttggtggatatgattcatttactgttgccatattctacaccggtaacattgatgatgatatcgtatttgaagactcggatgcatacgttgatccatcatccatagtttccatcgatcaggtttgtctcataacattaaacaattccaatcatttatatttatattttatggttgtcttattaaaatatgttttgtattttcatatagggttcccttatgctcactaatagagtagatctttctgatgtggatttgttgtaacgcccgtgaaccggaaaatcggttagggtttgtttttaaatcatccggtttaattggttggcttaattggaaaccctagagtgtgcctataaaagaaggaaactcgaaattagggctttagttagccacttttcattttgtaaaggagaaaaagagagaaaagaagaaggagcagaatcgttagggtttgagagaaatcagtttcgtcatatcaaattgtggtaaaaggtaacgaaatttggtagagttattcccaagtcctttatcgttattctccagttaacaaattggatttggattaaaattggttgagttattcgcagtttcgtgagacacgttttctcagacgcgaattaggaccagcggagattgaaactgagatcgtggtcttgtctgttttccgatcggcacgagattttgtgggcagctttgtgacgtctgcagctaggatttcaccggagagattgaatagttaacggttagcttgtattttagggtttcgtatttgagactgcttgtttctggtttttcctgtccagtttgcttcaaggttgcttttggttgtggacttgttgtaggacgtttctggactgtttcagacgcaaggagagtctctcctgggtttaattgctattagaatcaatttgttaaggtgagtgcgtgaccatgagcttatctgagcgattgggttgtgtgatttgttttgtgtgatgatatgtaggtgtggagaatgtgttttgggtgaattgttcaatgactggtttgtttgtattgtattcgtgattatacctttgtatatgcttgtgtgtatagctcgtagatgggaggatcgcctcactaagtatttatgataatacttacgcatctcattgtgttgttgatgcaggtaaagataaagtgtgatcgtggaatcatggcaaggaagagaggatgatctaggaactcgtttgttttattttggtgtttttggttattggaacccggttaggattgttagttattcttggttttgttggtcaaattatttatttattcataaaatagtatttttgacttgcggtttaattgttattttattggttggtttaattagatatttatgggaatatttaattatattttttttaaaaatgggtcgggttgtttcaatttggtatcagagctattacggttctaggatgtgtagaaaaattaattgatgaattattttcctgatgattaatgtgggatgagctagggtgttagcatattgaggattgattatggagtgtttagtcaattgtgtgttgttggagtcctagcatcatcttctccgagcctgaaatgagattccacggtaagttgtttgtgatatattcgtttgttttagtttcttagccatttgttcttgagtagcgcagatggttagaggagctggagttcgtggtcgtggtcgtggtcgtggtcgcggtaggggacgagtcctcaagggtaccggcgagagtgatggccacagtgccacagttgagcagagtgtgggttcgcagcctgagtttgtggagcccggggttaggaacggtcttggtgccgatatagctggtgcagccggagtgggggctggtggagctggtgtcggtaccggtgtgcatgccgttggtgctgagggcccaggagtgatgggtgccgcagccggaggagcccaggttccagaggttggtttcgcgggcctgttcaggcagttgttggagcggttaccaggtgtggtaccagtgcaggctccagttgcgccacgagtggtggaggtgcagcagagggctgcggttgctgaggaggttccatcttatttgaggatgatgaaacagttgcagaggattggcaccgagtatttttctggtggtactagtcctgaggaggccgacagttggaggtcgcaggttgagcggaacttcggttcgagcagatgtccggcggagtatcgggtggatctaacagtgcattttctagagggggatgcacatttgtggtggcggagtgtgactgccaggaggaggcaggcggatatgtcttgggcagatttcatggctgagtttaatgccaagtactttccgcgggaggcgctcgatcgtatggaggcgcgttttcttgagctgacacagggtgtgcggtcggttcgggagtatgaccggaagtttaatcgactcttggtgtatgcgggtcggggcatggaggatgaccaggcccagatgaggaggttcttgaggggacttcgaccgaatttgagggtgcggtgtagagtgtcgcagtacgccacgaaggcggcactggtggagacggctgctgaggtagaggaggaccttcagaggcaggtggtgggagtgagtccagcggtacaaccgaagaagactcagcagcaggtggcacctagcaagggcggcaagcctgcgcaggggcagaagaggaagtgggatcatccttccagagctggacagggtggtcatgcatgatgtttttcttgtgggagccttgaccacaaggtggcggattgcacgcagcgagctgagacgaggaagtgctaccactgtagggagaggggacatctcaggcagaattgtcctaagctgcagcggatggcagtgacagtggtacagccggcggtgcagcacggagcgcaggtgcagcagggagtgcagcagttagcacatattgcagcagcaccgcagggttacattacgcgtgagataggcggtaccagcaacagagcgattactggtatgatttctgagactcaaactttgtgaattgtttatgttgtgttggatatcattgttttgtgatgaatgttagggttcttagcacatgaggtttgtgtagggaccttattagtgggcggtgtagaggcccatgtgttgtttgactctggagcattgcattgcttcattacccccggagagtgcctcgcgcggcaacatccgtggggatcctggtgagcaacttggagccgtcaaggttgctggaggacagtttctagcggttctggggggagcgaagggtgtagatattcagattgcaggggagtcattgccagcagatttgattatcagccatgtagagttgtatgatgttattctgggaatggattggttggatcattacagagtacatcttgactgccaccgtgggagagtttcttttgagcggccagagggaaggttggtttatcagggagtgagacctacctcagggagtctcgtcatctcagcagtgcaggcagagaaaatgatcgagaagggctgcgaggcttacctggtgacgatatctatgccggagtctgtgggcaggtagcagtgagcgacattcgggttgttcaggagtttcagtatgtgtttcaatcgttgcagggattaccaccatcacggtctgatcctttcacgattgagttggaaccaaagacagcgccattgtctaaggcaccctacaggatggctccagcaaagatggcagagctaaagaagcagctagaggatttattgggtaagagattcattcgtcctagtacttcaccttggggagcgccggtgttatttgtgaagaagaaggacgggagtttccgcttatgtattgactaccggggttgaaccgggtcactgtgaagaacaagtaccctttgccaaggattgatgagttgttggatcagttgaggggtgctacttgtttctccaaaatcgatttgacgtcgggttatcatcagatcccgatagcggaggcagatgttcgcaagactgctttcaggacgagatatggacattttgagttcgtggtgatgcctttcgggttgactaatgcacctgcagcgttcatgaggttgatgaacagcgtgttccaggagtttttggatgagtttgtgatcatctttattgatgacattctggtgtattctaagagtcctgaggagcatgaggtacatctaaggagagtgatggagaagctacgggagcagaagttgttcgctaagttgagtaagtgcagtttctggcagagagagatgggttttctgggtcacattgtttctgcagagggagtttcagtggatccagagaaaattgaggctatcagagattggcctagaccgacgaatgccactgagatcaggagttttcttgggttggcagggtattacaggaggttcatcaaggggtttgcgagtatggcacagccgatgactaagctgacggggaaggatgttccttttgtgtggtcaccggagtgcgaggagggtttcgtgagcctgaaggagatgttgacgagtacaccagtgttagcattgccagagcatggagagccttacatggtgtatactgatgcctcgggagttggtttgggttgtgctctaatgcagcgtgggaaggttattgcctatgcatcacggcagttgaggaagcatgagggcaactatcctactcacgatttggagatggctgcagtaatctttgccttgaaaatttggaggtcttatctttatggcgggaaagtgcaggtgttcacggatcataagagtttgaagtatattttcactcagccagagctgaacctgaggcagaggcgatggatggagttggtggctgattatgatctagagatagcttaccacttggtaaggctaatgtggttgcagacgcgttgagccgtaagcgcgtgggcgcggctccagggcagagtgttgaggccttggtgagtgagattggtgctttgcagttgtgtgctgtggcacgagagccattgggattggaagctgtggatcgagcagatcttctgactagagttcggttggctcaggagaaggatgaggggttgattgcggcttttaaggcagagggctctgagtatcagtttgcagctaatgggactatccttgtgcatgggcgagtttgtgtgcctaaggatgaggagttgcgacgggagatcttgagtgaggctcatgcgagcatgttttccattcatccaggagcgactaagatgtaccgagacctcaagcggtactatcactgggtcagaatgaagagggatgtagctaattgggttgcagagtgcaaagtttgccagttagttaaggctaagcatcaggtgccaggtgacctgttgcagagtttacccattcctgagtggaagtgggatttcatcacgatggattttgtggttgggttgcctgtgtcgcgaaccaaagatgctatttgggtgatcgtggaccgtctgactaagtcagcacattttcaagccatcagaaaaaccgatggagcggcggtgtttgctaagaaatatgtgagcgagatcgtgaagttgcatggagtacctgtgagtattgtgtcagacagggattccaagtttacttctgcattttggagagcctttcaggcagagatgggtactaaggtacagatgagcacgacttatcatccacagacagatgggcaatctgagaggactatttagacgcttgaggatatgttgcggatgtgtgtcttggattggggaggtcattgggcggatcacttgagtctggtagagtttgcttataacaatagctatcaggcgagtattgggatggctccttttgaagcgttgtatgggaggccatgcaggacaccgttatgctggacccaagtgggggagaggagcatatatggtgcagattatgttcaggagaccacggagaggatccgggttgttaagctgaacatgaaggaagctcaggatcgacagcggagttatgctgacaagaggaggagagagcttgagtttgaggttggggacaaagtgtatcttaagatggccatgttgcgaggtccggacaggtctatctcagagactaagttgagtctgaggtacatgggtccgttcaggattgttgagagggtgggaccagtggcatacaggttagagttgcctgatgttatgcgtgcgtttcacaaggtctttcatgtgtcgatgctgaggaagtgtcttcacaaggatgataaagtgtgatcgtgaaatcatggcaaggaagagaggatgatctaggaactcgtttgttttattttggtgtttttggttattggaacccggttaggattgttagttattcttggttttgttggtcgaattatttatttattcataaaatagtatttttgacttgcggtttaattgttattttattggttggtttaattagatatttatgggaatatttaattatatttataaaaaaaaatgggtcgggttgtttcatttgtcatcaacctctactccatcatcaaaacgaaaagattcagatgatgttgttggaaatgatcaggcttccacaagtaagaagaagtgttctaagatgaccatgtctgaggaagactccggcgaatgatgcttaatgactactccatcttggatcgttttcttcattaatatttctttgctttaagttatcgaagttgttttcattttttaagttctaaactatctttattttatttgttgttttggaattaaaaaaatttctttcatttatgtcgatttgttaaacaattttattaacttagttatatttatgattaagaaacacattcttttatattacaatgtcaatcttactgagaatataaacatttttgctcattatgaccaaaaaacccaataaaatcagaattatcataaattttggatactaaaaaatcagtcctattaaataagacaaatcttgagaatcttgaaaaacaaagctattccgttttttccatagattctcatttaaataattacaagttttaaaaataccctaacaaataaatgtcatcattattgttctaacctataagaaattctattggttgtggacgattcggttttctttttacacatcaattgtccatcattgtatcttttcacaattatataaaatcaaaacccccaaataaaatcattaggttaaactcttatctttcaaaaaaaaaaaacttcctctctaaaacatgatgtctgttcacaaacttaccaatttgagggataagtcgactaactggaagattaacgtgaagttcctgtcaatctgtaatcatcctccaaagagtcatggtgaaattacgaccatgattcttcacgatgaaaaggtttggaattttggattgttcattcttttaatccaaatttactttgttactattgaaatagatacttttaaattatttaatcgttgagttatttggaaataatttcagtgtgatcgagtagatgcaacaatacctcaaggaaactatcagtatcttttccgaccgtttctcaaacctggctcatggtctcacatctctgactttcgggtcgtggttccttaagaaagggttaggtattcttcgtttcgtttccacatcaagtttatttgggaatcaagtgttttgcctcttctggaactggtgaaaagagacttttttgattttatttttcccatagacctcaagtatccgtgtcttgaggattgggaatatgtcacgggtaagtttttagtcaatatatgttcttatcattttaagattaaaattttattagtagtttatgttcttatttttttgaactactctattaacatctaattctatacttagatgcaaggggtgtggtgtcaaatatctcggctattaagaaatttccatttgtttgtcgccaatgtgaaaccgactataaatcgagatatgtctcgttcaaccttttggacaatatgtaagttttagtgtttataagtatatcaaagtcatatcattatttttatgacttaaaaagaatcaatacatatataactgttaaagttaacttctgttaaatgtaatatatataggatttcagtctattatatatatattgtgctcttatacatattttgaggaataattatgtactttaattgagtagataaaaatattgacttctatattgaattcaatttatttatatatcttcctttctcaatgaattatattgttgacaactttttttaccatcttttccaagattgataacaagatttgacaactcatccaagagatatgacaacttatgtcacattttattacatacaaaattcattaattttcgcaagtaaccataaaaagcataccatcgagattccaaattcgattgacaagatttgcatggcatataaatttttgtaataaattaatataaactaaatattcaaaattatacacatacacatatcctaacccataaaccgaaaaaagtaatctcctcccttctttatttccattacttgccttcttcatctttcttctaacctattaacttgaaaaaaaaaaaaaaaacatgtcgagatatgatagaggtggttactacaaaggaatctcttacctctcttaaatttcgccaaaaaagaaagagtggaaagtgtttgtcaagatactaagttggtgggtatcacttcctcatgagggttggaagacacaccgcatgatcttgtgcgacgagattgtaagtctaaattaattagtattcattagatctaatctattaatatttcataagttaaacgtttttttaggggacaatgattgatgccattgctccttcttatgtctttgaacatgacatccctagagttctcgaagaaggtagttggtttttcatggaagacattcatgtcatcaaagcatccgtcggatctcctccctttaccgatcataagttcaaaatcaagtttcttgagtacaccaaactatctcatgtgggtagattggttccaaataactttttccgatttgcttccttctccatgatcgaaaacaagactttcttatttagatttttaaaaaataagcagtctgtttatttggaaatataaagctttcatgttttcctttattttttgtagatgcttatggtgttgtcgtgagagttgagaatataacaagaccggattatgttcctcaagattccaaaaatcctagactttctcaatttctcgagtttgagctcaaaaatacttggttagtatttccgactatatagttccgcatctatttggttctatattttaatgtaggaacatagtaaatattgttatctttataggtggcttaattcatagaacttagatgtttgtgagaaataattttgatattcttattaggggacaatctctgacatgtgttgcaactggatatacttgtgatttgtttgtgcgtttgtggagggaacttggtctagaccttggttatgagtggaccttcggtatgaatactacaacatgtgtgcttcgattttggaaggttgctgatcatgaaggtaaatttaacactcttctcatcctatctttaatttatatagctaatgcatataataaaaacataaatattttaggttgttaatgtctaatctcacataatgctgcttctaagaaatatattcaatcaaagttacctagagattaacatggatcacatcacgtaagaacgttttagtgtattacaaaatattttactcttggctgtttatttcttttttgttttcctattgtttcagggctcaatttcttgaacgaatgcaaccagctgagctaggtgaagttgttgatgagaacttaagacatcaagaccagacccatttccatcgtttttattaaatcttctctattatgctttaaaaaatgtattgttaagactttgtttttgtttttatttcatttcctatgcatgatttctgtaaaatattaactttgattatgcttcgttttatttaatgcttactaaatcactatagttctgtaaacttagataaaattttaactattttgatattgttattcttattaataattttgatttaaattatgtagatattttgttgattgtaacacaatgtatttgaaatcaaacttttgatttcaaatttaaactaaaatatgagttagatatgcatgtattaaacaaagaaaataaatatgcaaaacttagagtttattaaaatatttgtccagtggaatatgccattaaaacgttagagaatcttttaagttggaaacatccatgatttcaactatgagtttcttaatcaagcatcctatgatttgtgttacaatttgcacaataatagagtagataaactaaattagtatatacatttcgtatgttgcgccataataaaattatattgtagatatttttgttaacattatattttcatatatattgtttcctaattttaagcattgttatgtttattatattatttggtttgtgaaacatttagcctttctactcaaaccaaattaatattctttgtttatgttcgtcgtttacaatgaagaaaagaaaagataatgatgtagatcaacaacaaaaaaatcagaaaacctcaaaacgaacaagacgtttgttcgatgaaaccaactttccttcgcaaaatcaaacacttggatcgaaaaatttagttgctgccagttctgtgtttggtagagtgcttagtgacattacaatgtctaccttacaaaaagaagtcagactcctcatactcctgtgtccttacctctttactctggaaataataatgggagttcctcactcattagacctattaattcgatgaactcaactcttacatgtagtatgctcatatattcttttgactttattttgattcatatatttttgcacttcaaagaagacagagtaatttataatacaccaaacagaagaggaaatatagtcaatggatctaatagctcagaagtgtttaatccaactcttccaagagctgccgcaaaaaaaaaggaaatcaggttagtaacttatatactattgaatatgcaatattatcatacaaattttaaatataagaatattatttttttatatgtcatgtgttgatatttatattttttattgcaggaaatttatattttttactgcaggaaatttatccaatactaaaaagatatcattatcacttcgagagaagaccaatgataaagcaaccaacaattatgatattgttaacaaaatatctattcgaaggttgtctgctgttaaaagaatgaccagaaaaatatcaaacgcttcaggttaagtataattttttttttattagatacaatacatattagtttaatatttttatttatctttatttggttgttgtttttctcagtaggatcaccagacttcttaactcctaatcaaactaccctaaacgtaaatacattgtttggagtagatgactctgaaaatttcttatcggatataacatatagatcggaaagtactaggagaggatgcaacgtctctaccattagattaatgtcgaataagaagaaaaaagtttcaaatgggcaaggttcgatttatatttgaaaattagctatttatattatgttttagtatgtttgtctaatttctaatagtttaacagaaattatatcattacttccttaaaaaaatttaatattttggtttgttgattgttaggagtcccacattcaacaaaattacagtcaaaaagagaattttgcaagtattttacgtgccaatatgctcaatgacgaagaaattgatcattctgaagcaatatattctgatagtggtataatgttaatcatactttttaaaattgcaactttatataattagtgtaaaattgattaatttgtgctactttcatgtcatatcttgtctacagataggccacatgaatttgatgatcatatatttgactgtagtagtcaagaagagtatgagtcggacaaagattcaccgagcgattaggttgttggaccaaaatatattttcgacatgaaagatttgttaagaaggaatttaaacaaggaatttactgctagcttcaaacaaagacgatgccagttcatccactagcggtaataattttaaagcatatgttatatatattagaactaaggaaaaacttatctaacattttatcgactaactttggtatcaatgtttgttcgattcatgcgattcatgttatcatgacgaaagtgatgcgaatcacacatgtgtgcattgtggtgcaattttctggtatggtgaaagactaaatagaagaaggaggagtagcaatccggtttttacaggatgttgtatgcaaggacagattgttctacctatgttaaaagaatcacctgaatatatgtggtggttgcttacaggcgaccatgaagatgctaaaaattttagagcaaatatcagaccataaaacatgttgttttcattcacatctattgggggcaaggtagatcgctaagtaagaaagggacgtggtccatctatgtttgctctacaaggagaaaactatcacttgataggcgcgttgaaaccaaaatcttgtgattatgcaaaattctagcagcttcatatcatggacactgagaatgaaattgataatcgaattgaagttataaggtaagtgttaacttcaattgaactttgtgaaattatattttgtggcagctaatatattttgtttattatatgtcttttgtaattatccaaaattgtatcaaaggtaataatggtgggacggaaggtgggaaacaaagttcaagaaagaaacagttgcagctttgctaaaaatgttggacaagataaaccctcatgttggtgcatttaggattgcccgtgatagattcaacatggagaaaataggcaaattttcatatgaggattatatctcatcgcgagaaagatgggagagtgtataaccttccatctgtagctgaacttgctgcattgatacttggagatttcgacgacaatctatataaaagagatatagtcctatagattaagtctggaaagttaaggagaatacatgaatgtcacgtttcatatctagctcttcagtatccattgttatttccaaaatgagaggatgggtataagcttggaataaaaaaaactcctaccaaaacaacaaaaggaaagaaaaagcaggaagatgttagtatgaggcagtggtttgactaccgtttacaagagagaaaatatgagaagcacatcctccttcactcaaagcgtttacttcaacaattcatggttgcgcttttactatgatagagtctaatcggctaaggtatgtaaaaaaaaaaaaacgaagttttgcagtaccaataagcaggcagttcaagatgcttctgatgctcgagataatgatctttctaataaaggaaaaaattgtatcattcctccatctttcactcgtggtccaacttatatgcaacataactacttagatgcaatgacgacctgtaaacatttctgctttctcgacctgtttataaccttcacatttaatcctaagtggcgagagatcacaagatttgttaaagagcgaaatttgaatgctgaggacatgtcggatgtcatttgcaggatttataaatgaaactcgacaacttgatggatgatctaacaaaaaatcatctctttggaaaaaccaaatcaggtacgaaatgatttcatgttttttaaacatatatttcatgaattttaatttacaagtgacattaactcataattgttatgtcgaaacaactatgtatacagtaggatttcaaaaaagaggtcttccacatgctcacatcattctttggatggatcctagatacaagtttcctacagttgatgacgttgacaagattatctttgccgaaattctagataaagtaaaagattcagagctatatcaagttgtgtcggaatgtatgattcatggaccatgcggattggttaatcctaattcgccatgcatggaaaatggtaaatattccaagttttatccaaagaaccatgttgagaacacgtctcttgacaatgaaagttatccaatatatagacgcagagatactggtcgtttcgtcgagaagaataagtttcaatctgacaaccggtatgttgttccatacaatgatgtcttgttacggaaatacatggctcacatcaatgtagagtggtgtaaccaatccgtctctgttaaatacgtattcaagtatgttaacaagggacctgatcgtgtaaccgtctctgtcgagcctcattgaaaagaagatgtcaccgagcaaaacaatgtaggagaaacaaataaagatccacaagaacgaaatcaagttcaggattattttgattgcaggtatttttcattattttatttcagtttattgtagacatacttaggagactatttttaagaagagtcttaatgaaaaataactcaaatatcgttttacaaatacgtatctgcatgtgaagcgatgtggaggattaaaggctatcctatacattatcgacaaacatcagtaactaaacttacgttccatgagaaaggcaagcaacctgtttatgtcaaggaaggtgagactgctgaatctgttttgtatagagtgaataatgatgagactcagtttaccgcatgattcgagcttaataagcgtgatccggaagcagcaaaacttttatatgaacaaatacctaatttctatacgtggaatggtaaagataaggagtttcgcagaaggttgatgccaagttttgttgttggtagaataaattatgtacctccaaagatagatgatgcatatcaccttcgcattctgatttgttcatataaattatgtcgagggtgttgttcatgaatcatacagagatgcatgctaatatgttatgctctaggtttgcttgatgatgataaggaatatatccacggtattgaggaggctaatttttggtgttctcctaagtatgtttgcaagttgtttgttattatgcttatttccgaaagattgagttccccagccgttgtatgggaacacacttggaagatactgtctgaagattttaagaggaaactaagaaatcagttagaacgtgcaggttagttaaattattatttttaaattaaatatacaattttatagatgtttttataaatattttagtacattcaatcttatattaatttatatgcagaatatatattgcctgacgaagacaggattcagttatgtttacaagagctgcaaaaaatattaaaaaggcatggaacagatctttggaggtataagatgttgcctcagcttgaaccaggcgatgaacctgcctttaatcagttgatcctcgatgagcgcaactacaattgtgagtcattgaaaacaaaacatgataattggttaaagatgctaactgctgaacagaagaaggtatatgatggaataatggatgttgtccttaatgacaaatgaggtgtttttttcttatatggatttggaggaacatgaaaaaactttttgtggaaggttctatcctcatcgataagatctaaaggagatatttgtttaaatgttgcatcaagcggcattgcatctctgttattagaagggtggccgaactgcacattctaggtttggtattcctctaactcctcatgagacctcaacatgcaacatagaacgtggtattgatcttgctgaactagtaacagcagctaagttgatcatttgggatgaagctcctatgatgagtaagtattgttttaagtcattagataagagattaagagatattatatcgactccagaagataagccgttgggtggaaaagttattcttttcggaggtgattttaggcaaattcttcatgtcatcgttgcagccggtagggaactgattgtcaaatcatcactcaattcgtcttatcattagcagcattgcaaagttttgaagttgacgaagaacatgaggcttctccaagatatagacataagtgaggcacgtgagattgaggaattttcgaaatggatccttgcagtcggcgagggaaaactaaatgagcctaacgacggagtaactccgatacaaataccagatgatattcttatttttgaaggagacaaccctatagaatcgatcattaaatgtgtctatggtacaatctttgctcaagagaaatctctaacgtttttccaagacagagctattttgtgtcccaccaatgatgatgttaacttaattaacgatcatatgctttcaaagctaacaagttagtgaattaactttggagattactcaaaagtatacatataactttatatgttgttacttataagtgtatatgacagtgaactactactcttttcaagtgaagaaaggatttatcgaagttctgattctattgatccttctgacacacgtgcagataataaccccgtatatacgcctgattttttcaataaaatcaagctttctggattacctaatcatttacttcgattaaagttggttgcctagttatgttgttgcgtaatcttgatctgcatggaggtttgatgaatggtacaagactccagattgtcagacttggagataaactggtgcaaggacgtccattaacaggtactagagttggtaaactggtccttattctcatgatgcccctaactccttcggctcatagattgccctttaaaatgcgacggaagcagtttcctttatctgttgcatttgctatgatgatcaataagagccaacgccagtcattagccaatgttggcataaatttgctgaagcctgttttctcacatggacagttgtatgtcgctatgtctagagtgaaatcaaaggcaaggctgaaggttcttattacagacagtaaaggaaaacagaagaaagaaacaacaaatgttattttcaaagaaatattccaaaaccttttgtagattaattatacaggtatcatttatttaatttgattattataaaataaatatcattgtacaaaattatataacatgctaacttagtcgtttttaaatttgcagattggaataattattaaaagcctttcgttttgccattttcttaatgtttattttttttaataccagtggagaagtatgtaatctattaatatatatagtttttttttatataattatgagtttgaagtttgaacaaagacattttccaagtattaaattgtcaaattttataattaatttacatgttaatgacatacacaaaattgtacaaatactatgtgtacacctacatatactaaatatacaattacgtacccaaacatacataccaatactatactaaattttccatactacaaaccgaggaaactacatatactaaacaaaatatggtttgaggagactaaatatatttagttgataccaatagtacatgatatacaactacatatttatatacaactacatatttacatacaaataccaaggataccgtgtgtaacacgggtactgacctagttatggtataaaagagaaaccaatttattaacctatccataaaagataatccacggtaacattatattatggattaaaaataataattacatcggaatacatatgtattagttaatgacgtgttagtagcaataattagttcgtaacaaacaaatataggagaatttataccgttaatagtgtattatgaattatcaactcggatagtactaaaggtgtacaaacagatttgagcaataactcaactaagagaaatcggtgatacttgacaactaatgataattgaattatatatattttgccctctaaaaataaatttgaaaaggagattatttccagctaaaccatttaccaagtgtttcggagatcagtttagatttggagacataacgtaaaagagattgttcctaatttacttaactaaaaatcaaaaagtcgtgcactaaaacaatatctttttggaaacaaacatatagaatagataaaggtgataggagaatattctctatataaaccatttagcatgtgttacagagatcagtttagatttggagagagatagtaaaagagaatgttcgtaatttacttatctaaaaagcaaaaattggtgcaatattagattttcttttttggaagatattctaaaatgcattataataaaactgtaggtcatacaaccagaatcaaaaatatgaaacataagaaaaataataattcacaattacaacttctaataaaccgggaaactaaaataattactgtaaccataataatctctagatactcaacccccacgattcgtttaagtttcttccataccacattccatcgatttccatttgaaacatagaaagtatgctcaagttaacgaaggtcgacaagaatgaagcaccatccctttcaggtgtcaaaaaggttgttcagcgtaacctaatcttgatattcaacataaacaaaaaccaatcgtctgcttctgtttgtgttttccctcaggttgctgttagcccagaaattcacatccaggcaccagtacttgctaaaaattgttagatatgttgttgaagatggcgttgattctttaaaaaatatggtgaaggatggtccgatatttaaggcggctgtgtattccaaggaaaccctaagttgttgccgacttgacacatctcgttatttcatgtagtggtccatgaagaactccatctattaccatttctttacaaaatgtcttgaagccaacaatcctcatgctttgaatgcggtattgtacaaaccaatagcatatgagaattttgctgccgaatgctatagagctagcttatgggcggctgtgtattccaaagaaaccctaagttgttaccgacttgacacatctcgttatttcatgtggttgtccatgacgcactccatctattaccatttctttacaaaatgtcttgaagccaacaattctcatgctttgaatgcggtattgtacaaaccaatagcatatgagaattttgctgccgaatgctatagagctagcttatgggcggctgtgtattccaaagaaaccctaagttgttgccgacttgacacatctcgttatttcaaagaagaatcttcttgataacatctatatttttgaaattcaaccaaaaatttttgaagaagaatcttcttgataacatctatatttagatctctttacccgtctgaaaatgatatgtcatataatatttagacataggactattttgtttgttaacaaaaccaaacatataagtcaaaatactacttaagataatacgaacattagttatagattattttagaacattggttttacattacaaaccaaaaccaagaggtcgaataatatgaacattgttttgatcactaattgatcaaggcaaacaacacatcaatttactacacgacaacaccatacacactttcaataatctgaatcggtagaacctacctcattagcttcctcagcagccaatctaaatcccaatgtaaacaaaatacacgttcaacactttctaattagatttttttgaagataactatgcaaaataatacatacatctctagaaattctccaacctcaggcatatcaagactgatatccaaccggctacatttaccaacggttcaaacaacatttcgtcctgccattatataattatctatgttattgtaaagataagcgattttttttccaagcaaaatcaaacttatagaaatttattacgtagatcatatatatttttttgtgaataagagaattacgtgaagatctatgaattctccaccactgtaatactcatacaattcgttcacccctcgctcttttccatttttcattaaattgtttcgcgaaacctccgattgcaacacattccataacattgttactgaaataatttaacatataagtcatcatgacaactactaatatatttacatgcataaagagtatttaattaaagacttacacatgatcttgaatcttgaacatagtatagcaaaatcatatctctgtctacttggctcaagataacggagttcaccagtatcaacaacaaaaccaatcaagccttgcaaaaaaagaagtgatattgatataatggtgtcaaaatttcaacatatttccaaatgaacaaccaaatcatcttactaatcaagtagttcttgtctagagtatcatccaagacctcaggaaaggctacataagaaagagtgtgtttaagagcatcttttggtggaattgtgttcaaaatagtcgattcttcaaaaacaatccggtaaatgtgcttggtggttcttctatcgtcggtcacatgtttcaacggaaagtgatgaatagctactcaatcaccatatctaaatttggagtcaaataggacgatgtccttatatttgatcttggcctctattctatgatcctatatataagatttcataaatagttgattagaaaaacattaaacaaaaccactttacaatatcggtgagaaatttagtaaaccatgcatacccgcacatcagccaaaaccatacgaaccgaacgacgacccctatcagaccactctcgctatttgtttaagaccttaacttggatggaccaacaaagtttaatagggttcagatcgccgacgtcctcatccataccccaccggaccttgctaaataacaaccgaacaggtgtaaacgttttcgttataaaattatgagtctaaccatgaggcattctcttagttatagtagtcataatatataaataaaaaacatgtttaccgtacgattctaatttccaagactattttaacttttcctatgcatggtctcttcttcctttgcatggtccctactatcaattcgaaatctgacatatctatatataggcataaaacgtcaattaagatactgccaagatacaattatattttgttccagatctttaatatggtatgaaataacattttgacatgaaaatgatttctagtttagtatatactatagttgcattaatttcaaaaaaataatgttttcgataacacctatacttagatctatttacccgtatcaaaaggatatgttatacaatatttagatctaggagtattttgtttgttaacaaaaccaaatatataaatcaaaatactgaagatgttaaaaaaaacaaaaactaaatactacttataagataatacaaacattagttatatattattttagaacattagttttaacattacaaacccaaaccgagaagtcgaatgataagaacattgttttgatcactaattgatcaaggcaaacaacacaacaatttaaaacaaagtatttaaatattccttgaacatcttgtatcatctgaaccggaacatattgaattcgtagcagcccaagcataagcagtggagagtgtactatatatttaaaaaacttaagaggtcattaaacgtatggattatgtatatccaacaatacatgaatttaaatgctatatattactccggttcttgatttcctcaatttcgtaaaactctggatcaaaataaaatctagagcatccaactctattcatgagacatggttttcctgtaaaatattaaatcagttatgttctctaccatttttagaaaatactatgaatatataaaagtcaatacctttatacttttcaacatgccaaaatgtcaaaacacaaaaaacaaaatcacgaaggtacgaatgatcatactctcggtttacccatactctcataaaatagtcagccaaatctcctaccgcgcaacatctcaatttatgtcccctttaaaattttaaagcaaaacaaaacgtgattaataaataaattttgacataacaatcggaaaagaaactcacctatgattcattaagatgaaggggacatagttacatccaccattctatcgtattgtccagaaacataagggatccgtttaagtcggcctatataaacgataaattgcaccgcatctagatttaaagtattcaattttattagctatcccattgcctattagaaccaaacaaataaaaagttgaaaccaaaaaacgtaccaatcggaatttcggtcaggatcctccatccccttatgcgactatatttttcaggctcaatacacttacttggtcaccgttcataagtggcagtaattttggttggttgatggaaccatatacggaacatgttggtcgtgttactcaacatgtccggcaggtacagaaccaaaaaatcagatacaaagtaccatgtgttttccctcaagccagttatattatcatgatcatgatcaaagggaccacaggtaatagtagcttcaaatttagtatgctatataataagaataagataaacataaagtatgtaaggcaaatcacaaaaattaaaatatattgaaagtgataatagtgtttaaccgctaaattggcaagaatcatctccaacttcaagttaggtctgccataatttatgtaccaaaaaaccaatacattgacacaaattacgcgatttatatcataaggtgtaagatcctcgaccctcgtcaaatgatgcattttttttgttgaatacggttgtgtattcgaagaactttttgtttgagtgttagctcaattgttttgttttatgaggccactgtctaaacaaagggtgtatatatatcaaaacactttccttttgccatagtcgttattcaaacaggaaaataatatataaatatatttaccaatcaggcatagtcaaattatttttttaaaacccctaaaaaaacaaaattcaaaagttttatcatgcactcgtccaaaatacgtgtaattgtgaatgacaatacactgaagacttcgtttattgtgaacgataatactttcgatatttcccaatcaatcatattgtgagtgataagtttgagacatgaatgagaaccattgagccacgtctttcgcgtattaatgtctaaacatatcatatagcagatttggtgtgttttaaacatatcatacatttctttttatttatacagtacatatctaacattatattcaaaaatctcaacgatcaatatttgtataaatatttgtttgttttttgctggaatgaatatacgtacggaaactctacaaatacaataatatattcttaatattatttttcattaagacagtcgtttttcgtgagccgaaataaaaagaataataccaaaatagaacatcaaagcgaactacttagaccaatcgaagatatatgagtatttggttcgttaataaatctaaacatataaaggatatcaatggtgataagataataacatctttaaagcaaatcaaaaccatgaagtcgaatgatacgatcattggtttgatgactatttatcaagtcaaaacagcacatgttttaaaaaacatataaggtaacagaatattttattacatcaaagcaccatgcacactttttcggtagaaaggcttctggtattgatggcttcaattctcatcaacaacttcacctagctcagctggtggcatccgtacaaggaattgagccctctaaaagtagaaaaaaaagaaattaatttattagattaattttttttttataatacgctttttagtaaataaatagtgaaaataaaaacgttcttacgtgatgcgagccatgttaatctttgggtaagtttgattgaatacaattcttgaagcaccattatatgagattagacattgacgacctaaaataattatgttttaaaaccattgcattaacttgttaaattaaatagatgatgagaagagtgttaatatttaccttcatgatccgaaatcatccaaaatcgaagcacacaggttgtaggattcataccaaaacgccattcataaccaagacctagtccaagatccctccataaacgcacaaacaaatcacaagtatatccacttgcaacacatgtcagagattttcccctaataagaacatcaaaattatttctctcaatcatctaagttccatgaatttagacacctataaagataacaatatttactattttttaatataattatatataaccatatagatgcagaactatatagtcggaaatactaatcaagtattttttagctcaaactcaagaaattgagaaagtctaggattttaaaaatcttgaggaacataatcgagtcttgttatattcccaactctcacgacaacaccataagcatctacacaaaataatcgaaaacatgaaagttttagatttccaaagaaacagactcaataatttaatatttttaaaaaagaaggttaccatgagcaattgtacaattaaccgtcttgttttcgatcatggagaaggaaacaaatcgaaaaaagttattataagtggtgtgttataaaagtggtgtgttataaataaaaattattatattagttatttcttgtactcgttaaaaatattataaatttatttatcttaatccataaaaaattaaaatattaaatttaatttcatcatagaataataatttgtgttatctaatagcacttcatatatatatattttgtcatattaaaacaaaactaaatttatttgttaatatatcaaatatttaaattataaagatataattgttggaaattctaataaaatttagaatctttaattagtatgtacataagaataataaaaatccattaaataaataaatgcattacttaattattagaaaatagaagttaattaataaagaaacgtgcatatcagatagttgaaggttgcttgtcaaatttaattgattatatatatatatggaaaagtatattatataatttaattaattttgactagtgtacataatactcgaaatgctgaacaattttatgaacccgcggttaaagataatgcttgggaagccccaaatccttatactgcagattttatcaaccgtttaaatacagcaagtgagcctctatatgacaactgcggcgaaagcttgtcaaaaatttcattggctgctaaaatgatgcacattaagacgaaacacaatcaaacagaagcgtgtgtcgatgatactgcagacttgtttcataaggttttaccaaaatgtaatgttgctccaagaacttattatgaaacagagaagttgatgcggactttgagtatgccgtaccacatgattgatgtatgccaatataattgcaaactcaggattaagatgtttgcaaattttgtgagcatccaaggtacaaacctcggaaagcatcggtacgggctactagaaagcatattccatacaagagaatgttctatttgccaatatcataccggctcaagagattgtatctatccgaaaagacagcgccccatatgagttggcacacagaacatacatgtcttgatggagttatgcaacatccttctgatggcaaggcatggaagaatttccaacatcttaatcctgagtttgcatccaaaagcaggaatgtttatctcgaattatgtactgatggttttaatccattcgaatcttctggtggtaactactctctctggcccataattcttactccttataatctcccgccagatatgtgtatgaaaagagaatatctatttctttccatactagtgctagtgcgaaaccatccaaaacgaagtttggatattttttttacgactactgatagaagaattgctggaactttggatcaatggctttgacgggtttgatattcagcgaagcaaaattttaatttacaagcagtgttaatgtggactataagtgactttccagcatatgggatgttgtccggatggacaactcatggaagaatgtcgtgtccgtattttatggatcaaacggatgctttccaattgaagaatggtcataaatctagttggtttgattgtcatcaaagatatttacctctagatcatgtttttcgccaaaacgaaaagtcttttcgaaagggtcatattgtcaacgatgacccaccatattttatatcaggaaaacagtggaatgtggtgaagaaaacagtggaatgtggtggaaacaatcatataaatagtggcatcgaaggatatggcgagacgcaccactggcacaagcatagtgaaacaacccgacccatgttttttttaaaaaaaatataattaaatattctcataaatatctaattaaaccaaccaataacataataattaaaccgcaagtcagaaatactattttatgaataaataaataattcgatcaacaaaaccaagaataactgacaatcctaaccgggttccaataaccaaaaacaccaaacataaaacaaacgagttcctagatcatcctctcttccttgccatgattccacaatcacactttatctttacctacatcaacaacacaatgagatgcgtaagtattatcataaatacttagtgaggcgatcctcccatctacgagctatacacacaagcaaataaaaaggtataatcacgaatacaatacaaacaaaccagtcattgaacaattcacccaaaacacattcaccacatctacatatcatcacacaaaacaaatcacacaacccaatcgctcagataagctcatggtcacgcactcaccttaacaaattgattctaatagcaattaaacccatgagagactcttcttgcgtctgaaacagtccagaaacgtcctacaacaagtccacaaccaaaagcaaccttgaagcaaactggacaggaaaaaccagaaacaagcagtctcaaagacgaaaccctaaaatacaaactaaccgctaactattcaatcgctccggtgaaatcctagctgcagacgtcacaaagctgcctacaaaatctcgtgccgatcggaaaacagacgagaccacgatctcagtttcaatctccgctggtcccaattcgcgtctgagaaaacgtgtctcacgaaactgcgaataactcaaccaattttaatccaaatccaattctgtaaactggagaataacgataaaggacttgggaataactctaccaaattcgttaccttttaccacgatttgatatgacgaaactgaattctcccaaacccgaacgattctgctccttctccttttctctctttttctcctttataaaacgaaaagtggctaaccaaagccctaatttcgagtttccttcttttataggcacactctagggtttccaattaacccaaccaattaaacccgatgatttaaaaacaaaccctaaccgattttctggttcacgggcgttacacatagcatcttttgggagttgtcatattggaagacacatttgattcgacatatccttgatgtgatgcatatcgagaaatttttttttgataacttgattaacactttgttaaatatcacatgcaaaataaaagattcaatcaactcacgaaaagatctcactttatattgtgatcgaaagaaattacaccttacatcgtctggaaaagcccatgatccaatatccaggttgtcccctcaatcaaaaataacatttcttaaatggttaaaagatgtggtgaagtttccagatgggtacgtgtctaacataggacgatgcatacacattgatcatggaagtcaaatgtatggtttgaaaagtcatgactgtcacgtcattatgcagcgactatttccgtttgcattctctgaactccttccccatgaagtccatgaagcaatatcaggtaaattataattatttagcttcagtgtacttatatagttattaatctgtataataaacttattttttcatttatttttttacagatgtaggaatatttttccgcgatctttgtttaagaaatttggaagtcagtgatgttcgtatgaaaagtaatattgctctgacactttgcaatctagagaagatatttccaccatcttttttgatgttatggagcacttgactattcacttaccaacagaagccaaactttgtgggcttgtgcagtttcgatggatgtatccattcaaacgattcatgtttcatcttaagaaaaaggcgaataacaaagcaagtgttgaagggtcaattgtggaacaatttattaatgaagaaattacaaatttcagctctcaccactttaatcgtgaagcgactattgtgtcgagtagtgctcagagacgacatgctagttgttttgctcaacaccacatctactcgtacgacgatgtgccgacattatttagagtggaagtggaaaatcatattatgagtggttaaccgatgatgacaaccacatcgctcatacatatattttgctcaattgtgaagaattggcaccattcgaaaggtcattaaaaatttacatatatataaaggtaaaatgagattttagttcttgatacaaaaaattcaggccatttcataacgaagctagagaacgatatgttggtctcaccgaagatttcttaacgactatgaaagaatgagatttttcaagttggttatataatttggtaagttttagctacatatttcacaatttatgatgtgtatagctttgtaattaagatggattatatacgatatcatgatcatctcataagatgtgttcatacagattcatagtgatcacacgaatacttgaagaaatcatcacacaacgagtagcaatgcaggaggataacgacgatcttcaatattccgcgacagtcaatacattgaatctaagttcactaattttacctagaggacagcttgaagacattcccgaagatccactatgtgaagattctgaagatcatgatagcgatcttgagacgacaaattcagaaagttccaaagaattcgaaagttccgaagaagaataataccattgcggaaatgattattgtctagggagtttaatgttttatagccaagtttttctatttgcttttctataaaataatatgaataatatgttttcccttctcttgtcttataactctcatactttaaatcgcttgaaacatgcccaaaatttttgttgcagtaacagaaccatgattattatagaatataggggtggacatttcggtttaacttcggatttggtttgggtttggttttctttctcttggtttatgtgggtttcgtaaaactctaactatactcaaccgtagttagtttggtttgctttgtgtttgggtcagttttagttcggttcggttttaattcggttcaaaaaattaattaatgtatcaaattctatgtttaaattgcataattcaaacaaaaccagaaaagaaaaacctagaaaaactcaacctataaatatttatagttatttacaatattttcatatcattaattaattaatttaataaacacattgggttattgattcggtttggtttaaaaccgaaccttaaccgacccatttgggttgagacaaaatgcaactgacaggtttgagtctacgcttaagtttggtttgggtcagtttgaattcgagtgggtcaggtcggttggttaaaatgcccacccctaatagaatatattgagttgacgaagtcgtaaactctagcctcatgagttgagttaaaccgagttgttcaagtcggatagattggtttgttccaaatttgaaaatttgaaaatcccaccaaatagaccggaataaaaattctgttcgggatggttcggaaatcggtttattcgggttggttatacattaaatttgaaccgaattatttgtttaatcggccattccttaagaaattgatcaaaccatggcatttctttctccctcacatcacctgcggacaccaatattcaatgagatctatatgacattcttatgaaattaaacaagattgaaatctcgaagtgggtttgtgtttgttgtatctttagttgctttttgttcatattctctataaacttgttatctaaagtaaaagctctctgtagatctttatttgcatcagattctgtagttgtaagtatttctaatcatagattgtcaaaagtatttattgtgtagatgactgattgttctatgatagcttttcagtttacttttatgtttgctttgttctatgttttgatacactgcttgattttctgaagctttatgattcttcttcatcttttttatgttaacatctttggcgtgtttgtgttcctttgatgcagctgattaaagattgaaggtataaattgatctgttcattatatccatccgccgttaataacagattgaaggtataaactgatatgttcattagctagcttttggaattaagataggatcaatgcaaaatctaacagattgaagctttcctttcttttgttcttacttagttctttcttccttgaaattggattgaagtgttttgattagttaaagtttataagtgtatatgtcccttgtgggcttaagcgtatatctctcttccaattgctttcatatttgaagattgaaagtcatcgttgaacttgcaacagattataagcttgacattgatatttcagcggaccttattgccaaactcatgtttcataaagaaaacccaacaccacctgagcttcattactctgttgaagcaccaagcccatcaacaaatggtgggtcttcaggttcaacggtgggacttcaagttcctaaacgcgagactaaagccttcgtgaacccatcaacaaatggtaggttctaatgtcagatactcattatgtgttaaggatctagtaggaaccagttcagcttgtaataggtctctctctctctctatcaaatgtattcaggttgcaaaatactgtgtttcagattcttttggtctaatttgatttttgcatctttatagacgagtcagtgaattaaggtcaaataatattatgcataaaatgttttgttctgtgacttttgtcttgcctttgtttttttggttgaataatctttccaataaaaattgttacagttctttggttgttcctgcttcttctctctctattattttgataatttagagaacttgagaaattggagctgcctacttgaatttggatgttccttgtttcagtttgtatttgcagtacttttattcttcttgagttaagattcttgcgggttgattactatcatttgcgggtcggttacaactgatcaagtctgttctttctaaccttaccaatttttggttctctgttttcatacttccaacggcttgtattgaagagatagagaagctttttgctgctgttttgtggtctggtccagaactgaatactcgaaaggctaagatttcttggttggaggtatgtaagcctaaacgggaaaggggtctgggtctcaagtctcttagagaattaaatgaagttagcactctgcaacttatttggcgaatattctcggcaaaaaactctctatgggtgcaatggatatataagaatttgattcgtaagggaacactttggtctgtaaaggataacacgagttgcattgtcatagcataacaatcatatcagagcattacattgcgcattacaatcgatgttcaatgttaaagtttaatttagttgcattgtcatagcattacaaaacacaaaacaggcattgttatagcattacaaaacacaacacagaaacacaaagagatcaacaaagaaacaagaaagcacattttcttccaaagcatcaacacttacactcttccctacatccatacaatttagcaaagaattacagaggcaacacctactgtcttcaaagctgacttagccattacattacccagctccttcacttcactatctatcttcttacccatcgcatcctccatcttctttaactttttgttttggagtttcatagtagccatcacctacatcctcatatcattgacatcatcgacaactttctttctcttctcctcgaccatcctaatttcatctattagagctttatcaacccattcgaacaagttctcttcgttttcccgctacatatataaatttcgatgaatgaatacgccgttctctattcaatcaacattgtagggaccaagtaaaacaatgctcctgaattgcaatctcgcatcgatagagtcgccggaatggattttcctttgtcttcgaagtgtaagtgatgattttcgttccacaccagcatgaagatgggactcctggaggagaataacgacgacccgaatttgaagcagttgagtggtagctcatcgagctcattgtgctcatcgtttcttaaccttcaaaattttctctcaagaaccctaactctaaaatccccaaatcgactcgattgagttaggtgagaagaagaagaatggaacgacgtcgtatggcgtttgggctgttttggttatggcccaaattgattttaaattggttaagcccaaatcgattttaaattggatacgacgttgttctggttacagattaaatcaggcaacccaaattaaatagtgcatctaagttatggattcatgttttacactaagtgttgaaaaatgagacaaagaggaaagactctacttgcaggagagacttctatctaattaattaattataattgcaatgtcatgattttaaggttgtgtatttaaactctcatcattatgattttaatatttttttttgctaagtcggtaaatatcatataaaataaaagagttaggaattacaacgagaactcctaaataattatttccttggcaaaaattatgataaaaataaggaagtaaacaatcttcagaaagaaacaatatatgagccaaaaactcataggattatggaacttctttttgtgtcttcttgcgtcgatggagttgatgatttccctatcgatgatcttgaagacttaagcaggatccatgtggtgcgagttatgtagcatgttatttctctgcttccaagttgcgtagacgacggaatgaacgacaaatccatgaaagaagctcagcccaattcaggaaaataagtgagtgcaacctaagcctagactgaaccaaactccagagggctctgctgaaactacaacccaatagtaatttatccctagtctcgggtgcagtagaacacaagcagcaaagaggtgagacaggaagacccaagcaagcaaccgtgtccaagtgcgcaacctatcaaaatgaaaaatccacatgtggaaagcgtttcttggagttgagcctttaaaccaaatagaagcagcccaatctttcttctcttcccactgtcgaagagcctgccaagtctttgaagaggagaaaccattgcagtccacattatttacaatccagtggtactcatcacttacattcaggtgtagatgaaggggaatagtatcaagatgagattttaagctttggagctgcggtgaacgtgtcaaatacatgccccaactaatgccctgagtagcgtctacaacagaagccccaataagaatcctcagcctattagaacctacaacaccaatgtgaataagtaaggggccaaatggcgtccaattgtctgtccaaaacctagcagtaagccattgcctatgttacatcgaaggaaacgttctactaaaggtctcaaccgcatgagacatttccaattccaggaatcagagaccaattcttgagaagtccaaaaattagaaacagaggcatcccctagaccctgtagatggtgatacctatgccagtccacccataaagatcctcctccaaagaataaccgccaaacaagcttcagattgagggttgtattccattcttaaaaccgcatgatacctagccctccctcagcttttggtaagaagactgttgaccacgcgaccttagccttgttgtgattttcaatgccgccagaccatagaaaacgtgagcatagagactctatttctttgatgcatccattagggagcttgaaagtagtaatccaaaaaaccacacagcccgtaattaccaaagcaatcaactgaagtctaccaacgaaagagagagatctcactgcccaacccgtgaatttccctttaatcttatggtttttatcttattaaagatcaattaatcaaacctttctaaatcatatgtaagactataaatgttttaataaaaacgacttgtcggtcggtctgtgggctatataaatgtaatatataaatggttaataaaataagtaaataatttgtaaaaaaaaaatattttcattagttatgaaattataatatataaaaatgtgaaaatgtgaaaatagatttttaaattttaaaatactttcaaaaagtaattataaagttttttaaattaatatttaaaatgtattaatgcatcaggagcaggagaaccatcacgacccgcaacaagagcaaaagagccatcacgacgtgcagcagtccctgcaagagaaccatcacgacgtgcaggagaaccaacccaacctgcagaaggaacatcaagaccatcaacacatcaggttgaactccaaagacttcataatcgcattcagcgcaagtcgggcagttgccagctcatccattaccctgcccacaccagtcttcaacaccaccatgtcttccttgagggcctcattgtgtttcttgagcgcatgattatttttttccaaaccattcatgcgcatctcattgtcaaggttgtgagacatagttgtagccactttctgggatggattgatatcccggtattgaacactgcctagtccataaatatatccttttttattttgacctcgctgtgaaacaaagaaacatttaagtatcattcaaaatgaaatacaattttagatggataaacaaaacgaaactaatcaaacaaatgagcattgcagatggataaaattaagtgttccaattaaaaatcaaacaaatgaacataatccaaactgaacaagtttaaaatcaaactaatgagaaattctttgttgagtaccttcagatattctttgttcaaaacaattcgagagggagtaccactagatgaggctgtttggctgagggcattgagagaatcatcctcgtccataacttgtttacccgcttcctccactcgagaaaaatagattcataacgagggtccatgaaactaccgtctttacgtgtgtgagtcctccttacaagttctgtgaagggtggtggcaaagacgatgaagaaacttatacaaacaaaacaaagattttgtgattatttcaacttaccataaagctccgttaagcttcctcggatgtagatgtggctgtgattctctttcaggagcactaagcaatacatcaagagttctttggctgtagttttttgcatgtgaagatgtaggacttggagatcatgtggctcctggtggtacagttctatttggtacggctccaggaggtacccttcgatggtttagctcttgaaaaaagaaagattaaacgtgttactataaactaataacaaaaaaaatgaatgatacatgaaatggaaaccctgaaaaacttaaacacatgaacaaaagatctaaaccctagagacggagtgaaattgaggacatagacaaagagagatatctccaaatagataaatctcaaagagcaaaagctcttaagaagattgaattctgacctgatggatgtttccttattcgtctatctatagttgtgtcaaaccatctgcatttgaaaaccaaggcctttaacccaacaacaccatgatattgaatcatcattatctcttctatcaacccataataatccgtgttagtggttccacgaacatagacaccgtaattttgagttttcttatcttttccatagttatgcgtgtgaagacaatatcctcgtgagtggtatataggccaagatgtataattacggttagaaccttggacgaaatccaacatccataatggaaattgataagattttgtggcatcgttaatctgaaattgaaccacattataggtagtaattataaagtacgtaatcatattatattaattaacaatatttattttctaattatacttacatagtctttacaccattcagcaaagtagttgtctttcactttttccatttctttaggagaaattcttaggatttgctccgtcatatactcttcgaacatcctataattgtagttagcgttaaaatattatatatgtgaatattacatactataaaagtcataccattcacaaagttcaaaggcgtcacagttaagtaacaaaaacgtttggagcactgtgtagtcattatcattaaaccatccatttgtgagttttccactaacacgaccttcatggtagaacaagcttgacacatctgggtaaaagtatgtaaatcgaatttctccagaaacaggaacatcatcatctttaatttcaggatgtccaaaataatttgcagaagtatttgctatctcttcattcacacattgtgcaacaatcgaacctgcaatatgtgcacagttcttaactttcctctttaaatggtacatgtatctctcgaacagatacatccaccgatattgcactggaccgcttagcaaagcttcatctggtagatgatcaggaagatgttccataacatcaaaaaatgatggaggaaatatcttctccaaattgcaaagttttaaccccaatatttgctttcaaacaaagaaacatcatctttgcataaaatctttgctgagatatcccggaagaagagtgaaatgtctacgaacatatgtaattaaattaatttattgatataaatataatataaaagatatgtacaaagttgagaaacaaaaaattacctaaaatggtcgtgtgaacatttttatgaagaagttctacaaacgcaaatgggagtagtcgttgcatgatggcatggcaatcatggcttttcagcccagataacttctttgaagcgtatccatctggaaaccgtatatcatttttcatccaacagagaaatgcttttttttatcaatcgagaatctaaatatttgtactagtattgttccatctctggtgagatgtaagccacttctgttgcataaagtcgcaagatccattcttgatttaattttatcttttgttttttcaagaactttcagaactgtgttgatgagattatcgaagaaattcttctttatgtgcatgaagtcaaggttatgtcgaagaataagattttcccaatatggtaactcccaaaatatactccttttcacccaattgtgatgaatcccgtatccatcgatagtttgggcaaacttctcgtgttcgttccctccacaatcgactgtactaaacaacccaacaaatattgtttattctctcgtgaaaaatttcctctctagtccaccacaatggaggatcatctctcacttccttccctccgcgaaatgcttgaacattttgcatgtacatatgacctagaggtaaaaacattccgtggcaatcaaaccaactatgctttctttcatttggtaaccaaaatgatatggtattatctagacaatatggacacgacaaaagaccatgcgtcatccaaacagacaacatgccatacgtcgagaagtcacttattgcccacgtcaaagcaactcgcatcgtgaatttttttttctttgatttgtcatacgcttcttccccgtcaatccacagactcaccaactccttgatcaatggctgaagataaatatctaaattttttttgggatgcttcggtccaggaacaaggactgatagaaagaaaaattctctctttatgcacatgcccgagggtaaattataaggagttactatcacatgccaaaccgagtgtgcctcaccattcatactaacaagattaaatccatcagttgataagcctagataaatattgcgactttcagcagcaaaatttggatatacctcattgaaatttttccatgctgctccatcggacgggttgtgcatttctccttcgggagacatatgttcagcatgccatcgcatatccattgcggtattctcttgaacgaagtttttgaaaactttgtcgttggaaatctctataactagcaataatgtcttgtatgtttttttttaaagattgtcgtctacgatttcctcgtgaaccaacataaacttgtgcgcttcgcccagatctttgtgaactaattccacttcaacatgttgactacaaattaggcctaattcgttgttggtttctaggagcagaatttttgaaggtttcatcatcatcaacggcaacacgatacgcttcttcatcttcttgtgtctcgggaacttgtgttgctggcacgttaccactatcagagtctgagtcatcatcgctttcttcatcaattgcttgctcgttgattaattgttttcttctttggcgagatgaatgctgatattgggactgaacatcatataatacgagacatcgtttcatcacgtcccaaaaatcaggcggctttcagttgaaactttttgttaatttacatccctaaaattttcgaatcaattagatttttaatagcaaaattttataaaagatttaatgagttgaaaagttatgtgtacttacaaactcttgttctctctaccatatgtcagatgcaaatatcattaatatctgaggatcaacaatgatgtcagttttatgcgtaagaaacctccatctcttgtaaaacaatttgaattcatcaagcttgtttttgaagaaaacataagttatattcatgttgaacgcttgattgaacttttcaaccatatactatttttttttcatcagattttatttagaaattagaagagccaattctgaggaaaaatgtttacaaaagtaatatgaagcggttcaatacaaatttttgtgccaatttgtacgccatatcatttgcagtacgagaaataaaaaattaggaaaaacttgtgaattcttcattgtcggtgtggaattcctccaaataagttgaaaatgctggtcattcggttggaaaagacactatcttcaccaggtctgaacagtctgtacaaaatgctacttctttgttgtcgataccaatcatacacttcatcgcccagagtagagcttcgacttctgtatagaggagagaaagacttctacgcatattagcagctcccatggttggcgagtctccatttgatgatgtgtagaaccaccctaatctagaaaacttatcgcttcctttccaagatccgtccacaaaacaacgaaaaccagaataaatattatcatattatattttttcgacccgaatttgtttttccgatcccatggaaccgtgatttttggtattgagctaactaccacgattgtgcctctttttctgctaaacataatacgtctaacggtttttatccatattttcaaatattttttcgtttcttgctttccaaatataccaaattatccatggatatgaagattaatcaaattctgaaggtaggatgttttttttttttgtgcacaattttatatcatagtcaatcatcctcaaaagagagaacaattacagatagggctacataaggaggagccgaagcaaacaatccatgcatcaaaagcaaagcaataaataaagataagcagattaaaggatagatcaaagtagttttaatctttaggccatacatgtcgttgcaacgtccatggaccatgataacattaaagcaaacaagagagaaggcaccttggacaacacaaaacacaccaaatgcaatgttgcgcgagattgattgtgccactagggcagataaaccaatccaaagaaaggctatcgagatagaggtgacaaagcaccaaactgacgagccgttgaaattcaaaccaacaaacgtggttctagattggaaacaacttggactggccttaaacacaggcatagtgacgccggagaagtatccggtgagcaaactttaccgaatttaggcagaaatcgaaccagcaaaagtagtgctaaaccagtagcagattgagcctaccgaagaaatatccgacataggcaaagagaacccggagaaatttccggtgaaccgatgagtgatgaaacgtgaagaggtgaaagattggcaaagtggcgaacgattggcagatggaataatgtacactacaatagggcaggcccaaaaaacatgtatgcaccaaacaatcatgcagcccaacaagcttaaagggccacccaaatatccacaagacccaacaaaggcccaagcccaagttaaaactttcctccaaaaagtgaagatctgacctaattcgagcgaggcggatgagatgtggcggtggcggttgacgacggcaaaagggacatcaaacacggagaacagcaaaaggcaaagctcaccgtgaagggaggtcgaggtgtttttgagggaagagctgaaacttcgggatgatttaaacctgttcttgtggaaggatttgtgttccgttgacgattagaccacatatctgcaatcgttaaaatcgaaataatttttcttaataagcttttaactatttattttcatattattaataaaaatttcaagtatatatattcaagtacaaaatatatttaatatatagaagtgttattttatataaaataatccaaaaagtgatataaaacatcacaaaattgaaattagttacataattaacggacatgtataacttagacaaaccaagttaaatggtttacaaattagcgaataatattaatttaactaatacatgcaaactccatgatttatatttttcttaacaattgctatgatttttaacaatcattctttcttttcctaattaatgaaatacataacctattactataataaaaattaaatttaaaaccacaaatttatagatattgactcaaataatatcttttcaattattagaaaataaaaataaagaaataaagtgaatcaaatcttatattacaatatatgcttcaatattttcattaaaaaaataaattacataacattttaaaattttgaaaccctaattatttcccaatccacatttttcgttttaaatttgcatttgtacaaaataaatcactccctaaaactttcttttctgatttttattaaattttgttctttttctggtaaaaataaattgtacatgcattaagctgatattgctgactcaaataatgttaacaaaatgtcaaaattgaggctattaaaataataaaaaagttagtcaaaaacaaaagtatatcaatcccaaattatgattaaattaagtatttatatataatgatttttaccaaaacaaatagcattatattatacttttgtgttattaaagtaagaatttacaaagaatatcatcacattaaagtcaaaaacaattcttatttttaaatattatggatatattttcactttataaaatattattaataagtaaatgatataaaaattaaaatattatgagatgagaaatatagccggacgagtttggattgatataacacatgttaaatatttattttattattttattatcaccaattttttagttataaaattaatataaaattatataacttaatactaaattaaaaactgtataatttaatattatatatatatatatatatatataaaacatttgttctatggtgtattacgagttaaatcctagtaaataagttaataatgaatgttataattaattagtattatataaacaagagagagaataatggtggcgacgctttatttagcataaatagaaggattaatgagataccttgaagtaattaccttaaatgtagaagtagttagagaggattgaagatagtttaggaaaattttttttttggctttgctatactaagagagaggtatgtatatataagaaaaacttctacattaaaaacaaataaaagaaaaaagaaaatatgcatttataacttatcggcgtttttgtactgggcttcgaaacacagtccactacatttatctatctaaaaagttacgttttttttttgggtttttttttttgaaaaacgcaaagtattgttatttttcttgattggggataaataacgtttttcaattaacaaaattaagttccgccatttaaaggctataagcctgtccttaaaaatacattaatggatgagctaatgcggatcaagaggagctatgtgtactgggagttcatgaatagtgaaaaaataatacggtccagtacaaatgtttgaatggtgaaaatatggtaagagtttcggaaaatatattttaaaaaaatatattataaataaaactaatttaataatagaatgcagctaaaaattaaaattgttatattttattttatatggataagaaaaatttttatatattattttagattaaaatattattaaaatttagttaaacaatacatataaaaacttcaaaataatacaatgcaaaacagtactattgtaaatattatttttttccacaacaaatctataaatatattataaataaaactaatttaataatagaatacaacgaaaagttaaaattattatattttattttatatggataagaaaaactttcatatattattttaggttaaaatattattaaaatttagttaaataatacatataaaaacatcaaaataatacaatgcaaaacagtactattgtaaatattgatttttccacaacaaatctataatattatctcttatttgtgttatatgttctccgtctactacttcagctgcttccaggtcatctaaatcatgttcttaatcagtgttgtttacttcaggctctatcattacttctgcgaaatctgcatctgaaaagtttgaaatcttgttgaaattgtgtaatcccattgtcgccattaccactctcttttgaacatatatactatatattggaaaatcacaaagaatccttcatttttctttccaaactccaaatgtcctctcgataataacatagtgaagcatgacatcgattaaacaattcttgtttattcctcggaggtggaccagaattgaactaaagaaccttatttatttggatatactgaatcaacggcataataattctctaacgaggtaaagggaactcagaatcgcttgtttgtgccatttctaggacagctgtatcttgacatgctctcggtgctccattccaaatttatgtgaacaacgtattcaaatcacatatagccatgatgttcaaagataaattatcgtgttgattctaatacattcctcgtaactcatgcttcacttttacacaaacgtttgtttcatctattgctccgataaatccactaaaatatggccagtatcttcaatctacttgaagtgtctcaggaattcgatgtagttcttgagttgttagagtttgtatatattcacatcctagtaattcagttgttgtaagaacttctccaaattttctcttcacggtttcctaatttcagccaaatctcaaaccaacatctctttgaacttcattgtgcccacatattcgtaaaagaatggccacattttcttcaatacttacatttaacgtttgttgttgaccataatttgtttgtacaatattgcacaatatctacaagaagataggctattttcaacgaacaaaatcgtcggaaaaacatcggaaacagccgtttcgacgaattttcgacgacatagattggtcgattttgatcttgttggaaatctgaatgtcattgcaagagtattagaaattaccgacgtgtttccgacgaggcattttccgacaatttctctacgcttttcagacaataacattggttgggaaaccggttggaacatagtcggaaatgatcgtcggatccccgtcggaaatattttctgacaatttctctacgcttttctgacaatacattggtttcgaaaccggttggaacatagtcggaaatgatcgtcagatagtcttcggaaatattttctaacaatttctctacgcttttctgacaatacattggtttggaaaccggttagaacatagtcggaaatgatcgtcggatcctcgtcggaaatatgttgcgacaattttctaacgaatattgttgacaggcattgcatcagaacgttgttgaaaattggtcggtatattcttctgacgatttccccacaacgttattcccgagtgattaccgacgatgtatttccgacgggttaccgacgttgttcgtatttctaacgggtctaatttaattatcaattaaatatatatatttttttattaatttaaattagcatttatagaaattttttgttcaaatattataaaataaatattttaaaagtgcatatattatcctacaaaagaaaatcaaattgtttgacaaaacaacaaaattaaatttaaacaaatgcatttatagaccattgggaaaatcagaaaattttgaacgcatgaaatcaagaatcttcatgttttgctccttcaaaactaagatctccttgtctttctcctcaagctctgcaaagatatcagaatcccgtgatgggccggcataaaaatatctggtgctttggttaaggctacctaactctatcacacgacctcggtttggtggaatttcctgtatataaaaactgttagtaaaacaaatttagattatacaaaaaatgtatgttatgaaacaaatcttacctcaaaaaccatgcgattgattttttctcgggtttggacgttggatggtgaggaaccatcatcattttgaggaagttgtgtctcaacgagacctgcgatgtaaccgtcttgaattaatccagctttcttgttggtgtgtgtatcctcaatgatttctacaaaatcaggttccacacctccgttattctctggctataaatcaaataaaaaatatagttaaattaaaataaaacatgaaatcaaataagagtaaaagatttaccaattcgcttgtacggcttaagaagctcgtcgaacccgcattgtgcaccgtcatacctttgccaccacattcgcttttccgatattttgagttggttttcgcggtacaagcagtctccggcaacgctcaatactctttgtagcgaggccatatgtctgggttcaagccttttggacactcgcctgctgcccacttttctttccaaatgttcatgtggtctgaaaattttgatgcagcatacttgtgaaacccaacacggccagagggtgtgtggacatgatcccaacttaattcatgcaacaaacaaaaagaattatgttagaaagggataaccaaaaaaataatggtacgtaataataaattcattaccgcaaaagttctaaaccaaatctcttgattgttgcgaggcatatcattgtacgtcggatacggatgtttgagcatcccatgcaacatccgtaaaattgatttgaatatgccatttttagaaaaaccaaacctacatatagagataaataatatgatttctactttaaaatatttatatattaaaaacagaaaacaaaatttacttaccatgtgctcccttcaagcctttttggatggagtcgtcggagaagtgtccgccccggttgttgtactagctcctcaattgtcatcgatggaagagcaatggactgctttgactcgggaacgaacgatggtgatggtgttgtctagtatgtctgattattggatcgagtcgtagacctacgaaaatcttggcacgaagtcctaacaaataaaataatattattagtacatagtttaatataattaaaattcgtaatgtcaaaaaattaatagatatcatagtaaaataaatatcgaagtaaagattatttttaaatgaaaaatctaaaagacacctaaattattaatcaaaaccacttatttagttaaaatccattttatataatatcaattatcataatatacaaaaattaatctattaatttgtttagataattattaaatacctaaaatataaaacctaaatattaaaaattgcagcaaacaagactaacgacttgagaatttagaccaacaagactataaagctcagtcaaaaaaatgtacgacacgaaaactgtccacttctaccgaaaatgcaaatgatcatttcaggtaaaccaggtctcatagattaaacccagggacagcctactaagactgaacttatttatatagtaaaaaacaacaagagaagtagagaatgagatctcttgaacacagattcaatctgaaaacatatgattattagcttaactacattcgaaatactcattaaatttcacctgtccaataaccactttcgtttgctaataatggagcctttttttttcttttttttttttactatagagataattttgtacacggtaaaatagaaagaagaaacaaacgacgaaggattaatttcatgaattattcgatagtacttaaactgacgatagtgattggttgttagcaatgagtgattatccaaagaacaacaacgatttagtacctatatatatatttattgatctctaaattccacccaattatgcaaaatatctattcaatgtttagactaattgaaattggtagaaaagttcacttacatagttgcagagagtttgagggagatggtgaagactacaagaaaacacgtcttttgcgagggaagaaaccgtagctaatccctcgcagacaatcgcgagggaattgcgacgaaccacagttcctcgcaatacgcgtgtcgcaaagtcaaattggtagcatttctctcgcaaattttgcgacgaactaacttactcgcgaagcactcacaatttgcgaaggacaaattcggtagcaaagtagctgcaaatttatggtctcgctcattcttcgcaaattttgcgatggagttgcggggctccgttcgttccatcgcaaatccttagcaatatttgcgatggacttgcgatgtgtcaaccgacttatttgaagttttttttagcgtgattactgtttattttggctccctcattcctcgcaaaagtttcgatggagttgcgtggctcccttcgtttagtcgcaaatacctcgtaatatttgcaatggacttgtgacgtatcagcgacttatttgttgtttttgtaagcgtgattactgtttatatttagagattactgttgtaattagctttatttaatgattttcctaatttgatctgattactaagctttaaatttgaaaactgattaaaaacactaaactcataattgaaagctgaaattttcagattcaagtacacaatataagaaaccacaaaagattgtcttaagttttgataaattgtcaaactgaatacagaaattagaaagtatgagatggagaggatccagtgttggggtcagctataacagcctcaggtttgacagcctcaggtccgacagccacatgtccgatcccagcagatgtagcagctgcggcattaggctcctcgggtctcagattggagttgaccgattcagttcttgtagaggatctggctcgaaacagtgtagcaaattctggatccttatcggcaaggtagtcaaaatacgcatcaaaactggtgatcttcttagcctggtttgcaataagggcttcagcaacagccagcttctacgagagcacaactggatcatctcgaggaagcaccggaccggcatgagctgaagacgcttctgcctgtaatgaaccagctccataaatcctgcctttcttcttaggagcaacctgtcagaaactcacaaccaaaccgacaataacataatcaaagcaaagtcgaaacacattgatataatgcaaaacttttagctccagacataatcatatcaggctgaaaatacaatgacattatgcaaaccaaaaacacaacataatcaggccaaaaacacaatgacattatgcaaaccaaaaacacaacataatcaggccaaaaaacacaatgacattatgcgaacttctttcacaacataatcatatcagtttacacataatgactgaatgcaaacttcattcacaacataatcatatcagtttacacacactgacattatccaagccacaaacacaagataatcatttcagtttgacataattcaagccacaacagacaaatacaaagcaacacaaaaaactgtaactatattgagttgatgccatatgtccgacactatattgagttgaaagcgataagttacacgtgcatagatcttgttctttgcttgaacagataacccgcctgaacctgtgctctccgtagtgtcgtctgaacacaggtgagactcctcctcttgaatctttgatgacacgtcgttatagatctcctccgactttctatcgatgaaagtcccatcaggttttctatgagtctcatctaagagcaggagaaaatctggagtactttctcctatcatctcacactaaaacactaaaacagataagtcagttgtttgaaatacaaagttttttaagtaaaaaagctgattaacttacatgtttgcgggcacgagctttgtaagaggtctggccaaactcgtgtttatgtattccgcggccgtccggatcatgatatcttgcgttcttacttttgatactcttcacttccgccttaggatccctccaaaagtccacaagacccttccacacatcaggatctatccactgctgttttgcctcatctcccttttccttccactttcccttccaccgaccaatttgatcagacatcctttccttcagcttagcatcacactcaagtctaactctcttgtttattacagagtcccagttatacacttgctacaaaacaaagataagacacattagaaatagacaagaccaatagttgtaccaaacaaaacacaaattatttaacttatatcaaaggtttcaaaccaacgatcgaccactgcttctgatgtctgttaccaatttgcatgaggttctttgaaatctctttcaaaaatgctctggacagtggctgcaactgaagagtcatcgtcaaacctacaaaacaagaatccatcagacagacaaaactaaaaagagacaagtcctagtaaagagaccaaagcctagtggcttaccagagtgttcctggaggacggttagggtctaatctaggcaaaccagcacgaccaggactagcaagtagctcatctattgtcaggtcattgagtcggacagctagccgagtaatgtgattggaagaaccgcgaggggattgattgaaaggtggaggagaagtaccatctgcttagtggtttgaattgattggtgtcagtggtaatgtatggcgattactcggaaccgccgatgtgtttccttcactacgaggacgctgttgatgttgctgctgagaccgaaaccaggtataatcattcccagagaaagacatcttgcaataaaaaagaaaacattagtaaatcgatttggaaacacaaaaccctaatcagatctacaatgaaaatcaaacgaaaatgacaaaccctaattagatctacaatgaaaatcaaccgcaaacgcgaaacccttattagatctacaaataaaaactcgacagaaccctaaaacgagaaaccctaatagacttctagactctgcaacaaaatcgatttaaaaactcaattgaaaaaaccctaattagagattcgtttgaaagaaattcgtatgcttcaggataagaacaaaaactctaataaccctaatcgaacagaaactcaaaattcagaacattaccttgaagtttgatggaacagtagaggcgtagaagatgtagacacggcggcgaagaagaacagtcgtcgaagaagaagagcagtcgttgcgaagaagaacggcgccgacgaagaagatcggatcgagagagactcgactgttagaagaaaagaaaaattagggtttgagtgagaagcggctgggttcgctaaaattcgtttcacggtgtatatatgaaaataaaacgccttgcaaattgtaacgcccgcgatcctcaataggatcgttggctaggacttggtccgagagaggaaggtggagtctcggacaagtgagaaggagctggccataagctcggacaaaggggaaatcatgcaggctaagctaggatcgtaaagaaatcacttgggtcagctcgcccaaagctcaagctcagctggaaggagtgacggttactcaggtcgagtgacagtccagcttgggcagctggacgagtgacggacgagctcgaggcagctggacgagtgacggttgaactcgaggtagctggacgagtgacggacgagctcgaggtagctggacgagtgacggacgaactgggcggttatgggcgaagagatacaactcttcggaaaggtgcaactcttcggaagggcgcaactcttcggaaaggtgcaactcttcggaaaggtgcaaggaacggatgtgttgattcgggaagcatccattcgccccctatataaggaagggcgcccaggaccattccactcaccacaacacaccgaaaacacaagaaactcaccattaaaaccctctccctcttgggagaataaatagtcttaggattcggtggccgggctgtggccggcaataaagaaggagggtcggatcgacctaacctcgagaaggaaggtaagggatcctagactttgagtctaagggttctaggatgtgagttagtagtcggatccttgaaaggaccgactagagggctgagtagtatccgggtcatgtgcatcctacacaagactcggtccgggtagggatcggctgaggcggggacgcggctcggcggaggaccggcgggtcttaactgacctgccgagaatcggccggactgatgcgcgatcttcccctctctgaattctctccacggatccgagtagtgtatggcatatagagcattgcatggacttgcatatgattaagtaaataagattacttatggctctatgactttcaggaacgaacggtgatcgtgggaaggatttggcttaggcgcgagagactcaaggccgggatgatgggtggtgatagttcggatagtctagggatcgattatatgacttgtaatagcttatatgcaaactcataggttgtatcgaatcctttgcttaattaataaagtatccgattgtttgtttactctattcgtctcatatattgaatctcggaatcatatgaaacggattagactaggaaagaacctcataaacggttagggccgagtcacttagtggcttgggtcgagagaactcgcccggactttaggcagtccggatcggggcctttcacaaatccctcgcaaaattgctaaggttttgtgaggaaccgacaaccaatgaaatcgcttcaattttgcgagagacttgcgagggagccgtagcaaatccctcgcaaactagaaacgattacacaatgactcgattagggtttttggatcattttgcgagtgtgagagtcgaaactcgcacaatagaaattgttttaagggtttcttcaaagaacgaatctttgtgagattctcaaagaacaacagaattctcaattaccgcgaacggtggtcttgattgtattaatgagaaagtaatgatttgatcgtacaagtgttctagaatatgaaaataagtgtttttgccttcaaagtcagagcgtttttgataacctgaagttgagagcgtttttgtgcgtgtcccctttgtttgtccttcgctttttatagacctttggaatatcgcccctcgcgatattctcggaagatttctctttatctttaagttggtgaagtagattgtccttatcttccgaagattctgtgaatttctgtattcggtgatatctttgaagattatctcttccggggttttcggaaatgatatgtttgattttatatcggctaagtcctttttgaaggttttctcatctaacccaaactttttccgagccggaatttagctgaccttgggtcgtgctcgggcagctcggaccgtgatattcgaggatgcgttcctgaggcgtcttggagcccgcctcgggatgaattgccaggttttatgtccgaggcgttccgaggtcgggtcgggggaccatttcacgagaatgctctgaagcgttctcgatatcgcctcggtatggattcttgatgcgatctccgaggtgttttatggcccggttcgggataactcttcgacgtctcccgaggcattgaaacatggttggctcgcttacctgggtggaatccgaccccaacagtttgccccccatctcattgacttagcagagagacgatgagcttcatgaatggattcccgagccgactgttcgtcttctagttctgtcgcttcatcttcccggacggtcaaacttctgtcgcgtgttgccgactattcttgagaagtggaaacgtttctcgcttattcccgaggatcacgcggatcttttccttctgccgagcccacgcgcttgaacgcgttttgaatgtttgctgcggacccaacgcgctcttgaaaactctttatatatggcaagccactcattcgagatttcatttgaagttttcgaagaaaataaacaagtttgcttccttctctctgatcttgatattcctatcgttttttcttttctggcgaagctccgtcgttcattttgttatttttgatttctccgggatagaaattcttgttttctggttgtttcccttctcgtctatcgttcccgagccgagaatgagtcctagacagtctccgtcgatcccgagcgcttctcttgtcgattctagcgactcaaatcacccagatgatcttcccgcgatctacaaacggagagcagtttggacatcttctgaagagtatactgtttcttcttcggatgcccccgagcaggcgactcccgtcgcggctcgggaagataccaatgccgatatcgctcgggaactggatttgcccgatgatcccgagccgcctcttgttcgcaggtcttttgccccgatggctgacgaagccgagacatccaattggcgagaagtgcctgagcccttcatgccgacggttaagattgaggattttctttacttaggcccgaacgagacagaagatatcctgcgtcttaatgagcaaaaagctttcgaaaaggccgagaagaagaagaggaagaaaagcaaaaaggtgataatgccagatcctcccggctcaacattgtgcatcgagcggtctctctcggaccttagggctcgatttggccttggcgctttaaccttgggtgtgccgagccctgacgagcaagccgacaatccccctgcgggtttctataccttgtatgaggggttcttttatggttgcttcttgtggctgccaatcccgaggctggttctggagtatgtgacatcatatcagattgccctttcccagatcacgatgcgatacttgagacatttgctcgggattttgattcggagttatgaatccgaaactgaaattacgctcgctcatctcgagatcaggcgggttccaaaatccgaagtggatcggtattatatatctcctactaagggtaagaagattattgacaagttcccgagcaaggacgattcgtataccgaacacttcttctacgtggctctcggagacgttgttcacgatgatcttctcgggacggttctgacgagatggggaactttgggtagttgtagttagttagcgatatgtttacgtccgacgcgatttatatattttgtttctttttctaactagttttcctttgttgcagaacgcactctcaagtttctcgagtcgattcctgacgatttcctctcggcttatcacgcgttatcagctcagaagtgtgattggtcaaaacatttctctctggatcgagtcgaactagccctccgtcttcttcacggcgtttcctgtcctaccagttcagaatctccggaccaccgaactcaattgttcgtcgatatgcagtcaactaagctcactttgagggaggtgtacgcgaagaaaaaagaagataaagaaagacgcttggcggaagagaaacgcctcgcgaatgcaggattgattttgccgcgggtagcctctcccgatgcgactcaagaccggaatgttgctcccgaagttgcggccccggttgacccgacgccttctgaagctcaagaggtcgatcctactgctgttgcgcctttgcccgaggcggttgttgtgctacctgcgagcgacatggccgcgggtaagcgtgttcggacgaatgattcatcgtccaagaagaaaagcaagaagaagaaggcctcgagtgccgaggcgggaaaagaactccccatctttgaggaccgggtagcctctgcaaacctcctcagggggtgcgtcggtcctttgcttcctcctccggatactcttctggagtcgcggaagtatgctgaaacggcttcccactgtgcctattcaactttttcattcatcgcgtctagatctccgatatgtaattttctttatgttttctaggttgttgcttcgatgaatcgaatggtgcactcgtacgatttggccatgaggaacaacatggaggcggccaacaggttggccgaagcggatgctcggatccaagttgccgagcgagaaagagatgaggcgctctcccaagctgctgcagcgaaagtagcaaaggaggaaggcgaaaaggaggctttcgtgaacaaggcgaatgccattaagatggccgagctgaacctaagggcggactccgaggttgttcgcctcaaaggcatgctggccgaggcgagggggcttcgtgatagcgaagtggctcgggcttctcaaacggcaaagcgtgagacctccgaggttttcgtcgccagacttaaggccgccgagcagaaagtctcgcttctcgatgggatcaacgatcagtttatatacttatcccaggcgcggcctaatgcgcaactgatcaaggcacttgaggaaggtggagagttggcgaccgagaaagaccaggtcgaagaatggctgaaagacttcgccaatgccgaggtaaattttgccaattttgtcgccgagctgaaagaggaactcaaggctcctgttcccgaccccgctcctttaagtccgggtggtcacaaatcggtcgagacccttgctgactaggcgggagttgttaaccagtctgggtcacttctgcctgctgaggacattcgcccgtctgtagatctcgactaaacgcccgactcgggatttgtctttttttttttttcttttttttttgtcttcgtacttgtgtctggatggctttatccaatgatttctagaacttatgcctggatggctttatccattttgcaatatgaaatacttggtgggattctaaaaacccgaaccgttttattgtctcatatgattcagttgaagtatgggtgaaacgagatggggtatcggtgtttgagtatgaccgggtttctgaagatagaaatttcttctcaaaaaatctggaagaatttatcttgtatttatatagcgcgctgtagccgagcaggcgtaaaagatactccgagccgtcgctcatcgtatgtagccgaagggtttaaaagttgaaccgaatttttattatttatgccgaagctagtactcgtacaaaataataagtgggagtatggatatacggacccactccccccttttttaatgggggggtagctgaactcgtccgaaaacgagctgcttacgtacccttttcagggatcaagccacctcgtagttcaagtttagtcacctcggatttagttgtagtatttccttaggtgcattgctttccatgaccttggaacggctttgccgcttaagtcagcgagctcatacactacgagtcggatgactttagaaattaagtacggtccttcccagttcgtcccgagctttccagcgttcggtttggcagtgttctggaaaaattttcggaggacccgatctccttcatggaatcttcgttgccgaacatttgagttgtaatgacgagccgtttcattctgataattttgtatgcgaaccagggctgaactcttcgttcatcgatcagatcgagttcgtcgaggagcctttgagcgttatcaggggtgttctcgggggatacactccgacgtaggctcgacactatcatctcggctggaattacgcattccgttccgtagactaaggcgaaaggggtttctcccgtggctcggcgaggagttttccgatgcgaccaaagtacaccttcgagttcgtcggaccacgagccctttttagcatcgagccatttcttcaatccgtcgaggattattttgttagcggcttcggcttggccgtttctttggggatatcgtggtgttgacttgctaagttgaattccccatttatcacagaagccttggaagcgggttgatataaactgcgagccgttatccgtgacaatctcataaggtatcccgtggcgacataggatatgtttccacacgaagttgtcgacttgagcgtcctttatgctggcgtaagattcggcttctatccacttagagaaatagtcggtcaggacgagaactaattttttttgcttcgagggatacataagtccaattatatccattgaccatcacatgaaaggatacggcgaggcgattgatgacaagagctcggccggctgatgaattgttggcgcatgcctttgacattttttgcatcgttttgaaaaaatttcgcagtctttgatcattgtcggccagaagaatccgtggcgttttattttaatggctaaggcccttcccccggaatgatttccgcacgagccaccgtgaatttccttcatgatcttgcaagtcacttctccttccacgcatgtcatcaagggtctggataatcgccacttgtaaagtttttcatctattagaggaaacgtgcagcctgagctttgagtttccgagctttccatttgtccgagggcaatttcccttcggatatatagcttatgatgggttccatccatactgagctgcagtcacctgggtcgtcttgatccgcgctgacttgtattgggaggacgtgttcttcttcgccgagctcaattcttggcttctcaatgaattccactgggatgactcttcttaggctcgggtcagatgtcgaggctagagcagctaaggcgtcagccgatgtattttctcctcgtggaattcttgtcaactcgaattcgtcgaaattcttcgctagattttgaacatgaattaggtaggcttccatcttttcgtcccgagccgtgtattctccgttgaattgattcgtgacgagctaagaatcacaaaaagctcggatttttcctatctttagtccccgagctagattaagtccggcaacgagcgcttcgtactcggccacattgttggtagctttgaagtttaatctaaatgactgctcgaggacctctcctgttggtgaggtgaggcggatgcctacacccgagccttgcttcgatgacgagccatctacgtgtagaagccaagttgtgtcgagcggattttcccgagcctccttagtgggtagttcgacaatgaaatcggctagaacttgcgactttgcacatgttttgttccgatactcgatgtcgtattcgctgagctcgattgcccacttagccagacatcctgattggcttggactgtgtaagatggcgcggagtggcatggatcccattactatgatggaatggaattggaagtaaggtcgcagctttcgagccgacattacgactcctaaagcaagtttttccatttgcggataacgagattccgcgccggtgaaggtctgcgagacgtaaaaaatcggtttctgctggcctctgtcttctcggactaacactccgctgaccgcaatatccgatacgacaacatacaagtatagtggttctccgattacgggttttgcgaggatgggtggagtttccaggtacttcttgagttcctgaaaagcttcttcgcatcgggtcgtccattcgaactttttgtttccccgaagcacatcgtaaaaggctaagcatttgtcggttgagcgagagatgaaacggttaagggccgcaacccttccggttaggcgctgcacttctcgcttgttctgaggtgacgccattcccaacaatgcctcgatttgcttcggatttgcctcgatgccgcggtgcgtgactaggtatccgaggaactcgccagatcttactccgtagcggcattttgcaggattgagcttgacgttgtagaggttgagctgcttgaaacattcgcgtaaatgggatatgtgatctttttttgtcatggatttcaccaacatgtcgtcgatgtaaacttccattgtcttcccgatctgtaatgcgaagattttgttgacgaagcgttgataggttgccccagcgttcttgagtccgaagggcatcactcggtaacaaaaaatgccttgttctttgtaaaaaacggttttttcttgatcttcggggttcatcatgatctggttgtaaccagcgaatcgtccatgaatgacagtagtttgtttccagaagttgattctacgaggcggtcgatgtgtggtaataggaagctgtctttcgagcaggctttgttaaggtctgtgaaatctacgcagaccctccatttgccatttttcatttctactacgaccgggttcgcgatccaatcgggatatttcgcctcggtgatggatccgatcctcaataatttctctacctcagctttcacggcttctgctcgctcccgacccaattttctcctcttctgcttgatgggcttgaaagtcggatcgatgttgagctcgttcgatacgatgtcaacacttactccgggcaaatcttctggggaccaggcgaatgtattgacgttttctttaaggaaagctgtgagttcagctgttagttcttctcccagatctccgccgatttctacgcatcgctcgggcttttcgtcgtcaaggcagattaagaataccggatcgggagttggtgttgcagattcccgagcctcctcgatccttagctgttataactgctcaaagattgacttctcttcagctcg

SEQ ID NO: 521 - DNA, 69752 bp, Arabidopsis thaliana
aagcttggccttcttatgattcatgtcggccgtcgattcagtgacggggttcctgagcttgtgtgctgccatgaagtagatgcgaccatttttctgatttccccagatggttttcacgctgtcgcttgtgggaaatttcaggcagagatgatacgtcgaggcggaagctcggaattgatttaaccatggtgtgccgataattgcgttgtacacggtcggctggtcagtaacagagaaatcgacgatttttgttacccctttggctcggactggtaatttgatggtgctgagagtcatagtggtttccccagagaatccgagcactggtcgtggagttggtacgatttgcgtcatgtcgatcttcatttctcgcagagttgtaaggaaaatgatgtctagtgtgcttcccgtgtcgactaggactcgttcgacgttgaaatcaccgatggtcagtgtaatgactaaaggatcgttgtgcggacggtctaaatcgttggtatcgctttcgtgaaaggttacttcgtcatttggcccattaaatggccgcgcctagttatgatttgcgtcggcctttctttgataagccttgattgatgccgccgtgtcttgacagaaagccgaatcccctaaaactgtgaagattcttccccgagcagcttctggctcatcgtcgtctgcttcgcgattacctcggcctcttttgggtccttcggaattcgccgcgggggctgcctgctcgggattggccacagcgttgacctgctcggtttttcctttttccgcttctaagtctttgatggtcaaacctccaccgatctctctggctaggaattttgctgacaaccttgctctgaggctacgacatctggaagtatgatggccgtaactcttatgcaactcacaatatttctgctcgtttcctgcgggttgatcctttgtccaagtgtaggattctcgaccgcgtcctcgaccgcggccttgtcctcggcctcaggcggcttcgcctcagggtgtatcagcctggtaattatgggctctggagaaatttcgcccttcatggtgaacgaatgtcccgccttgagcaccctttttgtgattcggagcactgggttgggatttatcgatgcgaggcgttttcttggacggttcgtgtcttttggctaatagttccatttcttcttcatgggatacgttatccaaggctcggtgcaaggcgtctcggattgtaagtggtttggacaaatttaattcctttcgaaattcggatttataccacagtgctttcttcagagtagagagagccgctaagtcgttgattccttcgactttggctagggtagatcggaattttgcgaggaagtctcgaagtggctcattaggttgctgagatagtgaccataggtcggcgtctgatgtgctgggatcgattagcaccgaatattgcttcaggaagagtgtcgatagctcctgaaaactgtccacagaatttcctttgagtcttgtgaaccaattcagagctggccctttcaagtgctcgacgaacaggtgacagagaccggcgtctctttcttctggtctgaatttggctcgggccacggagatgatgaataacttcaagtgtccttttgggtcggaagatccgttgaagtactcgattcttagttttcctggatccgagattatcgcgttggaaatcatgtgtgtgaacggtgtgttgtgggactcttccagaatgcggtcgatgttcggggccgaggagactgcgttatgcatttgggatctcacgagcttcatctcgttctctgccttggctagggagagcttgatggcgcttatctcctgttctgtggcgtattcttcagcccacctaatgttctcttctaaatctttatcgtccgagaccccgatatgatcggcctcagtaacctctgctcggggaggagggagctgcggtttgtttctttctgttcgctttgtttcccgatttcccaaaatcgctggctcggttcggtctcttccgatttccggtgcggttcggcggacgggccttgtagtattgccaggcgtgtggaacacgaaccgtgtggggttgagatctgctgctgctcgtcgatcctgaagatgcctcgcgccgaaacgagtagtcctgatctgtccttgggaagtagctgcttcgagttgttgtgccaaggatcgatttgcctgttcttgatcgttcaccttctgctgaagttgagccatcatacttcttagttccgctagggtcacaggagtagcggcttcaggaacgtctgtctggattggagggattgggttcccctctacatcaactgtgttaccggggatttgattgttgaccattgtgaattgggtggttggttttgtgttccgggagtaagagaaatgtcaagtcccctccttctagcgccaaattgtgagagtcaaaactcgcacaatagaaatagttttaagggtttcttcaaagaacgaatctttgtgagattctcaaagaacaacagaattctcaattaccgcggacggtgttcttgattgtattaatgagaaagtaatgatttgatcgtacaagtgttctagaatatgaaaataagtgtttttgccttcaaagtcagagcgtttttgataacctgaagttgagagcgtttttgtgcgtgtcccctttgtttgtccttcgaggtgctttttatagagatttgcaatatcgccccacgcgatattctctgaagatttctctttatctttaagttggtgaaggagattgtccttatcttccaaagattctgtgaatttctgtattcggtgatatctttgaagattatctcttccggggttttcggaaatgatatgtttgatcttatatcggctaagtcctttttgaaggttttctcatctaacccaaagtttttccaagccggaatttagctgaccttgggtcgtgctcgggcagctcggaccgtgatattcgaggatgcgttcccgaggcatcttggagcccgcctcgggatgaattgccaggttttatgtccgaggcattctgaggtcgggtcaggggaccatttcacgagaatgctccgaagcgttctcgatatcgtctcggtatggattcttgatacgatctccgaggtgttttgtggcccggttcgggataacgcttcgacgtctcccgaggcgttaaaacatggttggctcgcttacctgggtggaatccgaccccaacagcgagggcgttccgagattttgtaggaaatccctcgcaaattgctagagttttgcgagggaaaggttttaaaagaaaataaaattttgcggggtatagagtgttttctgcttactttgcgagggagttgcgagattttgtagtaaatccctcgcaaattgctagggtcttgcgagagattggtttaggattaaaataaaatgtatttatgataaaaagaacaacaaaatgcgaaattataattataagtttaaaattaataaaattattttctgaatttatttatttatttatttatttattatacttggtaaaaacatcgaaagttcacaataaataataacatttattctgattcattttctgaatcagtacgatcattttctgactcaacatcttcatcagattagccaaattcgtctggttgttcttcttcttcggaaccgtccgtcatgatgtcttctaattctctgttttgtaggtcaatgtggataatatcttctgttgttatgtctagaatggaaacttctctaactttttcttgttgcatcacaatatcatcaactaaaccgactatgcggcccctgggattcactttaataacgggcaaccacacttcacgccgtgacctcacacgcgggtaatatagaaagcttacttgtcctgcttgtgatgctaggataaatggttcgaacttggcataagtcttgtttgcattgatatcgaccatgcctaagttatttacacgtacccctggaccgatcaccggatcaaactaatcacacttgaacatgatgcatttcaaattaaaaagtctcggatattcgacttctagaatttgttgcagaatcccataaaactcagttttaccttcgacatggattccataatttgcaattgccctttgacttccatatggatacgtatggaaagtatagccgcgagtgaagtacatcagagcagttctgatcttagatcttggttcttgaacaagctcatgcaaccaaagtggtaatggttcgtttccacatccatttataacctacacatagaaaatattaaatttgtcatttttaaaagtaaataagtaatagaatttttactttcaaatattcttatacttacatagtattttaaccatccagcaaaatcacgatctttgtaagtttcatactctttttcttctaatccaggacatgcttcacggatttgtgaatcaaataacctacaaattaaaatgtagctgtttaattagcttccttaattaatatcacactaattattaaatataaaaattatgaataaaactaggttgctttatacctttcaaatttttgaatgtaatcaactaagtatgtaattgtgagctgcgcgagaaagcgcatggtcgtcccaccaaacttctttcaacttccctgcgagtctaccaatttgggcataggtatctggaacatcaggaacgttatatgtaggtgcaacgccttcatcgtcatatcgtcgaggacgagtctttttggttctaacgcttggactaaagatactttgtttgtgccaattgtgagtgcttccatattcatcaggcatatttgtcggggtgtgccaattacctccacgtttgcatgtttcctgagcaccataaaaattgatctggtcaaacaaatcatttcgagaaacataagatggcgaaggaagacagactactttattcttcctaaagagtttcttgttcctccgatacggatgatgcaggggaagaaaccgacggtgaagaaaccgacggtgactgaagctatctcttgtcaaaacgatgactcgtgtcttttccgctaggaaatccatacatcagctcgagatgctcgattggaagccgatattctacgtcatacacacagaactacaagtatcccaaacttccgtctggcctgattccatcgtcttgtgactctccatataagaacaattccacggatgaaagaaactggatggtctcttccttatacccctccattggccgaaacatgtgaatattcaggctgcattgcttaaacatgtactctacatcatcatagatgcaaggtttctccatggtctcaggttgagggtatcgagttcctaaaaactcattgcgcttcagcagcttgtagtactcgtttccagttgcacacttctctaattccaaatcatcaccacctcctctctctgtttgatcagcttcctctggtgaagctatttcttcctcagagtcttcatctaccagttccaacctcctccccacgggcgtcttttctcgagtgatgtctgccttgttccttgagaattcccttgcggaggacttactcgactttcaggaccgagtatttctagcaggagagctaaaaatttcttcttcttgcatcacttcctcctcttggcttgattcactgtgatcgatctcgaaacttgcttgttctctcctactcgaccccttgggtgatggttcagaaagtcctcgagctgctgcatgcgaagaaggtgttgggtacctcttcgatggggagagagctctgttctggatccttgacaggagcgtgcgcctgtttgtcattgagaaagagagactcaaaggttaagagatcgagtgatgaagaaaatagatggattttgttgagtttttgatagaaagaggaagtgcaagagaaagagatagagagagatatgagcattcgagattgctttggtatgggaggttgagagatgaggttgttgagttcgggaattgcaatggggggaccaaagcgattatggggggggggaaagaagacaaagagacaacagcgtttcaatggaggcgggtcacgaggcgtcagagtccacaaggtggtctctttggtttcttcactcgatctgacggtggagaatgctttgcttttgatcactcgatcaaacggaccagaataaacctcaagaagtcactcgatgaaacggtggtgatgcttctctcatttggattcaaataaccggcttaaagctctcctcctcactttactcgatcaattgttgagatgattcttgacttgttttgaatttactcaaccgttgacttccttagggtcaataaaacaaacttgaaacacttaaacaaaagcatcaaaaacaacaagaaaaatggaaagttatataaatggatagactttatagagcttagggtcctcccaagtgagcttgttttaagtcactaagattgacttttatagagcttagtcagaaaaagggttgaagagaggaacatagaagtcctcatcttcagtggttgaattttcagtgcatgaatcatactctgcatcctctcttgacatatggtatgatgagtactcatttgatttttcttcaaaataagcctctttttgattagtagagtagtcttcttcttctgaaccaggctcctttgaccaatcctcaatttcaaagttgtggtagcctttaaccatttcttgaagttctagaatggtgctatttaactcttccatcttatgggttgactttccaattgtatcctcctgagcattatatccaatccagagctccaggagtttttcagcaaaagaatcaagaatcaactgttcttcttcagcagagggatttgtgggcggtttaggctctcctggagaataagtcggaatagagatttcctcctcactcaacgactcgctctctaggcttctttcctctaagtgaactcctttctgatcttctggtgcaaaccattctctagtgaaatcttcgtcctctttgataggtagtgtagtttccatcttctctggatcaataccagttgaaaacttattaactcttttttcaaacatccatagttgatctttcagcttcatcacccttgaagagaatccttctatgactctgctttgccatttaaattttttcctcatctcataccagtcatcttctgtaggatcttcagtctgagctaacccatgaggatgtgcaacagaaacatcagctaagagtaaagctaagttgcagaacttgtattccatgatccctaaccttttagcagtagagagaggcataaggctaacagatgctcccaaatatcaaaagcacctattgaatgtcaatggtcctagagagcatggcaaagtgaatgaaccgggatcatcaagcttttcttggatgactttcttcttgtatgtttcttgagtgctgactctactaatcatctcttgattctgatccttcttgagttttttaattttgaacttttttccaaaatggtgagtattcagcaaaggtgtgtgctctatagtccagatgaattgctgggtagcaggtgcagcaatttgagttgaatcccctccttcttgaatcatattgtccgcagtattgggagtccgatgacttggtggagactcatcttcttggtggatggtgatagcattagcattagcatagtccttaggattctggaccgcttttcttggaagttgctgaggatgcttcggagcagaggttgatgcaaattgactctccacatacttgattttggaattcagagcttcaaacttgacattaagatcgttgtaagaacaatcgatcttgttgtataattcagctatcttcttatcaaaagccatagcgccagtagcttgtcctcgaatgatttgttgaatgagttgcttaatttcaggatcttgagctgatggggcttgttgtggttgttgagtgaaccctggtggtggattcggctgttggtagctgataataggtttttaagatcaattaatcctaaagcactatcatgtcgttgtagtcttttaggttgtcaatccaaatgggtgtcatgctaacaatcaagatgtgatcagaagtcactaagtcaagcaaagcaataacatgttttggtgtgttctagcagttctaaatgaacatgcataaaacagaaattcaagcagaaacaataaaacactcgaccaacacaactctttgcagagcactgggtgaggtcgagtgacaggtcgagtaacagacagaaagtataacacagttattcgactgcatagtctgttgccagacaactgggtggtcgagtaacgaaaaagaattgtagaaattaagcaacagatgacaagatgcagtaaacaacagtagtgtaaacaaagaattcaatcagataaagaattctcgaggatggggtaattgagtagtttcgtttcctcagtttacaagtgattgacatgctcaataaattatccctagacaacaagttcgttaaccaaatctaagtgtcaccgcaatagagatcctcaagttaacctagtcccagactcaatcaccattgacgagagctcacctaacatgcattacgaatcaacaagttaaagccaaaacgctccctgcaaccaataccttggtacagggccatgaatctctggaattagtggttcagacatttcatcgaacatcttttgggcgcggaaatgtctgggctcaaattccagttgatcagaaagcaataggcattaagaacaactaatccagaagggatctatcaatcaatactcaaccacctaacatactgagaattctacactactctaacccatcctcagaaacctattcactacttagacatcatagcagaaagcataaacgttgaacaggttgaaaacatgataacaacagtgtaacagcaggatgataacagaatgaacaacagtaaaagaaatcaaaaataaatactgaatactgaataaataaagagaaatccggattactaaaggtctagaacacagtgtctgcggaataaaactagataaaaacttgtttgcaaaaatgtgaagtacatgctacttatagcaaaatattccgaaaccctaatacttaaaacgacgcagtattgggacggattaagaattgtactcgacccaggtggtcgagtgggaggtcgagttaatagatggagtcttcttttcttccttgtgctcgagtgtctggttgagtgcggaatgaagaagactctgaagctcgcaatcgagtatgtagccgagtggtggtgatggtgatactcgatttcaaggtagagtggtgagatcgagtggttgtctggtaatggtggtgaagacactcgacctcggggtcgagtgaggtgatcgagtgatggtcaggtgatggagatgaagacactcgacctcgtggtcgagtggtgaggtgaatttgtgatgtcctctactcgaccagggggtcgagtggtcttctgaggttgtgaagcgtctactcgacatgggagtcgagtggttttacatgatcagatccgcttcttccaattagctcgtcaacagctccgaatcacctgaaaacaacacaaatatgcaacatgcatgcaaaactatcctaaacatgcaaagtgatgacaaatgatgagaaatggtataaaaagtgatgatatgatgctaaagtgatgacaaatggatgctcaaaacatgcaaaatacacacttatcaactccttcaaacgtagtctttgcttgccctcaagcaaacaatcaagaacaagctggaagtgaggtttgaaagcggggactaagagccaaagcaccagataaacaagatgaaatcaatctccaagttgaaagttctaatctacaatatgatcgaattctactcaaaaacgttagccatacctcattatcaatcaatctgactcatatgctcgacctacacatgttttcaaatctatcaatccctttaacattcattagttttgtaacatgaatcaagcaatgcatcatcaatgaactcatttggctaaggtaaaaggtcaagagacaaagatggtcccttacagaataggcttcagtaacaggggatctctcaaaaaatgattaagctttagtagaatgctaaaggtaagtcccaagctatgcatacagagataagatcccatctacccagagtatatcaaatgaagctctaatggtaatcccatctccaatcccaatataagaacttaactctaccctttgcattcatgaatcttttaagccctttttctaatcattcttttcttttctcttaactctaggagaagctttctcaacactttgatacatctagcggatttggatttctttaacaactaagattcctgtttttaacattttaaaaccaaggggttttgcccatcttcaatagataacaaaactctttcttttctttacaaatcccaaaacctttactagactttttctgcttctttagcttacttcacctagagtcttctaccttttcttatcaatgaatcaaccttttttttttctttaaacacatcccaacccaaagtataagcgcccacctagtcatatctagtccgaaaaatgcgaactagaactacatgagacactatctctgtcgttacgaacctaacactttctacaaggcttaatcggaataagacctcacaaacactcacaagtgatatagggcttgaaagaaagtctaggtttgggtttgggttaactgctctaataaggagagtcagctacttggattaacaagagtgatcaaaatgaataagaaaatccaagtattttagggtatccatgagttcaaatttgatgcagacatgataattaaagatcagattcaggttcaaatggatagggaatgttatcagatcatgacaatgtggtcgtgtagagcagtctaggcatggttcagttttatttcaaattcattgattatgcaacagacaacaagcaacgagggcactgagtttatccggtgaaccaaaatgcttacaaggctatctcatcattatcccctatgcacatgcaacaatcctaaatgaaacactctagactcaatcctaaatgtaatgcaattacatgaacactctttttttgtgaaatcattttcttaaattttttaaattttttggtttttctatgccttagatgaatgcagactcaagaatatatacaatgcaacacacacttcctgagccctcccctaaacttaaatcacacagaccactgtgtgaataaacttggaagagagtacacaggacaaatccaatcacagaaacaaaataaagaacaaatcacaacagatgatataatacaatggtgaagtgaggcgcttaccttagtcgaagaatgaacggagttggtcgtcaatggctgcatgtgattgctcccaggccatagacgaaccgccttgttccgtatcagctccagcaggtgggtactcgacctcatcagctctgtggcagccagcaccgctctgaggatactcgacctctcttcttctactgcggtcagcaccgcggtcgcgtaaactacgagactgtagaagtcgtctgctccttctgctagatcgagtgagtgtggtcctcctctcctcccagattcacgaggctcgaatgatgaatgcctcgcagggacatgcggaatctcttgctctctaggctcaggcctgcgccgacttggctcgggcgcgtcatatctcctcgaaggcatgtcctgagaaagttgtccctgcggaatggctgtagtggaagaggagcagctgatcttgtccttcagaaacttgatagccctgaggcacttgacgagtagcttatcctgtttcttgcaccacttctgcagcttgctgtttttcctgtgagcttcgctcaaactcttgctttccctcgctggaggtatatgctcactgaaatgatacatgcttgtgttgaactccgcctcatctatatcatctgtctcatcaacatcttctgttggagctccttcggtgtgactaacatcatcagttggcggactgccctcaaaataaagatcttcaagcgcaggcttgaagtcaatgttccttccctcgagaatcctagtagcgtcaatgcaggggagaagaatgttggcgattctaatcgatgaatgctcgaacctgtagcggtggaagtcgccagccatgtcaaactccaagaactcacatcggcgcaaattatccaagtccatcatcctcagtgctaaacctggttccttgagcggtactccacaagcttccagaattggcatcacaacgccacccacgcatagtgctcctctcaccttcttctttccgttcatcaacgcccacttcctatatccacacaggtggatcaacagacatttctggtggtgcgttgttgagatcgcctctcaagacattctttcctttcgtacggcggagaatccctgtaagcgcggaatctatcatctccatgtccgtgttagacacggtgcttgtagactccctggagtaaaagacgttggcaaccgagcgctgaaagtagcagatcacaggactttggatttggttgctcttagaccgcgccaagtttagcggtagattgttccctatagtggcccacaaatctttaagctcctctctgtcaaatctgggtttggttccctttccactagggaaaccaaacagttcttccaacttcttgatcgcaagctgataccgctgttcatccactaagaacgtcaagaagcctaaccccatggtatccagctcaaagtctgtgagtccctcatacatctccacttgaagtgtggaaagaaactcgattgtctcctcctaataagcagcgtaagggtaagacatgagtgtctccagatgacacttctcgaacagatgctgcacgtcctctagtaaccccagctgggctaaagtctcatagcacgaatacctcgttccccagaagtcattcatcttaaagaatctgatatactcctccactgtaacctcgtcaggtttgttccgcagctttgtctccttacgccatgactcttgctcatactcagttccgatgtcctcatcaatcagctcatatctactcgacatcgccctctttcctctggcgatttcagcacttctctgattacgtcgagttgcagagcattcaaattcatccctgaagctctggtaaacatgttgctctctcggtctagcggaccaggactcagcttcatccacattataatcagggtccgaagaggattctccactgtagttactcatgatgaaacctgaaaacaaatgtaactcaaaaattaacgttaatacgttagttccaacaaaaccaaaaacacaatccaacagagtaaaccggtcgagtgtaccaaattttttcttcttcttcttctttttttcggtttggtgaactcgtggtcgagtgactgtgagcttgaaaggcagaggtgttcttgtggtgaagtcgagtgaagcgaatgtgacggtcaagtgaaacggagacgaatgagaggtggtggtggcaaagagacgaaagcagcggcgatcgagtgatggaatcgaacacttgaggaagtttggtgtgtggaaaaagatgttgaggtcgagtatatgaagaagatggtgaggaggtcgagtggttgagagtatgagagttggtttgttggtgatgatgaatgaggagggatggggtagagtttaataggtgtggaggagataacgaggtcgagtaagtgataggtgagggatggtgatggcgtcgaggtcgagtgatgggttgagataggatagggtgagggagtcgagtggttgtgagaagaaggtgttggatttcttgtctgttggttaggagcatgggagacatagggtgcagcagtgggttcctcgtttgtctccttgttatgagttattattctttcttcactaggaaagtctcaggaaatccaacaatcttctgtaaactttataaactcccagtaagactctgtagcttctgttggtcgagtgaaatgatgatttaaaagtttttaggttttaaacatcactcacactcgaccaatgtactcgatctctaggccatcagtagagtaaaagttttgaatttttactctaccttcacgttattcccattttttttttttgagaaccacaaacacaactaaaacaaatcaaaaataacaagaaagtaaaaattatttacaatgataatcatgggacttcctcccaagtaagcttgtttaaagtctctagcttgactcctcacacttatcaagaagaaaatgaatgatagagaggatctgcacaatcctctctgatatcatcatcatactcagcgtcctccctggagaggtctacagcagaatactcaattcccctttcttcaaaataggcttccttctcttctagagggtaatctgtctcttcagaccatcttgaagtgaatttttttctcgggatagtgttaatcccgcctttaggttgagcttccttctgcatctgattcagcttactcctaagttcctcaacagagtgagctagcctctctatagtttcttcttgcgtatcagacctctttttaagtttctttactctttcagtctcatatccttctccactctatcatttctagagatttttccatcttctgttgacccttgtggagttttgttgatgtcaaactgcaacttgatgtgctttccaaggttaaggcttattttcccttccctgatatctatcactgctcccactgaagctaagaagggtcttcccaggattaagggatccttatgctttacttccatattcagcaccacgaagtcagtaggcacttctactccattaatcatgactggtagatctttcagcatgccgaagggttttctagaagacctatccgcaaggatcaaagtcaggtcacaaggtttatagtgaatgaactctaaccttcttcccatagagagtggcattaagctgacagaggctccgagatcgcacagaaaatcgctgaaagctaattccccaatggaacatggtagagtgaaagatccaggatcttctaacttctcttgaacaatcctcttatcaacaactcgagatggagtggcatcactttcatcatctgaatcgtgatacatcttgatcttttccagtatcaaatttctcacatctttgtgatgatctggaatcaggttgagaacttccatcagtggcatcactgcttcaatctcgtctagctgcttcgctgcaacagacttgtatctctcgatccacgctttcctaaatgtccacggaagagcacgtgagggtaatggagtaggtttgaatcgtttcaccattctctcgattatggcggccttctcttccgaggtggattgaatgagatggtgagaaccagcagaatggttgaattcaatcacagagacttcaatctgagtacaagcctccccttcttgaacatcactctccccaatgattaaatcaaggacaggtcgagttggcagctctcgatcatggcagatggtgatggcgtgagcagttgcatactcctttggattctgtatggacttccctggaagtcctgtgactttaggtacagaggtagatgctgattgtccttccaaatatctgactttggtattcaatgcctccactttggcattcaggtcattgtagttgcagtctagcttatggtgcaattcggataatttcttaggaatttccattgagcttgatgcttgtccctgtagcagctgttgtaccatctgtttcatttcagcatcaggagcagtaggaccttggttttcctgaggtgcaaacccatgtggtggttgtggctggtagttcccctggaattgctgcttgggaacgaaaccttggttgtagagaacaaaaggtttgttctgaccttgttgttgctgtggaggatacacatgatcctgaggattagcaacgttggtgctgcggtaggagaggttggggttattggttttgaagttgttgtatcctttgtagccaccctggttgttgttgatgtagctgacttcttccaactggttaccctccccatcttggacttgaaattgctcgtcatcaacaaggaagtgcacatgcttctgctggctaagaagaatcctgtcgagcttgtcattcatcgccttgatctccttcctgtgtttgtcatcagagtcagcggttcctctaacggtcctatcgtagtcctcgttgtaattgccatctgattgagcaaggttctcaaccaattcctagccttcttcaacatctttgttttggaaatttccactgcaggcggtatccagaagcattatgatgtgtggtaggactcctctgtaagagtgttgttcagagaggctttagtaaagccatgatgagggcattggttggtgtaacccttgaaacgctcccatgcttcacagaagctttcaccagccttctgtaaaaagccagacatctcatttctgagtcttgcagttctggcattggagaagaactttgatagaaaagccttcttgcaatcatccaggtggtgattgagtcatgggacagattcttctcccagatgtgtgctttgtcgcccaaggagaatggaaacaaacggagcttgaatccgtcttcactaacaccattgatctttgttaggttgcagagcctatcgaattcatcaaggtggtcgagtggatcctccattggcagaccatggaatttgttcccctgaattatcgagatgagaccactcttaatctcaaagttgttgttctggatagcaggaggtgcaattcctttcctctgacggtgatcacgtggtgcatctccagcaccaacgttggtagggccattttgttgattttgttcgtcagccatttcgagtggttgctgaggtacaaggttgactgtgtttctcctttctctgagttcgcgagctattcggtcgatgttctcgttgaaaaggaggttctgattgcctgttgatcgagttggcatacagtagaggtgtacctggatcaagaagacaacaagaaaaacacacagttagtaactgaaaagaaaattgaaaaagaacttgatctaagcaagtctgaaatctcaaatgtaacaaacaaacacccaattggcaacggcgccaaattgataatagatttttcagtcaattatcctaaaacaccaatcatgtcgttgtagtattttaggttgtcaatccaaatgggtgtgatgctaacaatcaagatgtgatcagaagtcactaagtcaagccaagcaataacaggttttggtgtgttctagcagttctaaatgaacatgcagaaaacaaaaattcaagcagaaacaataaaacactcgaccaacacaacttttgcagagcactaggtgaggtcgagtaacagacagaaagtataacacagttactcgactgcacagtctgttgccagacaactgggtggtcgagtatgaggttgagtaacaagaaagaattgcagaaattaagcaacagatgacaagatgcagtaaacaacagtagtgtaaacaaagaactcaataagataaagaattcccgaggatggggtaattgagtagtttcgtttcctcagtttacaggtgattgacatgctcaataaattatccctagacaataaattcattaaccaaatctaagtgccaccgcaatagagaccctcaagttaacctagtcccagactcaattaccattgacgagagctaacctaacaggcattacgaatcaacaagttaaagccaaaacactccctccaaccaataccttggtacagggtcacgaatctctggaattaatggttcagacatttcatcgaacacgttttgggcgcggaaatgtctgggctcaaattccagttgatcagaaagcaataggcattaagaacaactaatccagaagggatctatcaatcaatactcaaccacctagcatactgagaattctacactactctaacccatcctcagaaacctattcactacttagacatcatagcagaaagcataaacgttgaacaggttgaaaacatgataacaacagtgtaacagcaggatgataacagaatgaacaacagtaaaagaaatccaaaacaaatactgaatactgaataaataaagagaaattcggattacaaaaggtctagaacacagtgtctgcagaataaaactagaaaaaaacttgtttgcgaaaatgtgaagtacatgcaacttatagcaaaatattctgaaaccctaatacttaaaacgacgcagtattaggacggattaagaactgtactcgacccaggtggtcgagtaggaggtcgagtgaatagctggagtcttcttttcttccttgtactcgagtgtctggttgagtgcggaatgaaaaagactctgaagctcttaatcgagtatgtagtcgagtggtggtgatggtgatactcgatttcaaggtagagtggtgagatcgagtggttgtctggtaatggtggtgaagacactcgacctcggggtcgagtgaggtgatcgagtgatggtcaggtgatggagatgaagacattctacctcgtggtcgagtggtgaggtgaagtggtgatgtcctctactcgaccagggggtcgagtggtctgctgaggttgtgaagcgtctactcgacctgggggtcgagtggttttgcatgatcaggtccgcttcttccaattagctcgtcaatagcttcgaatcaccttaaaacaacacaaatatgcaacatgcatgcaaaactatcctaaacatgtaaagtgatgacaaatgatgagaaattgtataaaacagtgatgatatgatgctaaagtgatgacaaatggatgctcaaaacatgcaaaatacacactattcagtagcctccattaaactgttgtttagggacataaccttggttgtgttgaacaaaaggcttagactgattatgttgtggtggatacacttgatcttgggggttagctacattagtgcttctgtaggagaggtttgggttgggcttgtagttgttgtagcccttgttgaaccctcctttgttctgaatgtaacacagctagctcttcagtctgatcattcccccttcttgcatttggaagtgctcttcatcagtgatgtagtgtatctgcttctgctgagccaacaacaacttgtctagcttttcatccagagccttgatatctttgctctatttatcctcagttcctccagttcctctcattgagcgatcatagtcttcattgtagcatccatcagattgtgctagatttttgaccaactaacatccttctgctacatccttgttcaggaagtttccatttgaggcagtgtcgagtagtattctgatctttggtaaagctcctctttagactatgctcaataatgaagctttcttgaaactatgatggggacactgagtggtgtagcttttaatcctctctcaagcttcacagaaagtttcattgtttttctgtgtgaagcctgagatctcgttcctcaatttagatgtgcgagcattaaagaagaacttggcaagaaacgctttcttacaatcatcccaggaggtgatgaagtctgggggcagagtcttctcccagttgtatgccatgtctcccaaagagaagggaaatagtctgagcttaaacatatcttcagtgacaccattgatcttggtaaggccagagagcctatcaaagctatcaagatggtctaggggatcttccataggtagaccatgaaacttgtttgcttgtatcattgagatgagaccactcttgatctcaaaattgttattctgaactggtggaggcactatcccttgtctttggtgatgattccttggggcatcaccagcaccaatgtttgttggttgatcaacattagtgggtcttgaacatcaactggtcagttctcttgatccataacagctggtctttgctgatcacaggttgcctttgctttgatttcttgtaactcacgagctattctgtcaattctatctcagaatggtagtaggtgtgcagaacctttggaccgagtttgcatgcacaaagtttagtacctataccacaaaaacaagcaaacgaaatgatgagttagtaacttgataaatgtaaaagaacttgatcttaactttttctaatatcttgaatgtaacaatgcaacaatgaattggcaacagcgccaaattgataagtaggtttttaggcctacttttttgctgaagtgtggtgagttcagttcaattccccttaaacactaacatgtcgatgcagctatagggggtgtcaatccagtccactgttattgctagcaatcaagatgtgtacagaagcaactaagtcaagccagattataatgatagtgggtttctagcaacaatcctaggtcaggattcaaacaggtaaaaatgagaacttaagagccctactcgatcattgggtcgagtagaaccaacaagtgacaatttaagaactaaattgcaatcaacatgggatacaaataacaggtaaataaaagtgtaatcaggggtgaatacaaataaatctaagaagaatagaagtcctaaggatggattcattgataagggcaactctagggttcatcaggtggctaacaggtgaaaggcagaaaccctagacaaaagattcaaaaaccgggtcaatccactctcgtgacagagacccccataactctaccacttcctaatctcaactctcgttgatgaaacatagaagagcagggtttaagcaacaatctaccaaagccaataaacagactagccaatctcttggtctatagtctacaattctctggaattcgtagatcaggcaaccatttgaacgtcttttggacgctagacgtttatggtcgaatttccacattagccagcgaaaaccgcataggggccaacgaatccagaagggatctaacataatcttaaccatctaactaacctagagattaccctaatctaatccatcctcaagaaccctaatcactactcaaccaacataactaagaacacaaacccataaattactgaaatcataccaaaatgtagatctaaacaaactaaacaaatttactcaaagaactaaaggcaaaaacaaaatagattaagagtaattaagttttgaagcttcaagaacacaaaaaaaaaaaaggataaaagctagatcctttggacaaatcccaaagtgatctatttatagtaaaatgttgaaaaccctagattcactagaagacgagagacttgaggcgctttgggcgagtgctcaatcttggggatcgagtaaagagggtgctgcaaagtctgcctctttgtgtccatgctccgagtgatcaattggtcgaggagatgcttcttcctctcctatccgtatgctcagatgtttggttgagtggggaatgaggaagatctgaagacgctttgatagatcaacaagtctggtagagttggtcgcccttggtctagtaaatgggttgagtagaggatcgagtaggaggggcgagtagattgatctgctgcttcttctgaggctgccttgatcgagtaagtgggtcgtgtgaattgctgcctcctctgtgggtgcctggatcgagtgaacgggtcgagtagaatgctctgttgcttcccttctggttggatagagtagagggtcgagtagaatccttgtaagctccttctgtacctgaaaacacaccaaaacatgcaatatgtatgcaagatgatcctaaatgcctaagtgtgcaaaataagctaaatgtgatgcaaaatgatatgaaacaatgagtgatcactaagctaaatgatgataaatacatgtctaaaataaataaaatacagtgttattgagagagatttcaaaaagattgagggagagttgagatgtgaggtttgggagaaattaaaggaaaattgagatttgggagaatattaagagatatttaagggttttgttttcgaaaaagaagcgtaaaactgatttggcaaaaagaaacaattgccgcataatttttttgttttagagggtaaagtttggtgcccgacgcttttccaacggagaaacttttatcctcgcaaatccgtcggaaatacaaaatactttttttatacatgtataaagtcatcatctcatttccaaatgagtgaactcggcgttacaaacacgctcttgagatacttataacatcgatcatttcctttttgtgactagtttctatgtcattggagtgaaatttctgtgaatctgcattgagaattagatttgatatgatcttgcttggtttgacttgagtactagctcacaaaaattttctaagtttatgatagttatgtgtgtttattgatgcacaaaaatgcattgatgtgcattcttctaggagcttattcaagtctgacttataacatgttacagagtggatggttcaaataaagaatcaaagatctcaaatgatgattatggcgagacgttaccgcttgtgacgagttctctacttagatttgatcgataactctaaccacacaataatagtgctgaattgagatagaaatttaatgaagcttaagatcaataatggtgacgacgagaggctccatctaagtcgacgaagaagacaacatatattagagttcatgaactcaacgtgggtttagtagtttcaacctatagaggaaaaataaaaacagatcaaagataatcaaataaaatcaaaaaatcgttgtagagagatttgtttaccccttcacgtggatgctattattaaaagacgggtacgtctatgaatttgatgagttaacagcagaaggcgacgaacagatcacgactatgacttttttgatgagctaagaacggaagaaggcgactatagcttgttcaatatataattttgagaagatgtggggatgctaaatcctatttttatttttattgttatccacaaattttatttgagtaaatcctattaaactgattttcctaaatttaagcaatactcgtttgattgttattttatttaatttaataaaagcttaagttgttgtaaattttttttactttgaatatctatttaacttgaattttacttcactattttgttctctcacttccactctctcaattattttgcaagtcttcttacttctctctacaatttctgaaaacatgtaagttttttttaatatgtttatgttagattttggggtatggaatgtatctcttagcttaggtggttctgacgaggtgtgtcctgttgtattttgaacatgaagattttgtacatgttacgttggttatttatagatgtccgataacatattgcgagggatttgcgagggatttgcgaggaacttgcgaggaacagcgctattttgctacgaatttacgagagaagttcaactaccaaccaaagcaggaagattatttaaaacgtgccgacctaacctgccaaggactcgcaactccgacgcaaaatttgctacagaaagtttgtacgccgcaagtttaccgcagtttgcgaggcttttatcgtacagcaaatccctcgcaatttgcgatgactttgcgaggaattcttcagtcgttgcaattttctcacagttgccacgcaatattgcgtggaaattctccctcgcaaattttgcgactgaataacgacgtattggttttcccgcgcaaagtgctcgcaagtctatagcaatttgcgagggatttacgccatctcaaattttccttgcaaatcgcctgttttcttgtagattgagagagatttcaaagagatagaaggagacggtggagaggttgagagagatttcaaagagattgagggagagttgagatgtgagaaaaatgaaaggaaaattgagatttgagggaatattaagagatatttaagggttttgttttgaaaaaaataagcgtaaaactgatttggaaaaaagaaacaattgccgcataattttttcgtttttgagggtaaagtttggtgcccgatgcttttccaacggtgaaaattttaccctcgcaaattcgtcggaaatataaaatatttttcttatacatgtataaagtcatcatctcatttccaaatgagtgaactcggcgttacaaacacgctcttgagatacttataacatcgatcatttccttttcgtgactagtttccatgtccttggagtgaaatttctgtgaatctgcattgagaattagatttgatataatcttgcttggtttgacttgagtactagctcacaaaacttcaacctaaggcaaattttctaagtttatgatagttatgtgtgtttattgatgcacaaaaatgcattgatgtgcattcttctaggagcttattcaagtctgacttataagatgttacagagtggatggttcagataaagaatcaaagatctcaaatgatgattatggcgagacgttaccgcttgtgacgagttctctacttagatttgatcgataactctaaccacacaataatagtgctgaattgagatagaaatttaatgaagcttaagatcaataatggtgacgacgagaggctccatctaagtcgacgaataagacaacatatattagagttcatgaactcaacgtgggtttagtagtttcaacctatagtggaaaaataaaaacagatcaaagataatcaaataaaaaccaaaaatcgttgtacagagatttgtttaccccttcacgtggatgctattattaaaagacgggtacgtatatgaatttgatgagttaacagctgaaggcgacgaacagatcacgactatgacttttttgatgagctaagaacggaagaaggcgactatagcttgttcaatatataattttgagaagatgtggggatgctaaatcctatttttatttttattgttatccacaaattttatttgagtaaatcctattaaactgatttttctaaatttaaacaatactcgtttgattgttattttatttaatttaataaaagcttaagttgttgtaaattttttttactttgaatatctatttaacttgaattttacttcactattttgttctctcacttccactctctcaattattttgcaagtcttcttacttctctctacaatttctgaaaacatgtaagttttttttttatatgtttatgttagattttggggtatggaatgtatctcttagcttaggtggttctgacgaggtgtgtcctgttgtattttgatcatgaagattttgtacatgttacgttggttatttatagatgtccgataacatattgcgagggatttgcgaggaacttgcgaggaacagcgctattttgctacgaatttacgagagaagttcaactaccaaccaaagcaggaagattatttaaaacgtgccgacctaacctgccaaggactcgcaactccgacgcaaaatttgctacagaaagtttgtacgccgcaagtttaccgcagtttgcgaggctcttatcgtacagcaaatccctcgcaatttgcgatgactttgcgaggaattcttccctcgttgcaattttctcgcagttgccacgcaatattgcgtgggaattctccctcgcaaattttgcgattgaataacgacgtattggtttttccgcgcaaagtgctcgcaagtctatagcaatttgcgagggatttacgccatctcaaatttcccttgcaaatcgcttgttttcttgtagattgagagagatttcaaagagatagaaggagacggtggaaaggttgagagagatttcaaagagattgagggagagttgagatgtgagagaaatgaaaggaaaattgagatttgagggaatattaagagatatttaagggtttgttttgaaaaaaataagcgtaaaactgatttggaaaaaagaaacaattgccgcataattttttcgtttttgagggtaaagtttggtgcccgatgcttttccaacggtgaaaattttaccctcgcaaatccgtcggaaatataaaatatttttcttatacatgtataaagtcatcatctcatttccaaatgaatgaactcggtgttacaaacacgctcttgagatacttataacatcgatcatttccttttcgtgactaggttccatgtctttggagtgaaatttctgtgaatctgcattgagaattagatttgatataatcttgcttggtttgacttgagtactagctcacaaaacttcaacttaagacaaatgttctaagtttatgatagttatgtgtgtgtattgatgcacaaaaatgcattgatttgcattcttctaggagcttattcaagtctgacttataacatgttatagagtggatggttcagataaagaatcaaagatctcagatgatgattatggcgggatgttactgcttgtgacgagttctccacttagatttgatcgataactctaaccacacaataatagtgctgaattgagatagaaatttaatgaagcttaagatcaataatggtgacgacgagaggctccatctaagtcgacgaagaagacaatatatattagagttcatgaactcatcgtgggtatagtagtttcaacctatagaggaaaaataaaaacagatcaaagataatcaaagataatcaaataaaaaccaaaaatcgttggagagagatttgtttaccccttcacgtggatgttattattaaaagacggctacgtctatgaatttgatgagctaccaactgaaggcgacgaatagatcacgactataacttttttgatgagctaagaacggaagaacgcgactatagcttgttcaatatataattttgagaagatgtggggatgctaaattctatttttatttttattattatccacaaatttatttgagtaaatcctattaaactgattttcctaaatttaagcaatactcgtttgattgttattttatttaatttaagaaaagcttaagttgttgtaatttgtttttacttcgaatatctatttaacttgaattttacttaactattttgttctctcacttccactctctcaattattttgcaattcttcttacttctctctaaaatttctgaaaacatgtaaattttttttttatatgtttatgttagattttggggtatggaatgtatctcttagcttaggtggttctgacgaggtgtgtcctgttgtattttgaacatgaggattttgtacatgttacgttggttatttatagatgtccgataacatattgcgagggatttgcgaggaacagtgctattttgctacgaatttgtgagagaagttcaactaccaaccaaagcaggaagattatttaaaacgtgctgacctaacctgccaaggactcgcaactccgacgcaaaatttgctacaaaaagtttgtacgacgcaagtttaccgcaggttgcaaggctttatcgtacagcaaatctctcgcaatttgcgatgactttgcgagaaattcttccgtcgttgcaattttctcgcaattgccacgcaatattgtgtgggaattctccctcgcaaattttgcgactgattaacgacgtattggttttcccgcgcaaagtgctcgcaagtctatagcaatttgcgagggatttacgccatctcaaatttccctcgcaaatcgcctgttttcttgtagattgagggagatttcaaagagatagaaggagacggtggagaggttgagagagatttcaaagagattgagggagagttgagatgtgagagaaatattaagagatatttaagggttttgttttgaaaaaaataagcgtaaaactgatttggaaaaaagaaataattgacgcataattttttcgttttggagggtaaagtttggtgcccgatgcttttccaacggtaaaacttttaccctcgcaaatccgtcagaaatataaaatatttttcttatacatgtataaagtcatcatctcatttccagatgagtgaactcggcgttacaaacacgctcttgagatacttataacatcgatcatttctttttcgtgactagtttccatgtccttggagtgaaatttctgtgaatctgcattgagaattagatttgatataatcttgcttggtttgacttgagtactagctcacaaaacttcaacctaaggcaaattttctaaatttatgatagttacgtgtgtgtattgatgaacaaaaatgtattgatttgcattcttctaggagcttattcaagtctgacttataacatgttacagagtggatggttcagataaagaatcaaagatctcaaatgatgattatggcgggacgttactgcttgtgacgagttctccacttagatttgatcgataactctaaccacacaataatagtgctgaattgaaatagaaatttaatgaagcttaagatcaataatggtgacgacgagaggctccatctaagtcgacgaagaagacaatatatattagagtttatgaactcaacgtgggtttagtagtttcaacctatagaggaaaaataaaaacagatcaaagataatcaaataaaaaccaaaaatcgttggagagagatttgtttaccccttcacgtggatgctattattaaaagacggctacgtctatgaatttgatgagctaacagctgaaggcgacgaacagatcacgactatgactcttttgatgagctaagaacggaagaaggtgactatagcttgttcaatatataattttgagaagatgtggggatgctaaatcctatttttatttttattattatccacaaattttatttgagtaaatcttattaaacttattttcctaaatttacgcaatactcgtttgattgttattttatttaatttaataaaagcttaagttgttgtaatttttttttactttgaatatctatttaacttgaattttacttaactattttgttctctcacttccactctctcaattattttgcaattcttcttacttctctctaaaatttctgaaaacaggtaagttttttttttatatgtttatgttagattttggggtatggaatgtatctcttagcttaagtggttctgacgaggtgtgtcctgttgtattttgaacatgaagattttgtacatgttacgttggttatttatagatgtccgataacatattgcgagggatttgcgaggaacttgcgaggaacagcgctattttgctacgaatttgcgagagaagttcaactaccaaccaaagcaggaatattatttaaaacgtgctgacctaacctgccaaggactcgcaactccgacgcaaaatttgccgcagaaagtttgtacgccgcaagtttaccgcagtttgcaagactcttatcgtacatcaaatccctcgcaatttacgatgactttgcgatgaattcttccgtcgttgcaattttctcgcagttgccacgcaatattgcgtgggaattctccctcgcaaattttgcgactgattaacgacgtattggttttcccgcgcaaagtgctcgcaagtctatagcaatttgcgagggatttacgccatctcaaatttccctcgcaaattgcatgttttcttgtagattgagagagatttcaaagagatagaaggagacggtggagaggttgagagagatttcaaagagattgagggagagttgagatgtgagagaaatgaaaggaaaattgagatttgagggaatattaagagatatttaagggttttgttttgaaaaaaataagcgtaaaactgatttggaaaaaagaaacaattgtcgcgtaattttttcgttttggagggtaaagtttggtgcccgatgcttttccaacggttaaacttttaccctcgcaaatccgtcggaaatataaaatatttttcttatacatgtataaagtcatcatctcatttccaaatgagtgaactcggcgttacaaacatgctcttgagatacttataacatcaatcatttctttttcatgactagtttccatgtccttggagtgaaatttctgtgaatctgcattgagaattagatttgatataatcttgcttggtttgacttgagtactagctcacaaaacttcaacctaaggcaaattttctaagtttatgatagttatgtgtgtgtattgatgcacaaaaatgcattgatgtgcattcttgtaggagcttattcaactctgacttataacatgttacagagtggatggttcagataaagaatcaaagatttcagatgatgattatggcaagacgttactgcttgtgacgagttctccacttagatttgatcgataactctaaccacacaataatagtgctgaattgagatagaaatttaatgatgcttaagatcaataatggtgacgacgagaggctccatctaagtcgacgaagaagacaatatatattagagttcatgaactcaacgtcggtttagtagtttcaacctatagaggaaaaataaaaacagatcaaagataatcaaataaaaaccaatcgttggagagagatttgtttaccccttcacgtggatgctattattaaaagacggctacgtctatgaatttgatgagctaacagctgaaggcgacgaacagatcacgactatgactcttttgatgagctaagaacggaagaaggtgactatagcttgttcaatatataattttgagaagatgtggggatgctaaatcctatttttatttttattattatccacaaattttatttgagtaaatcttattaaacttagtttcctaaatttaagcaatactcgtttgattgttattttatttaatttaataaaagcttaagttgttgtaatttttttttactttgaatatctatttaacttgaattttacttaactattttgttctctcacttccactctctcaattattttgcaattcttcttacttctctctaaatttctgaaaacaggtaagttttttttatatatgtttatgttagattttggggtatggaatgtatctcttagcttaggtggttctgacgaggtgtgtcctgttgtattttgaacatgaagattttgtacatgttacgttggttatttatagatgtccgataacatattgcgagggatttgcgagggatttgcgaggaacttgcgaggaacagcgctattttgctacgaaattgcgagagaagttcaactaccaaccaaagcaggaatattatttaaaacgtgctgacctaacctgccaaggactcgcaactccgacgcaaaatttgcttcagaaagtttgtacgccgcaagtttaccgcagtttgcaagactcttatcgtacatcaaatccctcgcaatttacgatgactttgcgatgaattcttccgtcgttgcaattttctcgcagttgccacgcaatattgcgtgggaattctccctcgcaaattttgcgactgattaaggacgtattggttttcccgcgcaaagtgctcgcaagtctatagcaatttgcgagggatttacgccatctcaaatttccctcgcaaatcgccagttttcttgtagattgagagagatttcaaagagatagaaggagacggtggagaggttgagagagatttcaaagagattgagggagagttgagatgtgagagaaatgaaaggaaaattgagatttgagagaattattaagagatatttaagggttttgttttgaaaaaaataagcgtaaaactgatttggaaaaaagaaataattgacgcataattttttcgttttggagggtaaagtttggtgcccgatgcttttccaacggtaaaacttttaccctcgcaaatccgtcggaaatataaaatatttttcttatacatgtataaagtcatcatctcatttccaaatgagtgaacttggcgttacaaacacgctcttgagatacttataacatcgatcatttctttttcgtgactagtttccatgtccttggagtgaaatttctgtgaatctgcattgagaaatagatgtgatataatcttgcttggtttgacatgagtactagctcacaaaacttcaacctaaggcaaattttctaagtttatgatagttacgtgtgtgtattgatgcacaaaaatgcattgatttgcattcttctaggagcttattcaagtctgacttataacatgttacagagtggatggttcagataaagaatcaaagatcttagatgatgattatggcgggacgttactgcttgtgacgagttctccacttagatttgatcgataactctaaccacacaataatagtgctgaattgagatagaaatttaatgaagcttaagatcaataatggtgacgacgagaggctccatctaagtcgacgaagaagacaatatatattagagttcatgaactcatcgtgggtatagtagtttcaacctatagaggaaaaataaaaacagatcaaagataatcaaataaaaaccaaaaatcgttggagagagatttgtttaccccttcacgtggatgctattattaaaagacggctacgtctatgaatttgatgagctaacaactgaaggcgacgaacagatcacgactatgacttttttgatgagctaagaacggaagaaggcgactatagcttgttcaatatataattttgagaagatgtggggatgctaaatcctatttttatttttattattatccacaaattttatttcagtaaatcttattaaacttagtttcctaaatttaagcaatactcgtttgattgttattttatttaatttaataaaagcttaagttgttgtaatttttttttactttgaatatctatttaacttgaattttacttaactattttgttctctcacttccactctctcaattattttgcaattcttcttacttctccctaaaatttctgaaaacaggtaagttttttttttatatgtttatgttagattttggggtatggaatgtatctcttagcttaggtggttctgacgaggtgtgtcctgttgtattttgaacatgaagattttgtacatgttacgttggttatttatagatgtcaaataacatattgcgagggatttgcgagggatttgcgaggaacttgcgaggaacagcgctattttgctacgaatttgcgagagaagttcaactaccaaccaaagcaggaatattatttaaaacgtgctgacctaacctgccaaggactcgcaactccgacgcaaaatttgcttcagaaagtttgtacgccgcaagtttaccgcagtttgcaagactcttatcgtacatcaaatccctcgcaatttacgatgactttgcgatgaattcttccgtcgttgcaattttctcgcagttgccacgcaatattgcatgggaattctccctcacaaattttgcgactgattaaggacgtattggttttcccgcgcaaagtgctcgcaagtctatagcaatttgcgagggatttatgccatctcaaatttccctcgcaaatcgccagttttcttgtagattgagagagatttcaaagagatagaaggagacggtggagaggttgagagagatttcaaagagattgagggagagttgagatgtgagagaaatgaaaggaaaattgagatttgagggaatattaagagatatttaagagttttgttttgaaaaaaataagcgtaaaactgatttggaaaaaagaagcaattgccgcgtaattttttcgttttggagggtaaagtttggtgcccgatgcttttccaacggttaaacttttaccctcgcaaatccgtcggaaatataaaatatttttcttttacatgtataaagtcatcatctcatttccaaatgagtgaactcggcgttacaaacacgctcttgagatacttataacatcgatcatttctttttcgtgactagtttccatgtccttggagtgaaatttctgtgaatctgcattgagaattagatttgatataatcttgcttggtttgacttgagtactagctcacaaaacttcaacctaaggcaaattttctaagtttatgatagttacgtgtgtgtattgatgcacaaaaatgcattgatttgcattcttctaggagcttattcaagtctgacttataacatgttacagagtggacggttcagatagagaatcaaagatctctgatgatgattatggcgggacgttactgcttgtgacgagttctccacttagatttgatcgataactctaaccacacaataatagtgctgaattgagatagaaatttaatgaagcttaagatcaatgatggtgacgacgagaggctccatctaagtcgacgaagaagacaatatatattagagtttatgaactcaacgtgggtttagtagtttcaacctatagaggaaaaataaaaacagatcaaagataatcaaataaaaaccaaaatttgttggagagagatttgtttaccccttcacgtggatgctattattaaaagatggctacgtctatgaatttgatgagctaacaactgaaggcgacgaacagatcacgactatgacttttttgatgagctaagaacggaagaaggcgactatagcttgttcaatatataattttgagaagatgtggggatgctaaatcctatttttatttttattattatccacaaattttatttgagtaaatcttattaaacttattttcctaaagttaagcaatactcgtttgattgttattttatttaatttcataaaaacttaagtttttgtattttttttttactttgaatatctatttaacttgaattttacttaactattttgttctctcacttctactctctcaattattttgcaattcttcttacttctctctaaagtttctgaaaacaggtaagtttttttttcatatgtttatgttagatttttggggtatggaatgtatctcttagcttaggtggttctgacgaggtgtgtcctgttgtattttgaacatgaagattttgtacatgttacgttggttatttatagatgtccgataacattttgcgagggatttgcgaggaacttgcgaggaataagctattttgctacgaatttgcgagagaagttcaactaccaaccaaagcaggaatattatttaaaacgtgctgacctaacctgccaaggactcgcaactttgacgcaaaatttgctacagaaactttgtacgccgcaagtttaccgcaatttgggagaatcttatcgtacatcaaatccctcgcaatttgcgatgaattctttcgtcgttgcaattttctcgcagttgccacgcaatattgcgtgggaattttccgacgcaaattttgtgacagattaacgacgtattggttttcccgcgcgaagtgctcgcaagtctatagcaatttgcgagggatttacgccatctcaatttttcctcgcaaatcgcctgttttcttgtagattgagagagaattcaaagagatagaaggagacggtggagaggttgagagagatttcaaagagattgagggagagttgagatgtgagagaaatgaaaggaaaattgagatttgagggaatattaagagatatttaagagttttgttttaaaaaaataagcgtaaaactgatttggaaaaaagaaacaattgccgcataattttttcgttttggagggtaaagtttggtgtccgatgcttttccaacggtgaaacttttaccctcgcaaatccgtcggaaatagaaaatatttttcttatacatgtataaagtcatcatctcatttccaaatgagtgaactcggcgttacaaacacgctcttgagatacttataacatcgatcatttccttttcgtgactagtttccatgtccttggagtgaaatttctgtgaatctgcattgagaattagatttgatataatcttgcttggtttgacttgagtactggctcacaaaacttcaacctaaggcaaattttctaagtttatgatagttatatgtgtgtattgatgcacaaaaatgcattgatgtgcattcttctaggagcttattcaagtctgacttataacatgttacagagtggatggttcagataaagaatcaaagatctcagatgatgattatggcgggacgtttctgcttgtgacgagttctccagttagatttgatcaataactctaaccacacaataatagtgctgaattgagatagaaatttaatgaagcttttgatcaataatggtgacgacgagaggctccatctaagtcgacgaaaaagacaatatatattagagttcatgaattcaacgtgggtttagtagtttcaacctatagaggaaaaataaaaacagatcaaagataatcaaataaaaaccaaaaatcgttggagagagatttgtttaccccttcacgtggatgctattattaaaagacggctacgtctatgaatttgatgagctaacaactgaaggcgacgaacagatcacgactatgactttttttattagctaagaacggaagaaggcgactatagcttgttcaatatataattttgagaagatgtggggatggtaaattctatttttatttttattattatccacaaactgtatttgagtaaatcatattaaacttatttttctaaatttaagttatactcgtttgattgttattttatttaatttaataaaagcttaagttgttgtaaatttgttttactttgaatatttatttaacttgaattttacttaactattttgttctctcacttccactctctcaattattttgcaattcttcttacttctctctacaatttctgaaaacatgtaagttttttttttatatgtttatgttagattttggggtatggaatgtatctcttagcttaggtagttctgacgaggtgtgtcctgttgtattttgaacatgaaaattttgtacatgttacgttggttatttatagatgtccaaaaacatattgcgagggatttgcgaggaacttgcgagaaacaacgctattttgctacgaatttgcgagagaagttcaactaccaaccaaagcaggaagattatttaaaacgtgttgacctaacctgccaaggactcgcaaatccgacgcaaaatttgctacagaaagtttgtacgccgcaagtttaccgcagtttgcgagactctaatcgtacagcaaatccctcgcaatttgcgatgactttgcgatgaattcttccgtcgttgcaattttctcgcaattgccacgcaatattgcgtgggatttttcccttgcaaattttgcgactgattaacgacgtattggtttttccgcgctaagtgctcgcaagtctatagcaatttgcgagggattgacgccatctcaaattttcttcgcaaatcgcctgtttccttgtagattgagagagatttcaaagagatagaaggagacggtggagaggttgagagagatttcaaagagattgagggagagttgagatgtgagagaaatgaaaggaaaattgagatttgagggaatattaagagatatttaagagttttgttttgaaaaaaataagcgtaaaactgatttggaaaaaataaacaattgccgcataattttttcgttttggagggtaaagtttggtgcccgatgcttttccaacggtaaaacttttaccctcgcaaatccgtcggaaatataaaatatttttcttatacatgtataaagtcatcatctcatttccaaatgagtgaactcggcgttacaaacacgctcttgagatacttataacatcgatcatttccttttcgtgactagtttccatgtccttggagtgaaatttctgtgaatctgcattgagaattagatttgatataatcttgcttggtttgacttgagtactggctcacaaaacttcaacttaaggcaaattttctaagtttatgatagttatgtgtgtgtattgatgcacaaaaatgcattgatgtgcattcttctaggagcttattcaagtctgacttataacatgttacagagtggatggttcagataaagaatcaaagatctcagatgatgattatggcgggacgttactgcttgtgacgagttctccacttagatttgatcgataactctaaccacacaataatagtgctgaattgagatagaaatttaatgaagcttttgatcaataatggtgacgacgagaggctccatctaagtcgacgaagaagacaatatatattagagttcatgaactcaacgtgggtttagtagtttcaacctatagaggaaaaataaaaacagatcaaagataatcaaataaaaaccaacaatcgttggagagagatttgtttaccccttcacgtggatgctattattaaaagacggctacgtctatgaatttgatgagctaacaactgaaggcgacgaacagatcacgactatgacttttttgattagctaagaacggaagaaggcgactataacttgttcaatatataattttgagaaaatatggggatgctaaattctatttttatttttaatattatccacaaattttatttgagtaaatcctattaaacttattttcctaaatttaagcaatactcgtttgattgttattttatttaatttaataaaagcctaagttgttgtaatttttttttactttgaatatctatttaacttgaattttacttaactattttgttctctcacttctactctctcaattattttgcaattcttcttacttctctctacaatttctgaaaacatgtaagttttttttttatatgtttatgttagattttggggtatggaatgtatctcttagcttaggtggttctgacgaggtgtatcctgttgtattttgaatatgaaaattttgtacatgttacgttggttatttatagatatgcgaaaacatattgcgagggatttgcgagaaacttgcgaggaacatcgctattttgctacgaatttgcgagagaagttcaactaccaaccaagcaggaagattatttaaaacgtgctgacctaacctgccaaggactcgcaactccgacgcaaaatttgctacagaaagtttgtatgccgcaagtttaccgcagtttgcgagactcttatcgtacagcaaatccctcgcaatttgcgatgactttgcgatgaattcttccgtcgttgcaattatctcgcagttgccacgcaatattgcgtgggaattttccctcgcaaaatttgcgactgattaacgacgtattcgttttcccgcgcaaagtgctcgcaaatctataacaatttgcgagggatttacgccatctcaaatttccctcgcaaatcgcttgttttcttgtagattgagagagatttgaaagagatagaaggagacggtggagaggttgagagagatttcaaagagattgagggagagttgagatgtgagagaaatgaaaggaaaattgagatttgagggaatattaagagatatttcaagggtttgtttttgaaaaaaataagcgtaaaactgatttggaaaaaagaaacaattgccgcataattgtttcgttttggagggtaaagtttggtgcccgatgcttttccaacggtgaaacttttaccctcgcaaatccgtcgaaaatataaaatattttcttatacatgtataaagtcatcatctcatttccaaatgagtgaactcagcgttacaaacacgctcttgagatacttataacatcgatcatttccttttcgtgactagtttccatgtccttggagtgaaatttatgtgaatctgcattgagaattagatttgatataatcttgcttggtttgacttgagtactagctcacaaaacttcaacttaaggcaaattttctaagtttatgatagttatgtgtgtgtattgatgcacaaaaatgcattgatgtgcattcttctaggagcttattcaagtctgacttataacatgttacagagtggatggttcagataaagaatcaaagatctcagatgatgattatggcgggacgttactgcttgtgacgagttctccacttagatttgatcgataactctaaccacacaataatagtgctgaattgagatagaaatttaatgaagcttttgatcaataatggtgacgacgaaaggctccatctaagtcgacgaagaagacaatatatattagagttcatgaactcaacgtgggtttagtagtttcaacctatagaggaaaaataaaaacagatcaaagataatcaaataaaaaccaacaatcgttggagagagatttgtttaccccttcacgtggatgctattattaaaagacggctacgtctatgaatttgatgagctaacaactgaaggcgacgaacagatcacgactatgacttttttgatgagctaagaacggaagaaggcgactataacttgttcaatatataattttgagaaaatatggggatgctaaattctatttttatttttaatattatccacaaattttatttgagtaaatcctattaaacttaatttcctaaatttaaacaatactcgtttgattgttattttatttaatttaataaaagcctaagttgttgtaatttttttttactttgaatatctatttaacttgaattttacttaactattttgttctctcacttctactctctcaattattttgcaattcttcttacttctctctacaatttctgaaaacatgtaagtttttttttaatatgtttatgttagattttggggtatggaatgtatctcttagcttaggtggttctgacgaggtgtgtcctgttgtattttgaacatgaaaattttgtacatgttacattggttatttatagatgtgcgaaaacatattgcgagggatttgcgagaaacttgcgaggaacatcgctattttgctacgaatttgcgagagaagttcaactaccaaccaagcaggaagattatttaaaacgtgttgacctaacctgccaaggacttgcaactccgacgcaaaatttgctacagaaagtttgtacgccgcaagtttaccgcagtttgcgagactcttatcgtacagcaaatccctcgcaatttgcgatgactttgcgatgaattcttccgtcgttgcaattttctcgcagatgccacgcaatattgcgtgggaatttttcctcgcaaattttgcgactgattaacgacgtattggttttcccgcgcaaagtgctcgcaagtctatagcaatttgcgagggaattacgccatctcaaatttctctcgcaaatcgcctgttttcttgtagattgagagagatttcaaagagatagaaggagacggtggagaggtcgagagagatttcaaagagattgagggagagttgaaatgtgagagaaatgaaaggaaaattgagatttgagggaatattaagagatatttaagggttttgttttgaaaaaagtaagcgtaaaactgatttggaaaaaagaaacaattgccgcataattttttcgttttgaagggtaaagtttggtgcccgatgcttttctaacggtgaaacttttaccctcccaaatccgtcgaaaatataaaatattttttttatacatgtataaagtcatcatctcatttccaaatgagtgaactcagcgttacaaacacgctcttgagatacttataacatcgatcatttccttttcgtgactagtttccatgtccttggagtgaaatttatgtgaatctacattgagaattagatttgatataatcttgcttggtttgacttgagtactagctcacaaaacttcaacttaaggcaaattttctaagtttatgatagttatgtgtgtgtattgatgcacaaaaatgcattgatgtgcattcttctaggagcttattagagtctgacttataacatgttacagagtggatggttcagataaagaatcaaaaatctcagatgatgattatggcgggacgttactgcttgtgacgagttctccacttagatttgatcgataactctaaccacacaataatagtgctgaattgagatagaaatttaatgaagcttttgatcaataatggtgacgacgagaggctccatctaagtcaacgaagaagacaatttatattagagttcatgaactcaacgtgggtttagtagtttcaacctatagaggaaaaataaaaacagatcaaagataatcaaataaaaacaaaaaatcgttggagagagatttgtttaccccttcacgtggatgctattattaaaagacggctacgtctatgaatttgatgagctaacaactgaaggcgacgaacagatcacgactatgacttttttgatgagctaagaacggaagaaggcgactatagcttgttcaatatataattttgagaagatgtggggatgctaaattctatttttatttttattattatccacaaattttatttgagtaaatcctattaaacttattttcctaaatttaagcaatactcgtttgattgttattttattttatttaataaaagcctaagttgttgtaatttttttttactttgaatatctatttactttgaattttacttaactattttgttctctcacttctactctctcaattattttccaattcttcttacttctctctacaatttctgaaaacatgtaagtttttttttaatatgtttatgttagattttggggtatggaatgtatctcttagcttaggtggttctgacgaggtgtgtcctgttgtattttgaacatgaaaattttgtacatgttacgttggttatttatagatgtgcgaaaacatattgcgagggatttgcgaggaacttgcgaggaacatcgctattttgctacgaatttgcgagagaagttcaactaccaaccaaagcaggaagattatttaaaatgtgctgacctaacctgccaaggagtcgcaactccgacgcaaaatttgctacaaaaagtttgtacgccgtaaatttaccgcagtttgcgaggctttatcgtacagcaaatccctcgcaatttgcgatgactttgcgaggaattcttccgtcgttgcaattttctcgcaattgccacgcaatattgcgtgggaattctcccttgcaaattttgcgactgattaacgacgtattggttttcccgcgcaaagtgctcgcaagtctatagcaatttgcgagggatttacgccatctcaaatttccctcgcaaatcgcctgttttcttgtagattgagagagatttcaaagagatagaaggagaccggtggagaggtcgagagagatttcaaagagattgagggagagttgagatgtgagagaaatgaaaggaaaattgagatttgagggaatattaagagatatttaagggttttgttttgaaaaaaataagcgtaaaactgatttggaaaaaagaaacaattgccgcataattttttcgttttgaagggtaaagtttggtgcccgatgcttttctaacggtgaaacttttaccctcccaaatccgtcgaaaatataaaatatttttcttatacatgtataaagtcatcatctcatttccaaatgagtgaactcagcgttacaaacacgctcttgagatacttataacatcgattatttccttttcgtgactagtttccatgtccttggagtgagatttatgtgaatctgcattgagaattagatttgatataatcttgcttggtttgacttgagtactagctcacaaaacttcaacttaaggcaaattttctaagtttatgatagttatgtgtgtgtattgatgcacaaaaatgcattgatgtgcattcttctaggagcttattcaagtctgacttataacatgttacagagtggatggttcagataaagaatcaaagatctcagatgatgattatggcgggacgttactgcttgtgacgagttctccacttagatttgatcgataactctaaccacacaataatagtgctgaattgagatagaaatttaatgaagcttttgatcaataatggtgacgacgagaggctccatctaagtcaacgaagaagacaatttatattagagttcatgaactcaacgtgggtttagtagtttcaacctataaaggaaaaataaaaacagatcaaagataatcaaataaaaacaaaaaatcgttggagagagatttgtttaccccttcacgtggatgctattattaaaagacggctacgtctatgaatttgatgagctaacaactgaaggcgacgaacagatcacgactatgacttttttgatgagctaagaacggaagaaggcgactatagcttgttcaatatataattttcagaagatgtggggatgctaaattctatttttatttttattattatccacaaattttatttgagtaaatcctattaaacttattttcctaaatttaagcaatactcgtttgattgttattttatttaatttaataaaagcttaagttgttgtaattttttttttctttgaatatctatttaacttgaattttacttaactattttgttctctcacttccactctctcaattattttgcaattcttcttacttctctctacaatttctgaaaacatgtaagatttttttttatatgtttatgttagattttggggtatggaatgtatctcttagcttaggtggttctgacgaggtgtgtcctgttgtattttgaacatgaaaattttgtacatgttacgttggttatttatagatgtgcgaaaacatattgcgagggatttgcgaggaacttgcgaggaacagcgctattttgctacgaatttgcgagagaagttcaactaccaaccaagcaggaagattatttaaaacgtgttgacctaacctgccaaggactcgcaactccgacgcaaaatttgctacagaaagtttgtacgccgcaagtttaccgcagtttgcgagactcttatcgtacagcaaatccctcgcaatttgcgatgactttgggatgaaatcttcagtcgttgcaattttcttgcaattgccaggcaatattgcgtggaaattttccctcgcaaattttgcgactgattaacgacgtattgattttcccgcgtaaagtgctcgcaagtctatagcaatttgcgagggatttacgccatctcaaatttccctcgcaaatcgcctgttttcttgtagattgagagagatttcaaagagatagaaggagacggtagagtggttgagagagatttcaaagagattgagggagagttgaggtgtgagagaaatgaaaggaaaattgagatttgagggaatattaatagatatttaagggttttgttttgaaaaaaataagcgtaaaactgatttggaaaaaaaaaacaattgccgcataattttttcgttttggagggtaaagtttggtgcccgatgcttttccaacggtgaaacttttaccctcccaaatccgtcggaaatataaaatatttttcttatacatgtataaagtcctcatctcatttccaaatgagtgaactcggcgttacaaacacgctcttgagatacttataacatcgatcatttccttttcgtgactagtttccatgttcttggagtgaaatttctgtgaatctgcattgagaattagatttgatataatcttgcttggtttgacttgagtactagctcacaaaacttcaacttaaggcaaattttctgagtttatgatagttatgtgtgtgtattgatgcacaaaaatgcattgatgtgcattcttctaggagcttattcaagtctgacttataacatgttacagagtggatggttcagataaagaatcaaagatctcagatgatgattatggcgggacgtttctgcttgtgacgagttctccacttagatttgatcgataactctaaccacacaataatagtgctgaattgagatagaaatttaatgaagcttttaatcaataatggtgacgacgagaggctccatctaagtcgacgaagaagacaatatatattagagttcatgaactcaacttgggtttagtagtttcaacctatataggaaaaataaaaacagatcaaagataatcaaataaaaaccaaaaatcgttggagagagatttgtttaccccttcacgtggatgctattattaaaagacggctacgtctatgaatttgatgagctaacaattgaaggcgacgaacagatcacgactatgacttttttgatgagctaagaacggaagaaggcgactatagcttgttcaatatataattttgagaagatgtggggatgctaaattctatttttatttttattattatccacaaattttatttgagtaaatcctattaaacttattttcctaaatttaagcaatactcgtttgattgttattttatttaatttaataaaagcttaagttgttgtaattttttttttctttgaatatctatttaacttgaattttacttaactattttgttttctaacttccactctctcaattattttgcaatgcttcttacttctctctacaatttctgaaaacatgtaagatttttttttatatgtttatgttagattttggggtatggaatgtatctcttagcttaggtggttctgacgaggtgtatcctgttgtattttgaacattaaaattttgtacatgttacgttggttatttatagatgtgcgaaaacatattgcgagggatttgcgaggaacttgcgaggaacatcgctattttgctacgaatttgcgagagaagttcaactaccaaccaagcaggaagattatttaaaacgtgctgacctaacctgccaaggacttgcaactccgacgcaaaatttgctacagaaagtttgtacgccgcaagtttaccgcagtttgcgagacacttatcgtacagcaaatccctcgcaatttgcgatgactttgcgatgaattcttccgtcgttgcaattttctcgcagatgccacgcaatattgcgtgggaattttccctcgcaaattttgcgactgattaacgacgtattggttttcccgcgcaaagtgctcgcaagtctatagcaatttgcgagggatttacgccatctcaaatttccctcgcaaatcgcctgttttcttgtagattgagagagatttcaaagagatagaaggagacggtagagaggttgagagagatttcaaagagattgagggagagttgagatgtgagagaaatgaaaggaaaattgagatttgagggaatattaagagatatttaagggttttgttttgaaaaaaataagcgtaaaactgatttggaaaaaagaaacaattgccgcataattttttcgttttgaagggtaaagtttggtgcccgatgcttttctaacggtgaaacttttaccctcccaaatccgtcgaaaatataaaatatttttcttatacatgtataaagtcatcatctcatttccaaatgagtgaactcagcgttacaaacacgctcttgagatacttataacatcgatcatttccttttcgtgactagtttccatgtccttggagtgagatttatgtgaatctgcattgagaatagatttgatataatcttgcttggtttgacttgagtactagctcacaaaacttcaacttaaggcaaattttctaagtttatgatagttatgtgtgtgtattgatgcacaaaaatgcattgatgtgcattcttctaggagcttattaaagtctgacttataacatgttacagagtggatggttcagataaagaatcaaagatctcagataatgattatggcgggacgtttctgcttgtgacgagttctccacttagatttgatcgataactctaaccacacaataatagtgctgaattgagatagaaatttaatgaagcttttgatcaataatggtgacgacgagaggctccatctaagtcgacgaagaagacaatatatattagagttcatgaactcaacttgggtttagtagtttcaacctatagaggaaaaataaaaacagatcaaagataatcaaaaaaaaaccaaaaatcgttggagagagatttgtttaccccttcacgtggatgctattattaaaagacggctacgtctatgaatttgatgagctaacaactgaaggcgacgaacagatcacgactatgacttttttgatgagctaagaacggaagaaggcgactatagcttgttcaatatataattttgagaagatgtggggatgctaaattctatttttatttttattattatccacaaattttatttgagtaaatcctattaaacttattttcctaaatttaagcaatactcgtttgattgttattttatttaatttaataaaagcttaagttgttgtaattttttttttctttgaatatctatttaacttgaattttacttaactattttgttctctcacttccactctctcaattattttgcaattcttcttacttctctctacaatttctgaaaacatctaagatttttttttatatgtttatgttagattttggggtatggaatgtatctcttagcttaggtggttctgacgaggtgtatcctgttgtattttgaacattaaaattttgtacatgttacgttggttatttatagatgtgcgaaaacatattgcgagggatttgcgaggaacttgcgaggaacatcgctattttgttacgaatttgcgagagaagttcaactaccaaccaaagcaggaagattatttaaaatgtgctgacctaacctgccaaggagtcgcaactccgacgcaaaatttgctacaaaaagtttgtacgccgtaaatttaccgcagtttgcgaggctttatcgtacagcaaatccctcgcaatttgcgatgactttgcgaggaattcttccgtcgttgcaattttctcgcaattgccacgcaatattgcgtgggaattctccctcgcaaattttgcgactgattaacgacgtattggttttcccgcgcaaagtgctcgcaagtctatagcaatttgcgagagatttacgccatctcaaatttccctcgcaaatcgatgttttcttgtagattgagagagatttcaaagagatagaaggagacggtagagaggttgagagagatttcaaagagattgagggagagttgaggtgtgagagaaatgaaaggaaaattgagatttgagggaatattaagagatatttaagggttttgttttgaaaaaaataagcgtaaaactgatttggaaaaaagaaacaattgccgcataatgttttcgttttggagggtaaagtttggtgcccgatgcttttccaacggtgaaacttttaccctcgcaaatccgtcggaaatataaaatatttttcttatacatgtataaagtcctcatctcatttccaaatgagtgaactcggcgttacaaacacgctcttgagatacttataacatcaatcatttccttttcgtgactagtttccatgtccttggagtgaaatttctgtgaatctgcattgagaattagatttgatataatcttactttgtttgacttgagtactagctcacaaaacttcaacttaaggcaaattttctaagtttatgatagttatgtgtgtgtattgatgcacaaaaatacattgatgtgcattcttctaggagcttattaaagtctgacttataacatgttacagagtggatggttcagataaagaatcaaagatctcagataatgattatggcgggacgtttctgcttgtgacgagttctccacttagatttgatcgataactctaaccacacaataatagtgctgaattgagatagaaatttaatgaagcttttgatcaataatggtgacgacgagaggctccatctaagtcgacgaagaagacaatatatattagagttcatgaactcaacttgggtttagtagtttcaacctatagaggaaaaataaaaacagatcaaagataatcaaaaaaaaaccaaaaatcgttggagagagatttgtttaccccttcacgtggatgctattattaaaagacggctacgtctatgaatttgatgagctaacaactgaaggcgacgaacagatcacgactatgacttttttgatgagctaagaacggaagaaggcgactatagcttgttcaatatataattttgagaagatgtggggatgctaaattctatttttatttttattattatccacaaattttatttgagtaaatcctattaaacttattttcctaaatttaagcaatactcgtttgattgttattttatttaatttaataaaagcttaagttgttgtaatttttttttcctttgaatatctatttaacttgaattttatttaactattttgttctctcacttccactctctcaattattttgcaattcttcttacttctctctacaatttctgaaaacatgtaagatttttttttatatgtttatgttagattttggggtatggaatgtatctcttagcttaggtggttctgacgaggtgtatcctgttgtattttgaacattaaaattttgtacatgttacgttggttatttatagatgcgcgaaaacatattgcgagggatttgcgaggaacttgcgaggaacatcgctattttgctatgaatttgcgagagaagttcaactaccaaccaaagcaggaagattatttaaaatgtgctgacctaacctgccaaggagtcgcaactccgacgcaaaatttgctacaaaaagtttgtacgccacaagtttaccgcagtttgcgagactcttatcgtacagcaaatccctcgcaatttgcgatgagtttgcgaggaattcttccgtcgttgcaattttctcgcagttgccacgcaatattgcgtgggaattctccctcgcaaattttgcgactgattaacgacgtattggttttcccgcgcaaagtgctcgcaagtctatagcaatttgcgagggatttacgccatctcaaatttccctcgcaaatcgcctgttttcttgtagattgagagagatttcaaagagatagaaggagacggtagagaggttgagagagatttcaaagagattgagggagagttgaggtgtgagagaaatgaaaggaaaattgagatttgagggaatattaagagatatttaagggttttgttttgaaaaaaataagcgtaaaactgattttgaaaaaagaaacaattgcagcataatttttttgttttggagggtcaagtttggtgcccgatgcttttccaacggtgaaacttttaccctcgcaaatccgtcggaaatataaaatatttttcttatacatgtataaagtcctcatctcatttccaaatgagtgaactcggcgttacaaacacgctcttgagatacttataacatcaatcatttccttttcgtggctagtttccatgtccttggagtgaaatttctgtgaatctgcattgagaattagatttgatataatcttgctttgtttgacttgagtactagctcacaaaacttctacttaaggcaaattttctaagtttatgatagttatgtgtgtgtattgatgcacaaaaatgcattgatgtgcattcttctaggagcttattcaagtctgacttataacatgttacagagtggatggttcagataaagaatcaaagatctcagatgatgattatggcgggacgtttctgcttgtgacgtgttctccacctagatttgatcgataactctaaccacacaataatagtgctgaattgagatagaaatttaatgaagcttttgatcaataatggtgacgacgagaggctccatctaagtcgacgaagaagacaaaatatattagagttcatgaactcaacgtgggtttagtagtttcaacctatagaggaaaaataaaaacagatcaaagataatcaaataaaaaccaaaaatcgttggagagagatttgtttaccccttcacgtggatgctattattaaaagacgactacgtctatgaatttgatgagctaacaactgaaggcgacgaacagatcacgactatgacttttttgatgagctaagaacggaagaaggcgactatagcttgttcaatatataattttgagaagatgtggggatgctaaatcctatttttctttttattattatccacaaattttatttgagtaaatcctattaaacttatttttctaaatttaaataatactcgtttgattgttattttatttaatttaataaaagcttaagttgttgtaattttttttttctttgaatatctatttaacttgaattttacttaactattttgttctctcacttccactctctcaattattttgcaatttttcttacttctctctacaatttctgaaaacatgtaagatttttttttatatgtttatgttagattttggggtatggaatgtatctcttagcttaggtggttctgacgaggtgtatcctgttgtattttgaacattaaaattttgtacatgttacgttggttatttatagatgcgcgaaaacatattgcgagggatttgcgaggaacttgcgaggaacatcgctattttgctacgaatttgcgagagaagttcaatgaccaaccaaagcaggaagattatttaaaatgtgctgacctaacctgccaaggagtcgcaactccgacgcaaaatttgctatagaaagtttgtacgccgcaagtttaccgcagtttgcgaggctcttatcgtacagcaaatccctcgcaatttgcgatgactttgcgaggaattcttcggtcgttgcaattttctcgcatttgccacgcaatattgtgtgggaattctccctcgcaaattttgcgactgattaacgacgtattgattttccggcgcaaagtgctcgcaagtctatagcaatttgcgagggatttacgccatctgaaatttccttcgcaaatcgcctgttttcttgtagattgagagagatttcaaagagatagaaggagacggtggagaggttgagaaagatttcaaagagattgagggagagttgagatgtgagagaaatgaaaggaaaattgagatttgagggaatattaagagatatttaagggttttgttttgaaaaaaatatgcgtaaaactgatttggaaaaaagaaaaaattgccgcataattttttcgttttagagggtaaagtttggtgcccgatgcttttccaacagtgaaacttttaccctcgcaaatccatcggaaatataaaatatttttcttatacatgtataaagtcatcatctcatttccaaatgagtgaactcggcgttacaaacacgctcttgagatacttataacatcgatcattttcttttcgtgactcgtttccatgtccttggagtgaaatttctgtgaatctgcattgagaattagatttgatataatcttgcttggtttgacttgagtactagctcacaaaactttaacctaaggcaaattttctaattttatgatagttatgtgtgtgtattgatgcacaaaaatgcattgatgtgcattcttctaggagcttattcaagtctgacttataaaatgttacagagtggatggttcagataagaatcaaagatctcagatgatgattatggcgggacgttactgcatgtgacgagttctccacttagatttgatcgataactctaaccgcacaataatagtgctaaattgaaatagaaatttaatgaagcttaagatcaataatggtgacgacgagaggctccatctaagtcgacgaagaagacaatacatattagagttcatgaactcaacgtgggtttagtagtttcaccctatagaggaaaaataaaaacagatcaaagataatcaaatagaaaccaaaaatcgttggagagatatttgtttacccttcacgtggatgctattattaaaagacggctacgtctatgaatttgatgagctaacaactgaaggcgacgaaaagatcacgactatgacttttttgatgagctaagaacggaagaaggcgactatagcttgttcaatatataattttgagaagatatggggatgctaaatcctatttttatttttattattatccacaaattttatttgagtaaatcctattaaacttatttttctaaatttaaataatactcgtttgattgttattttatttaatttaataatagcttaagttgttgtaatttttttttactttgaatatctatttaacttgaattttacttaactattttgttctctcacttccactctctcaattattttgcaattcttcttacttctctctacaatttctgaaaacatgtaagttttttttatatgtttatgttagattttggggtatggaatgtatctcttagcttaggtggttctgacgaggtgtgtcctgttgtattttgaacatgaaaattttaaacatgtgacgttggttatttatagatgtccgaaaacatattgcgagggatttgcgaggaacttgcgaggaacagcgctattttgctacgaatttgcgagagaagttcaactaccaaccaaagcaggattattatttaaaacgtgctgacctaacctgccaaggactcgcaactccgacgcaaaatttgctacagaaagtttgtacgccgcaagtttaccgtagtttgcgaggctttatcgtacagcaaatccctcgcaatttgcgatgactttgcgaggaattcttccgtcgttgcaattttctcgcagttgccacgcagtattgcgtgggaattctccctcgcaaattttgcgactgattaacgacgtattggttttcccgcgcaaaatgctcgcaagtctatagcaatttgcgagggatttacgctatctcaaatttgcctcgcaaatcgcctgtttccttgtagattgagagagatttcaaagagatagaaggagacggtggagaggtggagagagatttcaaagagattgagggagagatgagatgtgagagaaatgaaaggaaaattgagatttgagggaatattaagagatatttaagggttttgttttgaaaaaaataagcgtaaaactgatttggaaaaaagaaacaattgccgcataatgttttcgttttggagggtaaagtttggtgcccgatgcttttccaacggtgaaacttttaccctcgcaaatctgtcggaaatataaaatatttttcttatacatgtataaagtcatcatctcatttccaaatgagtgaactcggcgttacaaacacgctcttgagatacttataacatcgatcatttccttttcgtgactagttttcatgtccttggagtgaaatttctgtgaatctgcattgagaattagatttgatataatcttgcttggtttgacttgagtactagctcacaaaacttctacttaaggcaaattttctaagtttatgatagttatgtgtgtgtattgatgcacaaaaatgcattgatgtgcattcttctaggagcttattcaagtcttacttataacatgttacagagtggatggttcagataaagaatcaaagatctcagatgatgattatggcgggacgttactgcatgtgacgagttctccacttagatttgatcgataactctaaccacacaataatagtgctaaattgagatagtaatttaatgaagcttaagatcaataatggtgacgacgagaggttccatctaagtcgacgaagaagacaatatatattagagttcatgaactcaacgtgggtttagtagtttcaccctatagaggaaaaataaaaactgatcaaagataatcaaatagaaaccaaaaatcgttggagagagatttgtttaccccttcacgtggatgctataattaaaagacggctacgtctatgaatttgatgagctaacaactgaaggcgacgaaaagatcacgactatgaattttttgatgagctaagaacggaagaaggcgactacagcttgttcaatatataattttgagaagatgtggggatgctaaatcctatttttatttttattattatccacaaaatgtttttgagtaaatcctattaaacttattttcctaattttaagcaatactcgtttgattgttattttatttaatttaataaaagcttaagttgtagtaatttttttttactctgaatatctatttaacttgaattttacttaactattttgttctctcacttccactctctcaattattttgcaattcttcttacttctctctacaatttctgaaaacatgtaagttttttttttatatgtttatgttagattttggggtatggaatgtatctcttagcttaggtggttctgacgaggtgtgtcctgttgtattttgaacatgaagattttgtacatgttacgttggttatttatagatgtccgaaaacatattgcgagggatttgcgaggaacttgcgaggaacaacgctattttgctacgaatttgcgagagaagttcaactaccaactaaagcaggaagattatttaaaacgtgctgacctaacctgcaagtgactcgcaactctgacgcaaaatttgctacagaaagtttgtacgccgcaagtttaccgcagtttgcgaggctcttatcgtacagcaaatccctcgcaatttgcgatgactttgagaggaattcttccgtcgttgcaattttctcgcagttgccacgcaatattgcgtgggaattctccctcgcaaattttgcgactgattaacgacgtattggttttccggcgcaaagtgctcgcaagtctatagcaatttgcgagggatttatgccatctcaaatttccttcgcaaatcgcctgttttcttgtagattgagagagatttcaaagagatagaaggagacggtggagaggttgagagagatttcaaagagattgagggagagttgagatgtgagagaaatgaaaggaaaattgagttttgaaaaaaataagcgtaaaactgatttggaaaaaaaaatcaattgccgcataatttttttgttttggagggtaaagtttggtgcccgatgcttttccaactgtgaaacttttaccctcgcaaatctgtcggaaatataaaatatttttcttatacatgtataaagtcatcatctcatttccaaatgagtgaactcggcgttacaaacaagctcttgagatacttataacatcgatcatttccttttcgtgactagttttcatgtccttggagtgaaatttctgtgaatctgcattgagaattagatttgatataatcttgcttggtttgacttgagtactagctcacaaaacttcaacctaaggcaaattttctaagtttatgatagttatgtgtgtttattgatgcacaaaaatgcattgatgtgcattcttctaggagcttattcaagtctgacttataacatgttacagagtggatggttcagataaagaatcaaagatctcagatgatgattatggcgggacgttactgcttgtgacgagttctccacttagatttgatcgataactctaaccacacaataatagtgctgaattgagatagaaatttaatgaaacttaagatcaataatggtgacgacgagaggctctatctaagtcgacgaagaagacaaaatatattagagttcatgaactcaacgtgggtttagtaattccaacctatagaggaaaaataaaaacagataaaagataatcaaataaaaaccaaaaatcgttggagagagatctgtttaccccttcacgtggatgctattattaaaagacggctacgtctatgaatttgatgagctaacaagtgaaggcgacgaacagatcacgactatgactttttggatgagttaagaacggaagaaggcgactatagcttgttcaatatacaattttgagaagatgtggggatgctaaatcctatttttatttttattattatccgcaaattttatttgagtaaattctattaaacttattttcctaaatttaatcaatactcgtttgattgttattttatttaaatttaataaaagcttaaggtgttgtaatttttttttactttgaatatctatttatcttgaattttacttgactattttgttctctcacttccactctctcaattattttgcaattcttcttacttctctctacaatttctgaaaacatgtaagttttttttaaatatgtttatgttagattttggggtatagaatgtatctcttagcttaggtggttctgacgaggtgtgtcctgttgtattttgaacatgaagattttgtacatgttacgttggttatttatagatatccgaaaacatattgcgagggatttgcgaggaagttgcgaggaacagcgctattttgctacgaatttgcgagagaagttcaactaccaaccaaagcaggaagattatttaaaacgtgctgacctaacctgcaagggactcgcaactccgacgcaaaatttgctatagaaagtttgtacgccgcaagtttaccgcagtttgcgaggctcttatcgtacagcaaatccctcgcaatttgcgatgactttgcgaggaattcttcggtcgttgcaattttctcgcatttgccacgcaatattgtgtgggaattctccctcgcaaattttgcgactgattaacgacgtattggttttccggcacaaagtgctcgcaagtctatagcaatttgcgagggatttatgccatctcaaatttccttcgcaaatcgcctgttttcttgtagattgagagagatttcaaagagatagaaggagacggtggagaggttgagagagatttcaaagagattgagggagagttgagatgtgagagaaatgaaaggaaaattgagttttgaaaaaaataagcgtaaaactgatttggaaaaaaaaatcaattgccgcataatttttttgttttggagggtaaagtttggtgcccgatgcttttccaactgtgaaacttttaccctcgcaaatctgtcggaaatataaaatatttttcttatacatgtataaagtcatcatctcatttccaaatgagtgaactcggcgttacaaacaagctcttgagatacttataacatcgatcatttccttttcgtgactagttttcatgtctttggagtgaaatttctgtgaatctgcattgagaattagatttgatataatcttgcttggtttgacttgagtactagctcacaaaacttcaacctaaggcaaattttctaagtttatgatagttatgtgtgtttattgatgcacaaaaatgcattgatgtgcattcttctaggagcttatttaagtctgacttataacatgttatagagtggatggttcagataagaatcaaagatctcagatgatgattatggcgggacgttactgcatgtgacgagttctccacttagatttgatcgataactctaaccgcacaataatagtgctaaattgaaatagaaatttaatgaagcttaagatcaataatggtgacgacgagaggctccatctaagtcgacgaagaagacaatatatattagagttcatgaactcaacgtgggtttagtagtttcaccctatagaggaaaaataaaaactgatcaaagataatcaaatagaaaccaaaaatcgttggagagatatttgtttacccttcacgtggatgctattattaaaagacggctacgtctatgaatttgatgagctaacaactgaaggcgacgaaaagatcacgactatgactttttggatgagctaagaacggaagaaggcaactatagcttgttcaatatataattttgagaagatgtggggatgctaaatcctatttttatttttattattatccacaaaatgtttttgagtaaatcctattaaacttattttcctaattttaagcaatactcgtttgattgttattttatttaatttaataaaagcttaagttgtagtaatttttttttactctgaatatctatttaacttgaattttacttaactattttgttctctcacttccactctctcaattattttgcaattcttcttacttctctctacaatttctgaaaatatgtaagtttttttttttatatgtttatgttagattttggggtatggaatgtatctcttagcttaggtggttatgacgaggtgtgtcctgttgtattttgaacatgaagattttgtacatgttacgttggttatttatagatgtccgaaaacatattgcgagggatttgcgaggaacttgcgaggaacagcgctattttgctacgaatttgcgagagaagttcaactaccaactaaagcaggaagattatttaaaacgtgctgacctaacctgcaagtgactcgcaactctgacgcaaaatttgctacagaatgtttgtacgccgcaagtttaccgcagtttgcgaggctcttatcgtacagcaaatccctcgcaatttgcgatgactttgagaggaattcttccgtcgttgcaattttctcgcagttgccacgcaatattgcgtgggaattctccctcgcaaattttgcgactgattaacgacgtattggttttccggcgcaaagtgctcgcaagtctatagcaatttgcgagggatttatgccatctcaaatttccttcgcaaatcgcctgttttcttgtagattgagagagatttcaaagagatagaaggagacggtggagaggttgagagagatttcaaagagattgagggagagttgagatgtgagagaaatgaaaggaaaattgagttttgaaaaaaataagcgtaaaactgatttggaaaaaaaaatcaattgccgcataatttttttgttttggagggtaaagtttggtgcccgatgcttttccaactgtgaaacttttaccctcgcaaatctgtcggaaatataaaatatttttcttatacatgtataaagtcatcatctcatttccaaatgagtgaactcggcgttacaaacaagctcttgagatacttataacatcgatcatttccttttcgtgactagttttcatgtccttggagtgaaatttctgtgaatctgcattgagaattagatttgatataatcttgcttggtttgacttgagtactagctcacaaaacttcaacctaaggcaaattttctaagtttatgatagttatgtgtgtttattgatgcacaaaaatgcattgatgtgcattcttctaggagcttattcaagtctgacttataacatgttacagagtggatggttcagataaagaatcaaagatcttagatgatgattatggcgggacgttactgcttgtgacgagttctccacttagatttgatcgataactctaaccacacaataatagtgctgaattgagatagaaatttaatgaagcttaagatcaataatgctgacgacgagaggctccatctaagaggaaaaaatatattagagttcatgaactcaacgtgggtttagtagtttcaacctatagaggaaaaataaaaacagatcaaagataatcaaataaaaaccaaaaatcgttggagagagatctgtttaccccttcacgtggatgctattattaaaagacggctacgtctatgaatttgatgagctaacatatgaaggtgacgaacagatcacgactatgacttttttgatgagttaagaatggaagaaggcgactatagcttgttcaatatataattttgagaagatgtggggatgctaaatcctatttttatttttattattatacacaaattttatttgagtaaatcctattaaacttattttcctaaatttaatcaatactcgtttgattgttattttatttaaatttaataaaagcttaaggtgttgtaatttttttttactttgaatatctatttatcttgaattttacttgactattttgttctctcacttccactctctcaattattttgcaattcttcttacttctctctacaatttctgaaaacatgtaagtttttggtgtataaaatgtatctcttaccttaggtggttctgacgaagtgtgtcctgttttattttgaacatgaagattttgtacatgttacgttggttatatatagatgtccgaaaacatattgcgagggatttgcgagggatttgcgaggaacttgcgaggaacagcgctattttcctacgaatttgcgaaagaaggtcaactaccaaccaaagcaggaagattatttaaaacgtgctgacctaacctgccaaggactcgcaactccgacgcaaaatttgctacaaaaagtttgtacgccgcaagtttaccgcagtttgcgaggctcttatcgtacagcaaatcctcgcaagttgcgatgactttgcgaggaattcttccgtcgttgcaattttctcgcagttgccacgcaatattgcgtgggaattctccctcgcaaattttgcgactgattaacgacgtattggttttccccgcgcaaagtgctcgcaagtctatagaaatttgcgatggatttatgccatctcaaatttcattcgcaaatcgcctgttttcttgtagattgagagagatttcaaagagatagaaggggacagtggagaggttgagagagatttcaaagagattgagggagagttgagatgtgagagaaatgaaaggaaaattgagttttgaaaaaaataagcgtaaaactgatttggaaaaaagaatcaattgccgcataatttttttgttttggagggtaaagtttggtgcctgatgcttttccaacggtgaaacttttaccctcgcaaatccgtcggaaatataaaatatttttcttatacatgtataaagtcatcatctcatttccaaataagtgaactcggcgttacaaacaagctcttgagatacttataacatcgatcatttccttttcgtgactagttttcatgtccttggagtgaaatttctgtgaatctgcattgagaattagatttgatataatcttgcttggtttgacttgagtactagctcacaaaacttcaacctaaggcaaattttctaagtttatgatagttatgtgtgtttattgatgcacaaaaatgcattgatgtgcattcttctaggagcttattcaagtctgacttataacatgttacagagtggatggttcagataagaatcaaagatctcagatgatgattatggcgggacgttactgcatgtgacgagttctccacttagatttgatcgataactctaaccgcacaataatagtgctaaattgaaatagaaatttaatgaaacttaagatcaataatggtgacgacgagaggctccatctaagtcgacgaagaagacaatatatattagagttcatgaactcaacgtgggtttagtaattccaacctatagaggaaaaataaaaacagataaaagataatcaaatagaaaccaaaaatcgttggagagagatctgtttaccccttcacgtggatgctattattaaaagacggctacgtctatgaatttgatgagctaacaagtgaaggcgacgaacagatcacgactatgacttttttgatgagctaagaacggaagaaggcgactatagcttgttcaatatacaattttgagaagatgtggggatgctaaatcctatttttatttttattattatccgcaaattttatttgagtaaattctattaaacttattttcttaaatttaatcaatactcgtttgattgttattttatttaaatttaataaaagtttaaggtgttgtaatttttttttactttgaatatctatttatcttgaattttacttgactattttgttctctcacttccactctctcaattattttgcaattcttcttacttctctctacaatttctgaacacatgtaagtttttttttatatatgtttatgttaggttttggggtatggaatgtatctcttagcttagatggttctgacgaggtgtgtcctgttgtattttgaatatgaagattttgtacatgttacgttggttatctatagatatccgaaaacatattgcgagggatttgcgaggacttgcgaggaacagcgctattttgctacgaatttgcgagagagaagttcaactacaacccaaagtaggaagattatttaaaacgtgctgacctaacctgcctaggactcgcaactccgacgcaaaatatgctacagaaagtttgtacgccgcaagtttaccgcagtttgcgaggctcttatcgtacaacaaatccctcgcaatttgcgatgactttgcgaggaattcttccgtcgttgcacttttctcgcaattgccacgcaatattgcgtgggaattctccctcgcatattttgtgactgattaacgacgtattggttttcccgcgcaaagtgctcgcaagtctatagcaatttgcgagggatttacgccatctcaaatttccttcgcaaatcgcctgttttcttgtagattgagagagatttcaaagaaatagaaggagacggtggagaggttgagagagatttcaaagagattgagggagagttgagatgtgagagaaatgaatggaaaattgagattggagggaatattaagagatatttaagggttttgttttgaaaataataagcgtaaaactgatttggaaaaaagaaacaattgccgcataattttttcgttttggagggtaaagtttggtgcccgatgcttttccaacggtgaaacttttaccctcgcaaatccgtcgaaaatataaaatatctttcttatacatgtataaagtcatcatctcatttccaaatgagtgaactcggcgttacaaacacgctcttgagatacttctaacatcgatcatttccttttcgttactagtttccatgtccttggagagaaatttctgtgaatctgcattgagaattagatttgatataatattgcttggtttgacttgagtactagctcataaaacttcaacctaaggcaaattttctaagtttatgatagttatgtgtgtgtattgatgcacaaaaatgcattgatgtgcattcttctaggagcttattcaagtcttacttataacatgttacagagtggatggttcagataaagaatcaaagatctcagatgatgattatggagggacgttactgcttgtgacgaattctccacttagatttgatcgataactctaaccacaaaataatagtgctgaattgagatagaaatttaatgaagcttaagatcaataatggtgacgacgagaggctgcatctaagtcgacgaagaagacaatatatatttgagttcaagttgattgtggaccgcgttaagcttagccttgatcccaacaatcttactctccttcatgtttctcgtttgttccttgttctgtgattagacaaacacctgaaacacataagaaaaagaaaagagaaagactaagtaaataaaaagaaaaagaaaaataaaaccttagacaaaattctaatcctaatctaatggtgaatcgtagagaactttggcaacggcgccaaatttgatataggtcaaattgtcttaagaccactctctcaaataagagatcgattgtagtactttagggtcaaattccacaaagctctcggatcacacaatagacgaaggttttgaattaatctaagtaagattgtaataaaaacaaaaagaaacaaaaggaagcaatagcagattgtgaggttgtaaaacaagaaagtaaaaacgttaggcttagggtattttcaggaaagtattggttagtagatctaataatagctagattgttatcgaaccatttttaaactcaaactctaattatggaataaccggtggcgttccgcgaaattccctatatctatagctaagaataaccggagaagccgagagattattaacctaaatatgcattcttaacgagttcgattgttcaccttagtagataggctgattcttattacacacctatagactaggctcatcaaataatagatccaactacagatacctatgacgggcatatctattgtctgcattcaagttctaggtgatcaatttagatctagcattaagaacaattaaacatgaagaattctacagataacctagcaggggggactatctattaaaccatatgaatccctaatgagaaaccctaaacctaacaagtggattactcagacataatcaaagaaacacaaatcatagtctaaataagaaatcaataatagcaacagaaagagtaaagaagatcttctccacagggagactccatagggttttgctcccaaagtacaaaagagatgaggagaatagcctctccaagcttaggtctaaacaatgaccctaaaaacttaattatatgtctaaaagaggtgttgggccttcattaaacataggagaaagttctgggccgaatttgaaaatcttcaaaacatcaataagttgcatctacgtcaggtattggtgtcgctagacaccaggggtggtgtggttcgacacctacgtgcattttcgtctccggatttcttcagcaccataaattctctgttctcctccaaaatgctccattatccccaaatgaatcccaaacatgtaaagacctgaaaaatactagaaaatactctagaaataacaaatagactctaaaacctatacctaaaacatagttaaaaacagtaaaaatagggatatatcaatcgtataccttgactctggatccttcatggacttgcttctgtagtaaatcggtttttgctctcaacggtcttctcggaccaagactccgctaactgcatgatttgacacaaaaacatacaaataaagcttttcatctgcttcgggtttggataatacaggtggcgtggttagatatgccttaagctgtctgaatgcttcctcgcacttctcatcccaaagaaaaccattgtttccctttaaaatttgatagaagggtaaagatttatccgttgatcttgaagcaatccggccagttagtcgctgcacttctttgaagtttcttagagacggcgttttgagaaaagcattaatttggttcggatttgcttcgattcctctttttgtaacaatataaccaaggaattccccggatgggactccaaacgtgcacttcgccaggttcagcttcatttggtattggttaagaatctcaaagcattctcctaggtgtttgacatggtcttctttcttcaatgacttgaccaacgtatcatcgatagaaacttccatcgtctttctgagatgttcattgaacattttattaaccagccattgataagtagctcctgcattttttaagccaaaacgcattaccttataacaataaatacctctatccgtgataaatgacgttttctcttgatcctcgggattcatcattatttgattatatcccaaaaaagcatccatgaaagttagcaattcgtttccggcggttgattccacgagacgatctatatgtggaagtgggaaactgtccttcggacaagctttgttgagatccgtgaaatcgatgcacaccctatcttttccattcttctttttgaccacgacggtaattgccacccaatccgggtattgcacctcccttatagatcctatctttaaaagcttatcaattttgccgtttaccgctttcgctcgttccactccgagtttccttcttttttgtttcagaggtttgaaccttggatccacgtttagctcgtggcagattatgcttgggtctatgtcaggcatgtatgctgctgaccatgcaaacaatgctttgttcttccttaagagttcaaccaaagcttcttttatctcgtcagacaaagtagatccaattcaaaccttccgatctggtttgtcttcttctaacagtacctcgatcacgacatcgtccaccttctgcccactaggaaatctttggactatccctttctttgcgggcttcgttaattgctattggatattcaaacggtggctagctaaataacatgttcttgaaccttccaggtctccccaaattgtttccactccgtttgaggttggaaatttgagccattgatgatacgtagaggggaccgctttcatttggaagatccaaggagttccgaggatgatgttgtacgttgctggtttgtcaaaaacgacaaaatccacaatcttcgacatctttcccgctaaaactggcaatttgattgttccaagcgacatcgctgattcgctagtgaaagccaccaaaggagacggaggtcctactacatctgctctgctgattcacatcctttccaacgtacctaggaagatcaaatcaaccgaactacccgtatcgacgagaattcttgatattttgaagttagccacgtccagcgtaatgattagagcatcatcgtgaggtctttcgatgtgccgcgtttcttcctcgtcaaatgatactgaagagcattggtagttaacctcttcactcaaacttgatttaagtagaacatttggccgatgctttttgatagcgctaacagaattatggcaaagtttggaacctccaagaatcacgttgatttttcctttcgaacttcttggttcctcttcgttagtcaaccttggccttttagagttttgagtttcggagttatcccttgcttcgtgatattgcttcacgaaatcatctatgttgaatttggaaagatctccgcttgcccatagttccgcgagataccttttaaggacgatgcagtccttggttagatgctcggttactctgtgtatgtcacaatacagactttcatctcggacccaagtgtttgacttccctttcccttgaaattgtttcccgacgttattgttaaacgattgtgaaccgaacttccttggtccttggttgtccaaaggttcgaacaacttatctaggaaagtgaccgccggttttgcttggtcatttctttttgcgaaactttctttttcgtcttcgactttcatccaattgtttgctcgtaataatgcatattgaattgtgtctggcttgtggagtattaaatcctctttgaatcttgaatcatcccacaatccttttcgcaaggctgataaagccgattgctgcgagattcttgggagctttgaaagtacattcttgaacttggtgataaaagcccgaagtgagtcgttcggcccttgtaaaaaatttcaaagatcggtatctgaaatgcttttatccagaaggatggaatattgtttcaataatacggctgacaattcgttgaagttactgatcgaccctggttccagctgggtaaaccacattagtgcttgtccgcacagaatttcagaaaagagtttgtagtaccgtgcatcttcctcagcctcatccaagtcaacccaacctgcagcgattagaaaggctgcaagataaccttttggatcctccaaaccgttgtatggttctaggttcagcttacgagaattcctgattctcaagcttgcgatttgcgggatgaaaagtgttcgcctagcttcttcgatgactcggttgatatccggctccgaacttgtggcctgatggaattttgacctcatttctttcaattcccggctcactttcctcatggttttgagctggttgaaattttcctgctcgtgctggtttactaactgatattcgtcttcgagctgttt

SEQ ID NO: 522 - DNA, 74475 bp, Arabidopsis thaliana
aagcttgcgatttgcgggatgaaaagtgttcgcctagcttcttcgatgactcggttgatatccggctccgaacttgtggcctgatggaattttgacctcatttctttcaattcccggctcactttcctcatggttttgagctggttgaaattttcctgctcgtgctggtttactaactgatattcgtcttcgagctgtttttctccatcttccggctggactactgtaagatgttatagtgctaacattttgactaagtgataccagggttgtttgcaatgtttcaacagccttttccacattttcgtgaacttctgcgacatgtccgtcatagtttgctgcatggttttgagagtttcgactaatgaagcgttgaaagcgtcttctccggccattgttgcttacctcggaaatgtagtgtatagacaagtctgacgactcaagaatcctccgttcccacagacggcgctaaaatgtggatgtcggattcacacactcaagtatttatttatttagtgagaaagattattcttgaggacaaaaaataagtgtagagaactattgattatgaagaaaactatgagatttgtaagaaaatgtgtatggtaagtttgcacaaaaatgtgtgtgtcttccatggcctttgaccctataatttatacctaagaattacacttaattctcatttacacacaattattctatcttaaatgtatctgtttcggtctttgaatttattgttcaaacgttcgaatttgaattgacttcgagctccatgggcttcgccttccggcctaaaggctctttaatccagacacctttgatcccgtcatcacatccatctcgcggaccgaccacttcgcttgtgttcttctcctcgcctaaagaagcctatgggccttacttcttttgggcctctcttgtccacgtggcaatctttggttggtaccggtgttcctggtgcgggatccgacaccaacaccgaggtttgcgacaaaacttacatgtcaaacgatctgaatcttctctccagaacaacatacaattgtcaatgcacacatctatcaccagatacggtaaaccaagaccagctaccaatttctgcacctcgtagtatgttcccggtgcaagattatcttcgggtaataaatctttcacaaaatcagtaatcgcatccacaaaatcctcggataaatgatattcagttttgatacccatcaacttggttgtagaagataaaggcgaatgaccctttttacatcctttatataagggatgttttgctgcatctaacatattaaaaaactttcttgcttctaaattaggttcctctactctatcactatccctatcaaacgagtgtacattttcacgaaaaaatcattcaccatctgaacggtacctacatttgcatctacttccggatttggttccactaacctatcaacaggataatgttcgttacaactaccataattcaccattgactcattttctccatgcatgaactaaactttgtaccttggcataaacccttccccatataagtgcatccaaacttgagatacaggaagaactctaaaattctgacatgtacaacatggacaatacatttttttttattcgatggttaccggttggtttgccgcaaatgccatgaattgtttaagaccttctacatattccgacattagcaactcctttaacggatcacgcgtgggctggtccatccatgatcgaaaataattaaacggattcgaagaagccatttctctagttatattttattgcttggacgattttgtgaatgagtgtagaagaataaaaatatgagaattatcaatgtttccaacgagtttcagatggctttccgaccgctttttttgatgattttttataaaaaaaaactaaacgcacggctatttaaccgaacggctatttgactgggctgctatttgaccaagtatagtttgttggaattccgtcagaaaagtgtagaatattccgacgaatatgcgaggggtcaaaacagagatattttgatcagaaatccgtggaaatattcggtcggatttaatttggttggagttttgttggaaatcactgacgaattggcgatcatttagaatccgttggaaagtttcgacgatgttttgataggaaacatgtcgttagaaatccgttggaatatcattaagaaaccgtcgaaaatttctaaccgtttatttaccgttggaaaatctgttgaaaaaagttttgttctcttgtagtgaactaggatatgacccgcggtataccgcggattaatattttatttatttttgtattttataaaatgaaaaatttgttgtgtataatatttgttgttgtttgtgttaattaataattttcgataaggttttgtacgatttttaataagtcataaatttactgtattaataagtctaatattatttttttcttttaggattgacttgtggtacaccacatgataattttttatttttattcaaaaaacttttatattaaaattataaaatttaatcttgatgtgtttttagatttaacccgtagaacatatgtaatttagtaactttgtattatagttacacatttagatctgtcaaaaaagaataattattattttgatatattataatgttgattttcattgggatgtctcatattaatatcgagccaaacagttgttgggaatgtcctgaaatcagttgtactttactctagctaaagttgtaatgtcaaggtttgacatttgtataatattaggtggttataatgttttgctagagaccggttataatctatgagttataactcattactaatattatacaaacctacagggtcacacacctaagcaaactggatcaataaaaagagttattgggctttggcccattattaaccctaattagttagggttaaacgtttggctatatatatgatatattagcaacgtttgtgagatacacttttgatcataaaaccataaaatagagagacaaattgtttgtctgagttttgagattagatctcaaaggaactagcattccagatctaatccagtttgtgtgcgtgtggatacggtagaggcacaacacttggggtgctaaaacaacctcgcaacaatatggttcatctttccgctgcagaatatccaggtatattcaaaccctatgatctaaatttgattctttatttacatggatcttggcaattgaattcgtttttagtatttataaatcgttataaaccggtacgaattctttcagtggtatcagagcctatgtgtttaatactgaatttgaatcgaatttagttatagatgaaaaactgttatttggtttatcatgtttaatttttgaaattgaattggtaaagcatgagattaacaaaaattatgtaatcgttgatcaaattcgttcatcgtaactatgatgttaagtgaatttcttaattgacagctagaacatgtttatgtgtatataagatatatggttgtgttaattgtcataatttgattattgtattgaatgaattttataataacatggtgaaacgtttttgtatatattagatatgcattaatgttaaaatattattaagggtatataatgatatacatacatatattcgctcatgttggttgataattagactttgtgatcacgtgatgttatttccattaatcattactcatataaatatttaatgtgttaaatatgatatcaaggattctatgtaaagctacggcaatgataggattctttatttgatttggatttactaagtcatgaatataatcgtatatttagtggctcgtgaaatatctttttagaaagataaagttaattatcgtaataattgtgtatagattttgatatgatcaaaaattatactagtcaataaaataattctataaatcctaatatgattaggataagtctgattatattatgttctaataacatctgattagatttactaaaatttaataaggttaaccttttagataactaataattttaatatgattaaaattaatttaattgtttataattcaattaaatatatatttgataaatattacttatattttatttatattggatataaatttaaatataaaattgagttataaaattaattccttatctaatatcaagcaagttgatgtctctccaattttaataattgttaaaacttgagttgttgtatggcgggtctgccaaagcagcggtctgcaattgcttaagagtaaaacagatggtaacggttaccatatgaaataaaattggtttacttgactaagctatcaaaacggttttgggcttagagacatagggttggataaccaagaattatattggatagaattagcaaggtgttgcttacctaaataactagatattcaggggtggagccaaagctcacttggattctagtgaaatatggatcttggatcattggactcactagaggaaatttgttttgagtatagtgttagctttcttaattgttgagaattttaaaatttatgaacatcatattaatttctgcttttctttttcgacagttatgtcaaaccctcaaagttcctatttagttcgagatgtcctttagaaggacaaattgaatggatcaaaccctcctgaacacttggaagatctggagaagaagaaaacattcaagatttcttcttcgggtatctatgttatagaagtaaatgttactacttctggttctactccttgggtattggataccggttgtggtgctcacatttgtgtaaatgtgcatggcctaaacaacagtagaactttggaggaaggacaagtggacctacgtgtggctaatggagcaaaagtctgtgcattggccgtgggaacatattcgttatctttgccttcaggcatggttttggagcttaagaactgctactatgttcctgcaataaacaagaatatcatctccgtttcatgtttggacatggaaggttttcacttttcgatcaagaacaaatgttgttcatttgatcgagatgatatgttttatggtagcgctccattagataatgggctacatgttctgaaccaaagcatgccaatctataacattcgtaccaagaaatttaagtctaatgacttgaatcccacttttctctggcattgtcgtttgggccatataaacgagaaacacattcaaaagcttcatagtgatggacttttgaactcatttgattatgaatcttatgagacatgtgaatcttgtttgttgggaaaaatgactaaagccccgtttactggacacagtgagagggctagtgacttattgggccttatacatacagatgtatgtgggccaatgagtacaagtgctagaggaaactatcagtacttcattacatttactgatgatttcagtagatatggttatgtttatctaatgaaacataaatcgaaatcttttgaaaatttcaaggagttccagaatgaagtacaaaatcaatttggcaaatcaatcaaagctctacgatcggatcgtggaggagaatatttgagccaagtttttagtgatcatcttagagagtgtggaattgtttcacagctcactcctccaggaacaccacaatggaatggtgtgtccgaaaggagaaatcgaactttattggatatggttcgatctatgatgagtcacacagatcttccatcacccttttggggatatgctctagaaacgtctgcgtttatgctcaacagatgtccatcaaaatcagttgagaagacaccatatgagatatggactggaaaggttcctaatttgtcttttctgaaaatttggggttgtgaatcttatgccaaacgattaattactgataagcttggacccaaatctgataagtgctactttgtaggttatccgaaagagaccaaaggttattatttttaccaccctactgacaacaaagtgtttgttgttcgaaatggtgcctttttggaaagagagtttctttcaaaaggaactagtgggagtaaagtattacttgaagaagttcgagaaccacagggtgatgttccaacttctcaagaagaacatcagttggatctacgaagagtcgtagaacctatacttgtggaaccggaggtacgtaggtccgaaaggagccgtcacgaacccgatagattcagagattgggtgatggacgatcatgctctatttatgatagagagtgatgaacctacgtcatacgaagaagcgttgatgggccctgattccgataagtggttagaggccgcgaaatctgaaatggaatccatgtcacaaaacaaagtatggactttggttgatttacctgatggtgtaaaaccaatagagtgtaaatggatattcaagaagaaaattgacatggatggtaatatacagatatacaaagctggactggttgcgaaaggttacaagcaagttcatggtattgactatgatgaaacctattctccagtcgcaatgcttaagtccattcggattctcctagcaactgctgctcattatgattatgagatttggcaaatggatgtgaaaacagctttccttaatggaaatctcgaagagcatgtgtacatgacacaacctgaaggtttcactgttcctgaggctgctaggaaggtgtgcaagcttcatcgttccatatatggattgaagcaagcatctcggagttggaatcttcgttttaatgaggcaatcaaagagtttgatttcattagaaacgaagaagaaccttgtgtttacaagaagactagtgggagcgcagtcgcatttctggtattgtatgtagatgacatactgctccttggaaatgacattcctttgcttcagtctgttaagacttggcttggaagttgtttctcgatgaaagacatgggtgaagctgcctatattcttggaataagaatctatagagatagattaaacaaaataattggactaagtcaggatacttatatagataaggtcttgcataggttcaatatgcatgattctaagaaaggatttataccaatgtctcatggcataactcttagcaagactcagtgtccttcgacgcatgatgagcgagagcggatgagtaagattccatatgcttctgctataggatctatcatgtatgctatgctctacactcgccccgatgttgcatgtgctttgagcatgacgagcagataccaatctgatccaggtgaaagtcactggatagtagtcaggaacatctttaagtacttgagaagaactaaggataagtttttggtctatggaggaagtgaggaacttgttgtgagtggttatactgatgccagctttcagacagacaaagatgatttccgatctcaatcaggatttttcttttgtctcaacggaggagcagtgagttggaagagtaccaaacagagcactgtggcagactctacaactgaagctgagtatatagctgcttctgaagcggctaaggaggttgtttggattaggaagttcattactgaacttggtgtggttcctagtatttctggtcccattgatctttactgtgataacaatggtgccatcgcacaagcaaaagaacctaaatcacaccagaaatccaaacacatacaaaggcgatatcacctcattcgtgagattattgatagaggtgatgtgaagattagcagagtttcaacggatgcaaatgttgctgatcattttaccaaacctcttccacagccaaagcatgagagtcatactactgcgattggcattagatttataaagatgtgatcttatttctagtgggagttttttttcttttatgatatgatgttcatgttaaaatacatttggatttatttttaaattaatgaaatttgtttcagtattatttatttaattatcaataattaaataatagtctcaaataatttatttcattcttataggtcatcaagtacgtgacttgatcatgaaaccatgtaagtggaaaatgacatagattattaaagtccctagtcaaggttattaaaatgagacattaataactaagaatgactagtatgtgaggtgactgatgactaagtttcatggagtcattaatatgtggtattaaagtcaatcacatagatatgtgttagagaacacagtattggactgacccgttatgagaactctacaagattgttatatgagtgtcataagagtttctcatcacaactatagagtatagtcctttgacctgagttcgtcatgatttcttattcatggattagttcgctttgactctgtcaaacgtcagccgttaaaggtgattataaagacagtgattgggcgcgttatgaattgtttaaggaacagggatggaacaagatgggatttgtccctcccatataacgggagataaatatctttgggcctatcgaagatttgatactgagaaatgcgtggccacgctcaaacgaggtgaatgtcagtcgtttgttttatcagtataaatcggagttcgataaacatggtctagctgaataaggatgacaatttcttgccttatgctgagatcgagatatagagacaaagggattatgggaatagatgattccagtacaagtgggagattgttgggaatgtcctgaaatcagttgtactttactctagttaaagttgtaatgtcgaggtttgacatttgtataatattaggtggttataatgtcttgctagagaccgcttataatctatgagttataactcattactaatattatacaaacctacagggtcacacacctaagcaaactggatcaataaaaagagttattgggctttggcccattattaaccctaattggttagggttaaacgtttggctatatatatgatatattagcaacgtttgtgagatacacttttgatcataaaaccataaaatagagagacaaatagtttgtctgagttttgagattagatctcaaaggaactagcattccagatctaatccagtttgtgtgcgtgtggatccggtagaggcacaacacttggggtgctaaaacaacctcgcaacaatatggttcatctttccgctgcagaatatccaggtatattcaaaccctatgatctagatttgattctttatttacacggatcttggcaattgaattcgttattagtatttataaatcgttgtaaaccgatacgaattccttcaacagtctcatccaaacccgtccaatccaaatccgtctaatccaaactcattccgccataattagagtcaaattaaattttaaatctaactaattaaaatttagtgaaagaaaaattaatcttacactttgagctattttgcaactatcattaattatggtaagtatcttctgttttgtagaaattaggccagattcaatcactcaattccggctcaaaatcaaataaaagcggactcaattagattctttaaaatatacttcaaaaattaatatatattggtaattttatgatttttctcatgatatattatcctatattaaaatcgatccaattctgttccatcatataacactgtcccttgataattaaatatcacttttatttaaaatacatataagcctaatcaatttaaaagctttaatctaactaattaaaacttaatgataacacataaactattatactttggactgtatttcaactatcattgctaaagataagtatcttgtttgttataataatatatagattattaagtaaacaaaattttaattaaaaattgtattaacaccttaaaaaatattgtctcatagtaatttgtttttttcttttttttttttttttacaatggttttgttttaaaaaaaaattaagtctattgtttaatagaaaagcagagtgttttcatcctttttataattgtttttaaaaggaaaaaaagagcaactatcgtctctctcttctagtattgttctttcaaaattcagaccttctattctagcaattcttcaaattctgaatttgttctttcaaaaactattgaatcaattctttaatagaataagttcatctcgttgaacccaaagaattgattcagaaatttgcatccaattacacctaccacttcttaaagcatcgattcaattgcatcttcctaattagtgcattctttgtggcggtgatgaaatatagatctccaggtattagactatttcccttctcctacaacagaagcacgttttggttttgatttcccaagaatccttaatcgatgagtattagctaataattgttcatactcatgaaattgaatctgtcgtccttaattagggagtagcagaagaatctctcgatgatgaaaatgggaattgaggtactaaaagcaaagttaagcaaaggtaatttttctaatttcaaagttctaagtttccaatttctttgctcaatatatttacccatctgtttgtaccgaggttgtaacaataataactaaggcgtttggggagaacggagtagcttctttattaatgacgaacagaaaagatggtaacttaacagaacggaaaaccgtaagtacaaaacggagaaccgaaattacagaacggaaaaccgaaagtacaagtcggaaaaccagaaaatacagaatagaaaacgagaaagtaagagataacagagctaggcaattattctctcttaaattttctaggtaataactcttggtctggacccagttcccaatagtgtcttctgctatttataggttaggagatgacctagggtctcccctgcgactttccatttttaccctcttaggtttccatttttaccctcttaggtttgtctggctgggccgaattgatgttgttggaccgagcaacttacatctgggccgagccggtcgatctaatgggtcgattttctgatgggcctttcttttggtgggccgttttgacttatttatcttgtgtttgggtcgaactgggcatgaagggcaaggcgcgtatcccacaccatctttgatggcaaatttaaaattggattatcaaactaaaaatgtatgtaacaataaaatttgtttatcatttaatagtgaagcctaccaacaaccctaatactactaataagatgtagacatatagtgaagagagatggccgatggaggaaaggtggcttgccaatttgaaggttctggttacatagtgtcttgaaatattgtttttgcaccttggtggccacacgatcaatgctaatgtttgagtcccgattttgttaccttcttgtctttttctttcattcattccttctgcttctccttatcccttaaatcaccgaacttatctacatgctttctagaaacatgtgacacttaaacaaatgaaaattagctttagctaatattcaagaactaatatttaggaattgaaaatactttctaccttttgatattaaacaccaatacattctcttgactaataagttttcagacaaattcattggttactaattagatatataaaaatcctttgtttatcacacacaaaattactaagaatgcaaaaacataaaccaaaacataaaaaaaaaactaaataaaagtctgaagtctcatactgtattgttttcacgtttaaagctagagattcaatctgagagattggaattgtattggtgtgttgtgtttagaggtaggagaaatgaacgtttatttataatgttttaataggttagtaaggtttttgattagagaatataccaaatcttgataagcaagtattagatatcttagaatatattcacgatcctaactcttatagaatatgttataggaaataggaataaaatctcttagctaggaatcatttctaattcagttcttgtgattgaatatcgattttagatagttccttttatttaggaaacttatgaaggttgtttgaaattgatattgttcattttttaagaaaccaaattgatttacaatttactcgtttccatctttataggaaaggaatgcatcaatcgaatagaaaggaatatagcaaatgagttgaatccggtatatatcaaattactgcgaaaaatattatatgtcataactatagctagatacgatattatttcattttattgttttgatttttatttggaattttgtatttggaaagtgttattaataagatccgaacacataagaatcgggttaattaacaggtcaaataccgggtaaaaactaaaaaaaatttgacccgattggattccttattttgtacttcaaaaatgttaagttgatttggaattttgtatatggaaaatgttattaataagatccggacacagtagaatcgggttaattaacaggtcaaataccgggtcaaaactaaaaaaaatccgacccgattggattccttattttgtacttcaaaaatgttaagtagatgttgtgaaagccgcgagtgacattcggagtaactgaagacaatgcagtatcatcttgttgtagttgacgacaaatattcctccatcccaaacctccatctgtttgcactgatgctctttgaaaatatcgctcgtagtaattcaaagttggttaaattattaattcttcaaatttgctgattctccaaattccacagttcaattctttcttcgtaacatagatagggaaggccttgtgatcgcaagtgacatgtatggaatacttgtaaatttagaaacatgagataataaaaaacatcatcatccataactaaaattatgatacgcagttaataaaatgcataaatagattaataaaaataaattatattttataataaaaattataaaattacataaataaactacaaaaaatataacatactttaaaacataaaagatagtaatctaattttcatcttttgaatcactagcatttgttttccacaaagtttctcacatattaaatagaccctggcctatgtgttcgtgaaactttttgctgagtattccttattgtttcttcttgattgttaatgaaaatccatattgaatatttgttggagtcgttcctaatgagcctacttgttgagaatttgttgtattgtgcccttcgtgaatgttagatggtgaaccccaagattgaaaatttggttgcagcccccaatgtgaagcatttggtgataaaccccattgtggatcatttgtggtgaactccattgagacgcatttggtggtgttttccattgataaacattttgttgtgtgttccattgtagagcattaggtggtgttccccgttatttagcatttggtggtgtttcccattattgaatacttggtggtccgccccactattgagcactcggtggtgttcaccattgttgagcacatggtggtgttcccactattgagcacttgatggctttccccaatggtgaacacttagttccttccttgtaggcttttttaaattcatcaagtttgttttaaaaaacttcatatgttacattcatgttaaatgctaggttgaatttctcaatcatatattctcgaccaaaggctgtagggtctttaagagtataattattcatagcaattgcatgatcaaaaaactcaatcaaagtttttcgttgtttattgcactaatacctcggtatggtctaaatgtttttcaaaaaaatattagttttatgttttccaaaatactaagaagcatgtataatataagtttttctataaaacaaaaacaaaacaaaagattactcttgatgttgtttcattcggagcatttgtgttttttttgtctagaagaatttgtgattgatcgacctctagacaacatatctacataaaccaaactaatacacataacggttaattataacactaaatttaagaattacattttttacatatttttaagaaaattaaaattgttaattctaatctatactacatacataatactgttgggataatattttccaaacaaacccatacaaattaattctaatattttcttattatttactaaaaataggatgtacacatattttcgataacaattaattataattctcttaacatcaatccaagataaaaaaatattttttatataattacataaatttaaattttttaactatacataattaagaaatcactataaatttacatgacaatatctcttaaaaagactagtttcattgtttttagtatttaaaaatataataatttgataattatagtttagaactaaaatcaagtatcgaataaaaaataattaaacattgtttacttttaaaaatgaaagatgtgtatagctttgatgttgtgtttataagtgaatagatgtagtgatgaacttttttttgctgtttttgtgtgttttgtgtttgtcaaacttttttgtgataaactaatagaatgcatgcattctttatataaacaaaatctttttttttaatttcctttttatgattaataaaataatatataagcatatccactggttataaacatacctcataactatcttctgcgtttctagagctatttgaaatacgcaccctgtcttttagctattagtaagccacaatattattttaataatactttaaagtaaaaaatatttatattaacaaaagttgagaaaaatatgactgaatagaaacaaaatatctggaccacatggcgttttaggaatacgcgctatccattcatagcctttgaatgttgacgtagaaagcacctttgtaagcaagtttgttgcgttgtcacttgagcggatatactggatatcaacttcttcgtttttcacgagttcttgagtgtaggagaaaaaccttggagggatatgcttcgttctgttgctcttaatataaccttctttgatttgaggaatacatgcaacattatcttcatataatcttgttggctccttttagatgattaatccacttgctcttaaatatggttagtcatagatctaatccaaacacattctcgacacgcttcataaaggctataattttgcgtggtttgatgaagttgcgactaaagtctccttttaagaacgccacaagattcctccaatggcaacatccgagtaactttctatcttggaggggatagagatatgaccatctagttcactaccttcttgacaaaaccatgtccaacagtgtctgggctaaatgttacccgtctcaaagatgtgagtacttataaattgaaggttccgatcatcgacccctaatcacttacttcaatctgaaaaagaaaaagcaaaaaggaatctttagatatgatcgcagactcaaaggtaataaacaagtctcccaactaatcattcaaagttgtaaccacataatccagatgaagcggtagagaataagcttggtcactgcagaagagcaattattacccaaagacgatgggggagtagtgaccaatagctctttgcacagtatactataagatcatagcaaaaatccttaacaagaaattacaaccaatcctccatagcttgatcgctgaaaatcaatctgcctttgttccataaagagcaattgccgacaatgtactcattacgcatgaggctctccattatctccattcctcagattcaaaggtctgatgctatatggtagtgatgaccgatatgagtacggcctatgacagaatagaatggggttttattagctcagttcttgaaagactcagtttccatcagttcttgtgaccatagttagctactcttaccttttaaatgatactgctcaaggctccattgtcccacaacgaggcatacggcagggagatcctctatctccatatctcttcatcctctgtagtgaagtcttgtctggcctctgttacaaagcgcagttagaaaataaactcacatgaatcaaggtgggaaacaaaagtccccgaatcagtcaccttgtatttgtagatgacaccatgtttttctgcacatcagatgaccaaaactgtgtagctttattggagatattgaagaaatatgaattggcattagggcagatgattaacacacagaagtcagcaatcattttttcagcaaaaacccctactgccacaaaagaacgagtaaagagccaattgggaatataaaaggaaggaggtttggaaaaatatttgggcctgcctaaattgttgggaaggaagaagaaagacctctttgctctagttgttgataggatccgatagcgagcttgtagctggtcttccaaattcctctctactgcaggcaaaatgatcatgttaaagtcaggtttagcagccatgccaacctatactatgtcatgcttcaaactcccaaactctttgtacaaacgtattcagtccgcttaaacacgtttctagtgggatttaagcatggacaaaaacaaaatgtgttgggtttcgtggcaaaaacttacacaacctaaaggtgtgggaggattggggtttcgagacctacagtgctttaatgatgcgctgcttgcaaaggtcagttggagaatactctcaaacccaacaagccttcttgctagaacactcttgggtaaatactaccataccacgcctttccttgagagctctgttccaacctctacctctcatgggtggcgtggaatctgcataggcaaagagctattaaaatcacatttggggaaagtaataggtaatgggtcttctacctttatctgggatgattcttggatctctcttacctccccacgcagacatatgggaccaccaactgaagcaaccgctaaccttacagtagaacatctcatctctcctatctctctagaatgggacaaggaaaggatcaaccaaattctctcaggacttctagatgaaattttggagatcaaaccgagcaggctcggagcaaaagatgcttatgtgtggctagctacgaagaatgacatctatactgcaaagtctggttactactcatgtgttcaagaacaactagaagactgccctcctcctattaatctcagagacttcaattggatgaaacacatctggaacattcaatgctctcccaaactgaaattcttcctttggaaagcaatgagaggggctttaccagtgggagaaaacttgatcttcaggaacatcaacgcagctgcccaatgtcctttctgtggtgaaaatgaaagtactcttcttcttttcttcacctgcagattcgcaagacatgtatggcttttaacccctttcgaaacccgcttgaatccagaccaaatagtctcttttaaagatggatttgagcaaacaaaaggacagatctgcctactaataataggtttttaaggtcaattaatcctaaagcactatcatgtcgttgtagtatttcaggttgtcaatccaaatgggtgtgatgctagcaatcaagatgctatcagagttcacagagtcaagccaagcaataacaggttttgaggtgttttagcagtcctaagtgaacatgcaggaaacataatttcaagcagaacagtaaaaacactcgaccaacacagcttgttgccaagcactgggtgtggtcgagtgacaggtcgagtaatagacagataatgtaacacggatactcgacttcacagtctgttaccaaacaactaggtggtcgagtatcaggtcgagtaacaggagagaaatgcaaatactaagcaacaggtaacaagatgcagtaaacaaagaaatcaattagataaagaattcccgaggatggggtaattgagtagtttcgcttcctcagtttacaggtgattgacatgctcaatatattatccctagacaacaagttcgataaccaaatataagtgccaccgcaacagagaccctcaagttaaaccagtctcaaactcaatcaccattgacaacagctaacctaacatgcattacaaatcaacaagttaaagccaaaacgctcccggcaaccaataccttggtacagagccacgaatctctggaattagtggttcacacatttcatcgaacaccttttgggcgcggaaatgtctaggctcaaattccagttgattagaaagcgataggcattaagaacaactaatccataagggatctataaatcaaactcaaccacctagcatactgagaattctaaactactctaacccatctgcagaaacctagtcactactcagacatcattgcaaagaacttaaacgatgaatagaatgaaaacatgatagcaacagagtaatagcaagatgataacaagatgaacaacttagtaaacgaaattgaaaagcaaatactaaatactgaatagattaagagaaatctggattacaaaatgtcaagaacacagtgtatgcagaataaaacttaggtcacaaaaatgtaaaatacatgctacttatagcaaaatattctgaaaccctaatactcaaaacgacgcagtactgagacggattaagaacggtactcgacccaggtggtcgagtgataagctggagtgttcttctcttccttgtgctcgagtgtgtggttgagtgcggaatggagaagacagtgaagctggcagtcgagtatgaagtcgagtaggaagtcgagtgatggagatggtggtactcggcttggtggtagagtgatcggtcgagtgtgtgatgatggtgggactcagccgtgtaatcaagtgagtgatcgagtgggtgtgatggaggtactcgaccaaggggtcgagtggtgtgatcgagtgatggtcaggtggtggagatgaagatactcgaccatggggtcgagtggtggtgtgatgtgatgaggccatctactcgactagggggtcgagtgttgtcttgaagtcgtgaagccatctactcgaacagggcgtcgagtggtttgatatgatcatatccgcttctttcaattagctcgccaacagctccaaatcacttgaaaacaacacaaatatacaacatgcatgcaaaactatcctaaacatgcgaagtgatgacaaatgatgagaaatggtataaaacagtggtgatatgatgcaatagtgataacaaatggacgctcaaaacatgtaaaatgcacacttatcacctaccaccatccgaaattggttcaggccctcttcatccttggattctctggaaattatagatggctcgcaatcagcaaatctttgaaaatccccacgacaaccctcgtgaaatccttacacaagctatcatgttagcacatgaatggcaatctgctcaacttcagtccaaacaagtagtcacaaaacgttccttgggacccagcaaagcacctgatctcgacctcattacatgccaaatatgcaaggatggattgtatcttctcaaaccgatctacgagctttaatcgacagatctcttcaattgcgacgcacacccgatcaccgattatggccgaagcccttgctattcgcctcgctatcaaacatacctcagatcggggcttcaaaaaactctctgttgcttccgattcaaaactgttgatcgaatccatcaattcggagtctccattgattaagctccacgggattctccgcgatatcctgatcctttcatcttattttcggtttatttgctttaaatttatcccccgtgaacaaaacagagaagttgatgctttggctaagcttttaattaatgcaagcaatattttgttcaaaaaaaaaaatatcattatcaagagatccatataaataagttgtcactacatccataaggtacatatctaaattattggatgtcgaaagactcattaagtttcttcataatcaactcctggtctttgagagaaaccttgtgcaacaagtcgggttttatatcgtgtgatctcatctttctcaaagaaatttcgcacgaatacccggcccacttgtgcccaacattctttacattcttagatgcagtgacaataggtccaaagacatttcttttgttaagggagtgcaactcaacttgcatggcatatttccatttctcccaatctggtcttttctggcattcagataatgtctttagatctgaatcattattctcatgatcgatctctttagataaagaaaacgagaattttcattttcatcatcaatatcatctctttcccatattatatcatcatgggtataattaatggaaatctcatacttttctctaccgtcccaaggacttggtttttcttgaataactttttcattttcttttcccatttctttttttcttcggggatttttatcttgtgcgccaataggcctctcacgcttaaattgaaccttaaattcattatatttgttcccatctaattctagctctctaggaatttgaactcttgatggggcatttgcagcgggaatatatgattttgtcaccctttttgtatatgtgaacgtagtcctgtgacttcggttactttggttaattcggttcggttattttggttttcggttaatgttaattttaaaaatgtttaccgaatcaaactgatatacaaaacggttcggtttggttttcgattttaagtgtaaaaactgaaattaaccaaattattttctaatataaaaatcggcggtgagagcacctccgacaaaggatcgactatactggaggcagcaagatcttgaaggtgtcatagatccccgaccgaagaagaagaagaaaaagagatacaaagaaaaaagaaggagaagaagaagaatagatacaaagaaaaaagaaggagaagaagaaagaaagaagaagaagaagaatagatccaaagaagaaagcagagggaaaaaaaaaagagagacccagtcacggcggctacaaatgttgaatcgagggatggctaatttttagggttttgttttgattttgaataacagatcggttcatgcaaaccaaaccaaaataaccaataaccgattatcaattctaattgcagccgatcggttctgccctataaccgaacccaaaccgaacacctaaaatctcggttcggttcgattaatccggttcggctaataatctcagccctttgtgaacgcatctggtagttgatttgccaaagtttgtaagtgtacaattttcagaacttcgagctcatgttgatttgtaggggatcaagatataccaaagatggtgtacaccatgtaatatcttttggaacttgtttaattcctccccctatcgctggaaattcatcttcattgaaatgggaagtggcaaaacatgccgtaaacatatcaccaatttgcggttcaagatacccaattatactcggtggtacataaccgatatatatacccaatctccgttgcggtcccatttttgttctttgtggtggagctataggaacataaaccgcgcacccaacaacacgaagatgggctacgtttggctctttaccagacgttaattgtaaaggagaatatttattatacgcgcttggtcgaatctgaaccaatgtcgtaacataaaatataggatgaccccatacaaaaatcgggagttttgttctcaatattaacggtcttccaatgagttgtaaccgtttaattaaagattcagctatgccattttatgtatgaacatgagggacatgatgctcaacatcgatttcaattgacatacaataatcattaaaggcttgtgaagtgaattcaccagcgttatcaaacctaactttctttattgcataattagaaaattgtgttttcaacctgattatttggaaaatgaattttgcgaaagccgaatttcgtgttgtcaatagacacacatgtgacaatctactagatacgtcaatcattaccataaaataacgaaatgacccacacgaagggtgaataagtcaacatatgtcaccatgtattctctctaagaataatggtgattcattcccaatttttgctggcgatggccgaattatgagttttccttggcattataaaattggcttcgatgaaatcaacaatattatttgcatggccagataatgcatcacacttccagcagagtcttttattttgagagaggagaaatatttttgatctataagtattgtgtgggtcgtagcacttcctgccagacatatctccatcctcaatctcaaaatttgacattttctgagacaaaacatttagaaatatgcattaataaaataacacaatactgaaaaaatgttattatatattacaatgacaccgttattccaaaaacttttaaaaccaggaaatacatttaaatcaaaaagtacatatagtactactacaaccatatcatgtcatatcgatcttattcacatgatttcccgttttcatgatgaacgagaaaatcagcgatatcaagatgggttttatcatttaggccatggtagaaagtccagcttcattagagatgagattggtctcaacatccctttcttttgccttttgagatgtttgatatagtggctaaatgttttgggatacgacatgtctcgtacaaatggcctttcatgccacatctgtaacaagtactttcatctggtttctttgaaacacgaccgacatcattcacttgaaaatttatgttggttttcttggcattcaaattattgggagggagaccccttccttttcttcgtccacgaccacggcctcgaccacattcgcgtcctcgtctttgccaattattgtaacaggatgaagcaacattcacttctgaaagcggagctgatccagttggacgagttagatgattcctcatcatgagttcattattttgttcagcaacaagaacttgcatcaagttagaatatcgattatatcctctcactcgatattgttgctataggattacatttgtaggatgaaatgttttgaaatttttctcgatcatatcataatcggaaacattttctccacatagaattatcctggaagtgaatccgaacaaagcgaaattatattcacttacacttttttaatcctgaaaccgaagatttagtcattcatgtttgacttttggtaagataacatatttttgatgatcaaacctatctttgagagagacctagagatctgttagattttctctcgtgatttattcatcttttaaaccatcgtgaaggtagtgatgcaaaaacatcatggcttttgcctttttctcttctaaagtaattttcgacagatcgagggttttgagaagcccatttgcttttagatacatttttgcatataatgtccatgtcatataatttttccagaaacatcaaagacagttatatcaagctttgccaagttcgacatgataactatataaataatatgatacaatttgtcaaattaaaattttattataaaaaaagttttccaaaagcttgttttcataataaagcaacataaaaataatttatatattataagctataatataataaattaaaaaaaaatcattgtaggaggtatactctttcatatgattgtagaagaggcgtagcttttcataggatcaaggaggcggagactaccatttgatccaaaatatagatctgaacatatgatcgcggaggtagagcttaccgttatgatcaaggatgtaaattttattatacgaccaagaggcaaaacctactattataatcgagaagaggatatagtcttttactccatatatatatatatatatatatataatttttaatgatttaaattattcaatataatttaaatgttacctcaaaagcagatctagagtcgtgcgtgctagcggatcgagagtcactcgtgcagataacgtgttgaatattatatattcttttttttaacggcaaatcaattatattatatcataaaagttgacatgatacataaccaaccaaatacaaccattgcaacaaataaaggaaattgaacacaatttcgatgaagaagtggaaatgaccctgctttccgaacggaagccttacaggcaacataataaatcttttaagtcccctcttcatacactcgcaagagactaaggctaacatcttatagatgaaactcctaaatgctttctgcattactgtaaaaaatctgatatgttgttagatatggttttgaaacatgacttctgaaatgtcgttcgcatctttgctgtttagtgaccatggtttctcttctcatagaacctaaactttccgaccaagcgaaagagataacatcatcatcaatggatcgtgtcatcgaaaagaggaagccttcgccttcgagataaaaataggttgtcccaactctaaacagattaagactgaagataagtaataatctaatcttagatcgaaagccatacccaattcgaaacatgtgaatgccttcaagcgacaaggttactccattgattccgggatcgaaaacccaaatgataactccacattgcagagaaaattcatcggttgataactggagataatgccggtgtgagagaccaccgtatacaaaccttatacaaggacaatcaaaattcaaaagaatcgatataacacacgatcagaaacatcgacaaatggatgcatttatccgtgaaatcaagttgaattgataggctttccagattgaagaatgaatcacaatcgatagtaatgatgtaccaccgtcacgatgtggcaaagaacataaatttgagattttcggtttgccgttatttaccacaagaaactgaaaactttgcagaaattagagaaaagcaataacaaacacgagaatagccgacgctagagagaccgacgccggccaaagtgatgaagttttgtgaagttgccttcaatggcagatcgcttgggagagagaacggttgtcgagtcgtttgcgtaacaaagtgatattgaagggaagttaaaatgagtaatttggctaacaaaatcggaacttttattagattttggaccttaatttttaaataatatattcaaatttgttgtgtgttttcaactttttatattatatattctaatataatataatattatagaagtaataaaataataaagaaaaaaagtgacgagagagtaataaaatagacttcttattgtgttgtgatacttacaatgaactgaagagaaccaacgtatatatacaagagttgcttgaagagaaagttaaatttagataataggataagttttagttaattggaaaataagatacttaggaagtaagtgacaaaaataataatagtagtatttatctaatctcaacagtatctaaataatttgtgttaatcgtaaagttttatcacacaatttacgagaatatcacaaaaccataatcatacatttcacgcccggattcatcaatgagaccaaacataggtttcaaaaatcagtatttacacacaatcaataaatatgatctggatacatatatataactcaaaaaggatcaaacattgatttacatacacacgttttatatttgtatatatagaagatctacaaaaagaatctgttatatcgccattgttgaaataaaaacatcttagtaccaatctcttcgtgtgtgttgtgtgacactgattctgtcttcatgttatgttcactgccaaaaaccaaaaacatgaagaatgttatcggttacaagaggaaagtgatgaaaaatgaaaatatggattcagagtagaaacatataaaattactgattgtctttttgagcagccatagaagaagagcaagttcgatgctgaagatcatacgcaaccatgttttatccaccaagaatccgtaaacagtgatccctgctctgttgttctctagataggtcactaaatatatacacaatagagaaaccaaatcagttaaaaaggtgaaaatgatttattccaatcatagtctaattcaagattttatttacctagagcttgacgtttctgagaagaaatggcgcgggcaaagattggatgtatctcaagatcattgtcatctccttctccttcttcatcatcatcagacgattgaacaacattacgacgacgcgataaaatctgggaatgttgtgtagttgttggacatttaggagtctctccgtcataaagaacatcaaatgtatctaaagacgcgcacacgttccactttgtggcgatgctcgttactgattgagctttgtgagtcatttgtgttgcacttttcaagcatatgaatagtcctgacaccaagcttgtggagcataactgtaagaaacagagacattgatcaatataatgtttcaaaaacttgcatccctatatgaaagtgaagaggaaatcttaccgcgagctcgccaacttcgtagatattaaagggaacactagctctgatggtagtcagcaatgccatgaactgagtggcagtgacgaaaaacaatgacaaaagaatgaatcgtctgaaccggtgactgacaatcttcagttcacgacggattttgagatgctcggcgagtatggaactgaaatctttgatctcagaggcgaagcagcgtgcgaattcatcaagacggaggacctggaggtggcagatgttttggtagaggatacaagcaatgatgaagagtgatgtacggtagagccaagaagagagctggagtgtgcaggctaagacatggctcagcgttgggtttataatgtaagggatttggttaaagcctgaagcataccaccaaatgcgatagatagcttgaagcgttgtcgatggaaggacaaagatagctagtagcttcattgatctctgcaacaataaaacagaggagactttcaaaaacatcaggattcgagcctaagatgcaatggcacggtcaagacttaaagttctaggcctgcgagttcggtcaatgtctcggttatctcggtatttcggttaatgaaattctccgaatcgaaccgattttccccggttaaaatcgggtaaaatcggttaaattggttgggattaaaaaaacatcaagatttgagcctaagattcaatggcaggtcaaaacttaaagttctaggcctgcgagttcagttaaccaaaccaaactgagtcggttatctcagtatttcggttaatgaaattctccgaattgaaccgattttttgggttttcccagttaaaatctgataaagtagggtaaaatatgttaatttggttgggattaatatatgttttgggtagaaatcggtttattttcggtatagttttgatttttaggcaattgatcggtttaggcgtaccgaaaccgagacgtaaaccaaatatgattcaatctctccaaattgaaccgactgatgaaccgattttgaaagaaaactgaaataaccggttctttacaatcgcttcttattccactagttaccaattttaatcccaaaaattacgattcttaatcatgaaattagattactaatactataattagtcgatacgtttaatttacctggattttagcttcgtatccgatcctaactttatcgctaacatctttaagcttatcgaagaagagaaaccttcggattccatatttcttggaccaatctgagagactaacgaacgagattccggcgaagatcgataacgaaagctgcactaaaccgtcgtaaggacgacggtgtttgaaatcgcaatcggcgcagattagcacgaagtgtgagatcattgggacgatgacggcgaggaggaagaagatggaccatgagagcagagttttgatgcgatttgattgatcaaaccagaggaagagtctcgggaatgagagtttggtggctggtgattccggtggtttttgaatcgggtcgggtcgggtctcggagttgaggatttgttggtttgatgattcttccatggtcgggtttaggaataaaatctgcagaggtttggactttttgacttgaaatgaaagagaagctaataagttacggcactttggatttttgtaagccacctgtaccaaacagcatttataataataataaaatatattcttttccattaacgttcgcaatttccgtttaatatgtttttttttttttaacaccgaatcaattatattatattataaaaatattatataatacatgatacatgaaaccactcaaatacgaataaaataaaagaaattgtacaattttgataaaaaaatggaaatgaccctgctttccaaacggaagccttacaagcaacagatgaaatctgttaagtcccctcgtcatatactcgtaaaaggctaacatcttatagatgaaactcccaaatgctttctgcatcactttgattaaacgaacacacggatatgttgcttgaaatggatctcgatcatgtattttataacactctacccatcgtcgccggttagtgaccatgattacttttttccatagaatccgaataaatagatcgtttgacagcgagtacatcaccatcattagaccatgaacatgaataaacggatcgttggacagcgagtacatcgccatcatcggaccatgtgtttgagaagaggaaattattgtcgatgccaattccttcactcaaaagaatttgtctattgattcctggatcaaatacccaaatgacttctccaaaccatagatttgaagaaacttcatcggttgaaaaccggagatcacgtcggtgagagaaaccaccgaaaacaaactttagataaggaaatacaccatgattcaaatgaatcgacatgacatgggtaaagagacattggtgggatgaattttttctgatttcgaatatagcaacgggtttacatgaaactggtaattgtatgtctctgttctaaacatgacaataaacaccgtcaccattcgaaaggagaagataggacgagcagaaatccaattaaggggaatatctcccatcacaatattaaaaacaaaagaagaaaggagtagaaaagcaaaaaaactaccggcaaatgccggcagcctgttaaaaaaaatgaaacaggaaactggttttgttggtcgcctctgtagtcgccaagggagagagggaagttgttgattccgtttaatatgttaatttatctaaaattagtcaaagtgaaactgaatttaaagtctaaactatggtgacgatggaatggaacaaacactatggtcaagagatttggagtgatatagtttctttgttttttatcagaaaattatttagaatcttttttttacccaattcatatccgatttcagtttcaattttgtgaattgttgttcggtctatttggactaaacatataattatgttaatattgtaggtgtaatatatataaaaaaaaattcgtcagctatctgaagtgtagcagaccacatcatagtttttaaaacattaaaactaaattaacagttacaagacatatcatagtttttaatatattaaaaataaattaaaagtttatttttgaatatttttgttggtcaacgccacaatcagttgatcggttaaccttaaattctttgtttatgatgttaattacataacgtcatacatttcgtatatgtagtcatgcaatttatatacgccagatagctgattttctttattttatttggtatgtgttaccatgtatttattatatctcttatcttatgtagcagatgattgatttttctaatataaatgaaaagttaaatatttttgggattatggtttctattaaacacaagtgatcttttttttttaaacgcattacatgactaaactgtttttttttttaccttccaactaaatgtgtagatcggatttaaacgcatatgggatatcaattttatatctacgaattgtcaaccatcagactaataatgtatatgctattatagaaaatttggtcccccatgtgtcctccactattataagagaaatagtttagacgacaaaaaaatgccacatttcgtggtttatacaatgattgatttgttatctaaaaaaccttacatttatgtgttgacatttcaatttcatgacagacaaaacacgtctctactttttaagtaaactcacgacacatggaactgttttaccggaaatttcatgcttaaaatatatatgtgtggcattgtgtatagcttgagccaattcggttggggatagaaaatggagataaaaaaaaggttatcgactgatttcgatcggtgataaattagtaaaactaatatgtagatatttcgaaaaagtagttttttaatagaaatatatgaattcatatagtagaaacgggccgtttcaaaattatatttgactttgtgttcaaattttttaacaaacaaattttatatagaaattaaaaaatatggactccttttgagaaaatttgagaaaaggaaaaaattggtgtttttgcatcttgaatacatgccttaaactgggcctgatagaaactacaaacataagtaataaaaaaacatttttacaaaaaaagaaaaaagactaataagatcaaactaatttagcgtaataaaaacttataaaatgatacaattatataaacttatttaaattgcatgataattatggacaatgttatgtttggtgagattagaaaatcgtgggattgtaatattcaaaaaatcgagaatagccacgatagatcaataggattgaggtaaaaatgttatttgaatgagtgttctagattttctaattcttctttcttcttttctttcagtaacttttttctctttttgcttttaaacttcttgaaaaaaaatcattcttcaatcattaacatattttattatataaagtatggttttcaaagttgctaactcatacgatcgtgccacgtgtcaagtcaaacgatcagatgtttacatgtgtcatttaaaatttaacttttttattttctaaaaagaatagaaaatcttaaaaaataaacaaatttacatatactaatttatatgtttatatatttataaacaattaacatttattcaataaaaggaaaattaacaaatttgtctttaactcatgtaatcataagtgaaaatagaacattttgagaaaaatagcttagattataggatttaacttttcaatgattttcatttattaattttaactcatttaatatttgcatgatgttaaaattaacttacaagattacggcatatatagaaatatattttcaacaatgcttggtttctaaatatttttgtggatttctgtttttctattaattattagtcctaggcgtttgggtattcgggtcgggtatttcgggtttgggttttcgagtttagaagtttaggacccattcgggtaatttaagatttcgggtcgggttcggtttgggttcgggttcgggttcgagtttatttatatattgaaatatcaaattgtgtgtgcaaatctattaaattacttaaaaatttcaaaaactcccaaaacaacacgagtagttttgctcgaatatatctaaaaatacacaaaaataactaaaatatcaaaaaaatcttaatattttctatgtataagtatatattagttatacttatacttatatttgagatatgtttggatacctattcgggttcgagttcaagtttttcgggttttcaagtttagacccgttcgaatatttgaaaatttcggatacacccgcctaaataggcgggccttatctagttcaattatatgataacggagagaagtcaccttaacttgatctctttattgtgttttcaacgttttgttttatggccaccatattcaattatataataattatttactttttagtttcattcttctccatatacctttatttatgctaatttatttaaatataataagggattttaatctctttggcctttcttcctccaaactttctttaaaaaacctccacttattctcactttcgtctatctttttccatattatcaaaaaccaattttaccctgttattatttatttttttaattatataataaattttaaccatcaacaaactcttaaaatcatccaatgagaattgttcactctcctctctcattaaccaccaaaagttttttttttttttggtgtcaaacaaccacaaaacacaattaactatttttcttcttcttcttacactttgcaacctctaaaacatatgtactctcttctttttattctccttttttttttttgaacctaaacttgatttcattccattaaggtagaatccaagtacaaacaaagaacaaaactgagttcccaaagttttacaacaaggaggagctttctccaaagccaacataaaatagatgaaaagatagataaggttaatcgataaaaacttcttgagagctatgagccaaaagctatgaagcttgttggtacatgtgagatcaaagattatcgacaagtcttccaatagaacaagtcaaaggaggaccaattagccaatgtcaaaagacgaagtggcgttggtaaaagaaccaaagtcgaggttcctgcagccagtacaaaaagatggttgatgttttttgctagcattgtcgtggagtgaaagttgagcttagacaaaacaaagcaagcggtaaaggtgtggaatgtgtaatacttgaaattgtcaaaagagcatgaagcatagtggtcattatattggacaagttcaagaaccttggaaaatcttcaacaaataggatttgccagtaatagatgcaagaccgtaacagaacaggtgggtcctctctcacatgaaatccttagcggtcatggagattaaggaattccacacaaaacttgtagccggtttgccacataaagataagttcatacctgagtatcacgcttataagtggatgaaaatctaccttgaagtagctaatttgcacaagaatgggtttgagaatcagagggaacatataaaggtggttgaagaaacaaaggtggtcaccgctccttagaggcggaaacataatgccattcttcttcaagcaaatagaaccatgagaaacaaacctagcagattctaaagtcgaggttctcaagtagctttgagttgggaacatagaacctttcttcgtgaaaattagaattctcatgatcaataatcctaggtgaatctaaaagcaaagatttcttgtataaccatagcaacaaagaagtgttccgttgtatttgacgtccatgatcaaaagaatatgataaataacatttaaattgggtaaggttggacaagagggagatgacagacctgagccttagtacaaagcaacttggatcaccattatataggttgggcttcagaaagcttaacgggccatatttgaattggcccaaaaattggaaacccagttccttttggctagtaaagaaaagtttgggtattggcgaccgttgtacggaggtagaggagaatttatggtgaaacaagcaaactcggtgggggtagtgattgtctttgatggagtagtccgagaattgaagcataggaggaggaccagaggctaatcgacatcttagatctagaatctggtggtcttaacaaaggtgatttcagcaaagctgatgcaaggtgagggtgaaggatggagattgtcggacaccatctttttcttttctgaatgattgttgaagttctcattaaaagctttgggtttggtaaggtttgagaaggtttaaaaaggggaaacaaaagaattgacaaaattggagaactagagaaattataaagatgaagagaagagtgaataaaggaaagctcccgacgctggtgaatcggagctccaccgacatcgcagatcgtcgtcaaaatgatggtcttgatactagtgcctaggagcttctcggtttctcaatggtaatgatctcttctctttattctccatccaccattaaatcacttcaaggtaatttagtatttttcttattctctagattagcaatgtgaaaaactttattagatataacattagtttttatgcttattaaactaagtagacttttttaattagtgtattaagatataacattggtaataatgattgagaaatgtttaattcgtagctgaaatgttaaattttgtagaaatatttagtgattaaagaatttggacaattgaaatcactgggtacaactgtgttaatggatttctacgaaaatgtataattaaagaccgttttcttttctctttcatttttaggtgataatcaaaagaaatccagtcagactatttgcttatagtgaatactataaattttcatgacgtatctatacaaattaagttttttttttatcatggtacaattaagtacaacccgtaaaactaaagtttattgccttgactagttttcaaaattatataaaatatgaaatgccaaattgaaaaaattgttaaaatacatacatggtggtaatgaaactaaacaacaaaattttgacaaaaaaacatatatttataagttaataaaattcttatcacaaaagcccacattcatacactaacaatcttatactttcatggttactttgtatatttgaactaaatttttttatgttttttaaatacttgtattttgatatatataaatactccaatatattgtattggtattttgatgagtcaataccatcggttctacccaaaaaaataatttagagttgataacaactagatttactaaattctcgatattgtacaaccatgaacaaaaataggcaatcaggtacaactatacaactacgagcaaatttatattattatctacttaacattttttacgtacatatttgctcaagctaatcaggtcgttttttcttttaaattttcacccgaaaatctttgattcggatcctcctttatttgagtcttgagatgttccttcaaaaatccaaacgaaattaaatgattattgattttaattttgttcggctacactagatattcaagaatatattttcactggatcttccaaaacaattatgacgatttaatgcgctacaaaacagttaaacaaagttggttaagatttttcttaattatggtaacaattacgaaattaatgctaacattaaattatgaattcaaattcaaaataaagaaaaataaatatctaaaagttaattagtaaaattgcataattaactactaaatcctcagcattaattcatgattgtcatattttaatactttttctgttctttttaagtgatattttagactaatgcacacttattgaaaaagcatgtataattgactattctatccttttcacaattaagtaaaagtaaaacatgtcggcatattactaatattcaagagttgttgatctcatgtagtggtattcctaatcattaataaggctacaatttcacatgcaggtataaatagtcaatttacttttcttagtcaaatttctttgtttttgattaacacacggatagagtaactttgttaaaaaatttaactttggaaccaaattaaccaaacataatattataccaaaattgtaaaattgtattgaagccaaactgaaaactcatgatgctaatatatatcgacacaacacaaacaaaagaatcaaaaaaaaaaaagatcacaattttcattaatgaattctaattttgatttaaatcttcttgtcatagacgaagagagatagttttggtttgatctaattcaaactccaacaaacaaagaaatactcaataatgaagatgatgatgtcgaagtcgttaacaatcatttggagtgcaacgaatttgttactgaaacagatccatgtctgttttttatttttccattctttcttaatagaataatcaacaaatactgtttttttcttttaatttactcggccatagcttaggaatatttgtaaattagttaatgttttaagacttttgccgttcgtatattgaagatggttgatttcacttgattttgattatttatgttaatatgcagagataaatggtcaattaaagattccacacgtgaaaaaaaatatcttgaacaagaaaagatggaaaatatattatgctttactagagagaagtcgtgatgggaagttagagaaaaaaactacacgcgaagtttctgaattatttttggtatctattcaaacggtgcaacatatttggaaacaagcaaaagaaacttctaatggtggagaagtcaatgtatcccaaaaaaaatcggatgttgtggtcgcaagagaatctcacatgatttggatcaaattaaagatcccacaagagaacgacactatgatcgctatcaatgtgtttaggtattggtctttcgtccttacataagcgtcttaaggaaggtacacttcgacgccatactaatgctattacaccaagtctaaatgatgagaatatgaaaggaaggctaaagttttgcgtgtccatgttggaaaataattctctaactcatgaatcaaaatttcttgatatgtacaatattgatgaaaaatagttttataagatgaagaaaaatacagaaatattatttacttctggatgaagaagcgcaacatcgtatatgtcaaaataagaattatattggcaaggtgatgtttttaatggctcagccgaaattttatgatgaaggaaatgagatattctctggagaaattggagtgtttctatttgttactgtagaacctgctaagagacgaaacaaacatagagatgctagaactttagagatgaaagcattaacttccttgaaaagagaagatataaaatcatgtttgataggaaaagtcattccaagaatccatgaaagatggccaatagaagatcgggaaaagcctattttcatccaacaagacaatgcaaggacccatgttcatttgtatgtctggaatttatagtttaaaagtatcccccactatagctcttaaaacaagacaactttaagttattgaggaaaacaaaaaaccaaatttaatttaaaagaattctgtaagaaaaagtccacggtcttcgtttggatgattttgaattgatatcattaactgtaaacttttgatgtgtaacataatcccttatatattaatagagaaacccctttgaaaacaaaacttaccttgatgtgttattaatactgacatgtcgttttcataatgatttttcacccatttaaataattatccaaattttactaagaatttttttctggaagattatttacagagtttgccattaggcttatacatacatatatcacacaagtttaaaacaaaattctaattaagaaaagtaataattaagcaacctaatacaatctaagaaaaataattaagtcactaatcttttctccataaaaaacataaaaatggttatgattagttgataaaacataaattatatgaattgatttttttcaaacatagaaatacatattgccataatcggtaacatttttatcaatactttctccatcacatgaagctttatttcatgtttaaatatttctggtaaaacatattcttataacaaacattttttttattacatgttatgttttacacaaatgaatcttggatcctaaataataattttaaccataattatttgaatcgctttacccttcactttgtgcggattgttatctagtatacttttatttgcagatcaaatgcttgagggacaacctctatcccatcgttctattttttaagtgcaattcttatctctggtatgatttcaatctctttcttctatttagttttcaattttgctcttattgtaatttgaatttatataccatctcttttcttaatatttagtatcagtctatgagattcatagccaatgtggctatctcactaaccaaaaacttccaagtaacgtatgcacgactgagaattgtatggacggaaagaaagtgattattgttaaagtatttgaatgtattatataatattttcaaatactttaacaatattctccttgaattccttaatagcgtgatcacggtcaacatcttggatcttcgaacacaatgcatgcatgtacatacatacgtatatacagtcatacattacattacatgcataaattacatggatacattaatatttagatgcatacaataaacatagacattcatgcaaaggcatccgcattcatgtatatatgctacttctttgattcttgactttgtttgttgtttctttcttacatgtttaacatgtttacttgtttcttctttgcttctattactaaattcattgtttgtttgtttgctcatttgattcctctgctttgtgcattgttggtttctttgcttctttggttcctctgttaagtgcttttcttgcttttgtgcttctttaattcttctgttaagtgcattgtttgtttttatttgcttccttgattcctctgcttaattcattaatcgcttcgttgattcttctccactacttgcttttttctttgttttcatgtatagtttgtctatttgctacatgattttgtagtgtgacataacacgttaacaagcacatagctctctagtaatttattgcgacataacattaccattttcagttcaaatatattaacttacttcgcacactgactaactaactaactaactagcttttttctttttaaatatagcaacaactaaaattttcaataaattttaaattttaggcagacttactcaaatgacttttttacggtgtgtaattactggactaacatccactgttttgcgattttttaatgtcaaaataccctttataaagtttggtaggaataaagtatttaccaacatgcgattaaatataatgtgccagctaggacagttttggcaggaaaagttcccaccattattttaatgttacagtagatataattttttgatagatatatcaaatatagttgtgtacattggtagacttattgaatagacatatttgtagttatggtagagatacactaatctggtatagctagactttacgatagagttattgggtatagttattttatgtgatggtagagttagtgtcgtgacagatttaatggatagagataatgtatttgatatcgttaaactgtatgtggtgatagagattttttacagagttagtttgttgacaaagttattagtaatgacagtagatttaagcgagcgagtatgacaaacatatttgttcgagttatctatagttacgatagagatatacggactgacagactttaatgtacttaaatctatgagataatggtgattgacatatgtacttgacagtagagttaaagtcaaatttcatgtgacgacatacatattgttgttatgtgatggtagagttatattttatttaattactagaatagcactcaaaatttttgagttatgaatggcgtggtgatagatttacgagtttaatgattttttagacatgtcatttttctagattaagcatatgttctaagaatggaagatactattatacccttatccgaataagaggatcttctgtggatcgggcaagtagaggtcgtaaactgtagaaaacaattgaattatctgttctgtttggcgatggaagagatagtattagtgtgtgggaagtagaatttcaacaacaggcggtgggtatttagtgttgatgaacgaggcggatgtagggttctaagttcgaatcgaattaaagggtatggagatcttgttgcaatggtatatcaggatttcagtttggatagtagggattgtaaggttagtctaagttataaaatttgtagaacgatgcttattctcgacgatacacctcccgtaatagtatgtaacggaagacaattcgaaggttttctccgtcattgtaaaatgggaagcatatgactatgtgttacggtacaagctataggttgtgtggttggcgaaccagaagttgaaattgtcgaagagggttgctggataactgaggatgttcttgggtttagtcggcggaaaatccacaaaaacttggatgagttgaggataaagaaagcggaaccaattatagatgaggagtactgataagtgtgcattttacatgttttgagcatccatttgttatcattattgcatcatatcaccactgttttataccatttctaatcatttgtcatcactttgcatgtttaggataattttgcatgcatgttgcatatttgtgttgatttcaggtgatttggagctgttgacgggctaattagaagaagcggacctgatcatgtcaaaccactcgacccccaggtcgagcagatgctccacgacatcaaaggaccactcgaccccctggtcgagtagaagacttcaccactcgaccacctggccgagtaccaccatgagagtcactcgatcacttcactcgaccaccaggtcgagtatcatcacctccaccacctgaccatcactcgatcacaccactctaccaagaagtcgagtatcaccatcaccatcactcgactacatactcgattgccagcttcagagtcttttccattccgcactcaaccagacactcgagcacaaggaagaaaagaagactccagctaatcactcgaccactcactcgattacctgggtcgagtactgttcttaatccgtcccaatactgcgtcgttttgagtattagggtttcggaaatatttcgctataagtagcatgtactttacatttttattgatctaagttttatttcccagacactgtgtaatccggatttctcttaatctattcagtattcagcatttgttttagattttgtttactgttgttcatcctgttatcaccttgctattactatgttgttatcatgttttcattctattcaacgtttatgttctctacaatgatgtctaagtagtgaataggtttctgagggtgggttagagtagtttagaattctcagtatgctaggtggttgagtttgattgatagatcccttctggattagttgttcttaatgcatattgctttctgatcaactggactttgagcacagatatttccgcgctcaaaaggtgttccatgaaatgtctgaaccactaattctagagattcgtggccctgtaccaaggtattggttgcagggagcgttttggctttaacttgttgattcgtaatgcctgttaggttagctctcttcaatggtgattgagtgtgagactagtttaacttgaggatctctgttgcggtggcacttagatttggttaccgaaattgttgtctagggataatttattgagcttgtcaatcacctataaactgaggaaacgaaactactcaattaccccatcctcgggagtttctcatccaattgatttatttgtttactttgctgttgtttactgcatcttgttatctgttgcttagtttttgcgtttctctcctgttactcgacctgatactcgaccactcagttgtctggcaacagacggtgcagtcgagtatccctgttatattttttgtctgttactcgacctgtcactcgaccacacccagtgctctgttggtcgagtgcttttactattctacttgaatttctggtttctacatgttcacttaagactgctagaacacaccaaaacctgttattgcttggcttgacttagtgacttttgatcacatcttgattgttagcatcacacccatttggattgacaaccttcagtactacaacgacatgatagtgctttaggataattgatcttaaaaacctattatcaatttggcgctgttgccaattgggtgttttattgttacatttaagatttctgacttgcttagatcaagttctttttcaattttcatttcagttactgactgtgtatttttcttgttgtctcatttatccaagtacacctcttctgtatgccaactcgatcaacaggcaaccagaacctcctttccaacaacaacttctaccgcatagctcgcgaactcagagaaaggagaaacacaatcacctttttgccccaacaatcgaaatggctgacgaacagaatcaacagaatggtcctgccaacattggtgctggagatgcaccacgagaccatcgtcagaggaaacgaattgcacctcctgctatccagaacaacaacttcgagattaaaagtggtctcatctcgatgattcaggggaacaaattccatggtctgccaatggaggatccactcgaccactttgatgaattcgataggctttgcaacctaacaaaaatcaatggtgtcagtgaagacggattcaagctccgtttgtttccattctccttgggcgacaaagcacacatctgggagaaaaatctgtcccatgactcaatcaccacgtgggatattgcaagaaggcttttctagcaaagttcgtttccaacgctagaactgcaagactcagaaatgagatctctggcttttcacagaagactagtgaaagcttctatgaagcatgagagcgtttcaaaggttacaccaaccaatgccttcatcatggcttcaagaaagcctctctgctcagcactctatacagaggcgttttaccacgcatcagaatgcttctggataccgccaacaatgggaatttctagaacaaagatgttgaagaaggctgggaattggttgagaaccttgctcaatcagatggtaattacaacgaggactgcgataggaccgtcagaagcacagctgactctgatgacaaacacaggaaggagatcaaagcgctgaacgacaagctggacatgattctttttagccagcagaagcatctgcacttccttgttgatgacgagtagtatcaagtccaagatgaagagggtaaccagttagaagaagttagtgtggatgtcggaatccgcaattaggaatttgtggattattatgagggccttaaactttgttagttgagctaagatcaaatcggacaatatttcagttaatcggaatgttttgtatagtcattttctcgtcccttttacaaatgatgaatcactcctatttatacaaattaatcgaatatctacgaagtaaatgaacgcatgaatcacgccgcgaatcatgtctcattaatgtttacgtttcacatatccacctcgcgcattaacgcattctcatttactccgcagatttccgttacgtgacgcttaaaaatgattcttcaaattgacctgactctggtgggcttatttcggcccactccacatttgacaatgctggactcatcattgaggctttgactcaggcccatttaaagaatgatgacggatcgagtaaagatacgagatccgacatccacaacttgcaccccaagtcttcgaagtgaattaattcggagacttattttgcgtttaattcacaatcccggtaattgcggtatcacgtcggaacttccttccttatccgcataattccgtagccaaaaaggaaaataaaatctcacaattctcgagacttttcttgggaaaagtgtgacggttcgtagtcttagggttttcgttttcccgctcatcagcttccctatctaaacgagttaactttcgcttataaactgctgcgatctactctcgtcatcccaaggtaatttctctcgatcctccatctattctaattccgttatttagctgctaggaatttcaccagaattgcttagatctacaaacgattagggtttgaacgggtgattgctcggttggaaatccttatcgatttcgtagattttcagcgccgatttgaggatttcgccgtttcaccgctgttcttttccttctccacccttggattcaccgtcaaccactaaatttcgctgtcggaaacaagcgcaggttcccagatcccgacgaaaagcgcctctgtgttcttcaggtgttcgagacagttcttcatcgtgttcttgagtcttcgaggaacagttcccttcagatctttctttttccaataagactaagtctcggtgtttatcatgccgccgaagagaatccaacgcgaggtttactcaatagatggtcagttcgggacgtatacctcgtctcaatcaacctcgaggagactctccttactaaaaggagctcacgggattccaggtcggataaacctgatttcccccgaggcgactgactcgccagagactccctcgcctggtcatgcttgtgctttcgagatcttcttttcggagtgcgggctatacttcccgcttcctgacattttgatagatttcatgcatgagttcgggatcgcactaccgcagctgtgcccgaacgtaatccgcaccatcctaagtcttcttacactagccgaagaagacaacttccttctctctctgcccgaccttctacagctttacgcaattaagaaaggtcgaacacagggtaccttcttcttatcacctcgcaaaggattcagagtttttgaagattttcccgaaaaggatgagcaatggaggaaatcattcttcttcttccgcgttaacgagctcacattcggcgagaaaacgggcctctttgtttcggaatggtctgcccgagctggtagatagtaacttaggaagacatgccatatctatcatgcttttgttttgtcttttctgatgcgcacgaaatgaccaactttgtttttgtttgcagcttcggtggacctacttcctatctccaagacattcgcttcgcacttctccagcttcgttcgtcaagacttgggttgggaatctttatcgagcgaccgggtccgagcatcaggaaaaagacttcgctctcggaccgaccttgctatttcctctcctcctttcgaacccagaatcttctccgaagaagaaatgtcagccccctcataccgtgccgagaaaaagatggaaagggagagggcaaaacaggagaaagaccgcctcaagtccgataaggtcgtcatgacgggaacccttgaagacagcaaacttcaagctgccaacaaggccaagcagccccgagctgaagaagatggcggagccagacagaagccttccactttggcaagcaaaaacgatgcgcctgccccggattcgagaactccttccaaggccacctccagcagagacccctcgaagcgatatggggataagaagaggaagcaatccgataaggacgctcgatctccagcccgctctgtccgggttcgaacagaggagagggatgctagcccgagccagcaaaaagagaaaggcaaaaagggggactctcaagatctcgtggtgctgtcatcctgagaatctgaagctcgcacctcgcagcctcatggaacaccgcctttgccaggttagaaatctattcctctgaatgccccctttctccgagatactgacaacttactcagttctggccatgtttcagctcctccactgccttttgccgacctggtcaggtcgttcacccatgcgggcgcacctatccctccattgaaggagctgaagccgaccaaccaggagaactacctccgtttcgcggagaaactgggcgaggtaaacattcttctgaagaataaaacttaagacttagtttaaattttaacccttctcttgtttctttatcaaaccgtgctggagttcaactacgcctgcctgagtcatgaacaccagctctcggacaaagacagggagatcgagagcttcaaacagaacgaggaggagaactcccgcatggttgatcgggctaacagtgttcttagccggatgagagaagctgaagctcgggttttagccctcgacatcgccaatactgacttggctgccaagctggaatcgggcaagaatgcttacttggcggctattgacaacgagaatcgagcccgagctgagctccttgcctgcgaggagaaactgaggaagctggaagaaggtcaagctgcgctgcttgcagatgcgaggagggaagagcggagaaaggttcgggctcagtttaaggacttcacgtctaagtatcagagcttctacgcggaatcagaggaagtttaggcgtcgaaaatccgagctgctgaaatgaaggcgaactgggaactctttgaggagattcagaagggggagatcaccgacacggctgaggagcttgagtcggtcgtgctgacgagattgagttcgcgcaaaaggttgccaaacctaagacctcgcgcccggatcctgttgagatcacatcgctcctcgctgatactccgccagaagtagctgcagattccactgcttctggtggagtgttggtcattgatgagcaaggaaccaacaggaactccgcctccgagccaggtatcaccgccatgttcccggtcgatatcgagaagaactccgaagctgcggagtaaaaaatgttatgtttacgtcggggttgtgttggtccgaagtgaccccccgttttgtttcacaacttttatttacttatttctgttttcggcctaggaggccttaactctattttttgtttgacatttatttaaggtcgtagagaccgttttatgtttacttggtttgttttacttattttccgaaatacgagataggctcggtttaaatgtttccggaaattgactaagtataaactgagaataatttccttttacgagtttagactcggttgataattttgaggaaactatttaggtccgcgaagactaaattgtttttagctcgggaaacatcgaagcgaaggtaagattattgaaatctacatgatgctgttcgtgaaaatatgacgaaagacttcgtatacgagatagaactcggttttatggatttaaatattatagtctgaacccggagtgcgggctgcctacgtacctaaagatagggatcaagtcttacgtagttcaaattacaagtgcattaaatctaaaaacgtttgagatgagcggcattccatgctctgcgaactattttgccttccatgttaatgagacgatagaccccgttccggactatgtgagtgattttgtaaggaccttcccaactgatccccaattttccagctcctttttcagccgtgttttgctggattcggcgaaggaccagagttccgacctcgaatgatctgtttcggacatttgagttatagtatcgagctgcggcgttatgatagttttgcatccgaactaacgcttggttgcgtcgttcgtcgataatatcaatcatatcaaccatcatttggttgttcgcagcctcgttctggggattttgtactcttctcgtactcgggactttgatctcggctgggataactgcttccattccatgaaagagagcgaagggggtctcaccggtagctctcctaggagttgtacggattgcccataacacgttttgtaactctccgaaccaagctcccttatactcatttagtttttttttgaggttcgagatgatcgttttattcatcgcctcggcctgaccattcccttgcgggttgcgaggtgttgaccgactgaggcggatttgccaccttgcacaaaaaacttcaaactgttaggagattaactgaggcccattgtcggttactatttcatacggcatgtcgtgcctacagatgatttccttccaaatgaactgggggacttgtacctgagttatgtttgagtaggctgcagctttaacccacttcgagaaatagtcggttagaacaagtaggaatctgactccccgagttgaaacgtgaagtggtccaatgttgtccatagaccatttcatgaatggataaggtgacgataccgaagtgagaagttcggcgggttgaaggatatacggtgcgtgcttctgacactacacacagcggcgtgcatacgctttgcaatccgctaccattgtgggccagaaataaccgtacttttttactttaaaggccaaagagcgacctccagagtggtttccacaagttccatcgtggatttcttttatgacagtccgagtttgttccccgaaaatacaaatagcatccggagccgagatgattcttctgtataaaatgccatctgctacgcagaaacgagcacaagtggtcttcagctttcgagcgtcccacttgtcggtagggagtaccccgttgaggatgtagtctcggattggttctctccagtctgccccccagtcgtgaggtgtctgattatcagggacttcgggactatttggaccagacaattcttcggtaattggaggcgggacaacctttggaacgtcgttttcgtcatcgagctgctgcaggtcggtattgttttcttgtgcttcaggcgggacaaaatttgatctttgagattttgaagctcactgcttacaccatccggctcctggggagactctgaggtcggacgtctaagggagggctctactcgaaataatgatggagttggtgcggtaactccatcaataggaaggtcgggatttgccggggtagtcagtacaacctggttctggtttgaagttgccccaacttcaacttgagagacgagaggtaactgaggtggcggagtctgctgacctgctcctgcctgtgaagtttggatgctcgaactgatgtctccttgaaaatcaaggcgtgagcgaactccagcggtacgtgacactccggcagacaggaagtcaactcgatctgcgtacgcgttgtgagctgtccttatttcagaatggctggtggtgagcgccgcgagctgcccactgcactgttcctgaaaagaaacgaacttatcagataaagaagttactgcggtttgctgtcgctcggtcttgtcggagagctcttgaagcagcttcatgatatcgtcaagggtggaggcttggtcgccggaactttcgttgccgctggtgctcatgatgattcaaccgaagctctaaagtaagaagtttagatgcccctccttctagcgccaaattgtggatgtcggaatccacaattaggaatttgtggattgttatgagggccttaaactttgttagtgaagctaagatcaaatcggacagtatttcagttaatcggaatattttgtatagtcattttctcgtcccttttacaaatgatgaatcactcctatttatacaaattaatcgaatatctacgaagtaaattaacgcttgaatcacgccgcgaatcatgtctcattaatgtttacgtttcacatatccacctcgcgcactaacgcattctcatttactccgcagatttccgttacgtgacgcttaaaaatgattcttcaaattgacctggctctggtgggcttattttggcccactccatatttgacaatcctggactcatcgttgaggctttgactcaggcccatttaaagaatgatgacggatctcgggccaaagcaaagatacgagatccgacatccacagttagctacatcaacaacaaccagggtggctacaaaggatacaacaacttcaaaaccaacaaccccaacctctcctatcgcagcataaacgttgctaatcctcaggatcaggtgtaccctccacaacaacaacaaggtcaaaacaaaccttttattccctacaaccaaggttttgttcccaagcagcaatttcagtggaaccaccagccgcaaccaccacatgggtttgcacctcagcaaaactgtaacgcccgcgatcctcaataggatcgttggctaagacttggtccgagagtagaaggtggagtctcggacaagcgagaaggagctggccataagctcggacaaaggggaaatcatgcgggctaagctaggatcgtaaagaaattaactgggtcagctcgcccaaagctcaagctcagctggaaggagtgacggttactcaggtcgagtgacagtccagctcgggcagctggacgagtgacggttgagctcgaggtagctggacgagtgacggttgagctcgaggtagctggacgagtgacggactagctgggcggttatgggcgaagagatacaactcttcggaaaggtgcaactcttcggaagggcgcaactcttcggaaaggtgcaaggaacggatgtgttgattcgggaagcatccattcgccccctatataaggaagggcgcccaggaccattctactcaccataacacaccgaaaacacaagaaactcaccattaaaactctctccctcttgggagaataaatagtcttaggattcggtagtcgggctgtggccgacaataaagaaggagggtcggatcgacctaacctcgagaaggaaggtaagggatcctagactttgagtctaagggttctaggatgtgaattagtagtcggatccttgaaaagatcgactagagggctgggtagtatccgggtcatgtgcatcctacacaagactcggtctgagtagggatcggctgaggccgagacgcggctcggcagaggaccggcgggtcttaactgacctgccgagaatcggctggactgatgcgcgatcttcccctctctgaattctctccacggatccgagtagtgtatggcatatagagcattgcatggacttgcatatgattaagtaaatgagattacttatggctctatgactttcaggaacgaatggtgatcgtgggaaggacttggcttaggcgcgagagactcaaggccgggatgatgggtggtgatagttcggatagtctagggatcgattatatgacttgtaatagcttatatgcaaactcataagttgtatcgaatcctttgcttgatcaataaagtatccgattgtttgtttactctatttgtctcatatattgaatcacggaatcatatggaacggattagactaggaaagaacctcataaacggttagggccgagtcacttagtggcttgggtcgagagaactcgtccggactttaggcagtccggatcggggcctttcaagttggtatcagagcatgcttggttctaggactaggtgttgggttaaggggtatcaccactcgtcggcttgagaatctcgcggtagttgctctttactcttttgcgattttactaggagttatgtggattaactttggaggtttcgcagatgggtaagagcagcaaaacaggaaagagtaagaaggacaagggcattgtcgaggagactttggttgaggagaaaacgatgatcaacgagaaaaccagagtcgggacgatgctcgatgggacagactcggtcggacctgagaccgggaagaagtccataaatgaggaagcacgggagagtagcggtgcaagggacaacacggataaccggaacaatactccaacggcccaagaacagtgggatttgatgaaaggaatgatggcgcaactagccacattaaccaaggccattgtagcaaatccggtggtccaaagagtggataaccaaaaggacgatgaattggaagttgtggaagtgaatccgcaaccgaatcatgggagaaaaaggggagactatctgagtcttctcgaacatgtctcaaggctgggcacgagacacttcatgggcagtacggacccgattgtggccgatgagtggaggagtagactcaagaggaacttcaagtctacccgctgtcctgaggattaccaaagggacattgcggtccacttccttgaacgagacgcccataactggtggttaaccgtcgagaaacgcagaggggacgaggtccggtcctttgcggatttcgaagacgagtttaacaagaagtactttccaccggaggcttgggataggcttgaatgtgcgtacctcgacctagttcaagggaaccgcacggtgcgtgaatatgatgaggaatttaaccgcctaaggcgttatgtgggacgtgaacttgaggaggaacaagctcaagtgcgctgatttatccgtggactaaggatagagatccgcaaccattgtttggtccgaccattcaactcggtttccgaattggttgaaagggcagcaatgattgaggaagggatcgaggaggagaggtacttgaaccgggagaaagcactgatccggaacaatcaatccaccaaacccgcggataagaaaaggaaatttgacaaggtggataacaccaagtccaatgctaagaccggggaatgcgtgacctgtggtaagagccacagcggaacttgctggaaggccataggtgcatgtggccggtgtggaagcaaggaccatgcgatccaaatttgcccgagaatggaactaggacagtccaaggttctcggtgaagagacaaggacttgtttctattgcggaaagactggacatctaaagcgagagtgccctaagttgactgcggagaagcaggccggacaaagggacaatcgcgggggaaatggactgccgcctcccccaaagcggtaagccgtggcactgcgagtttatgagttgtcggaggaagctaaggatgccggaaacttcagggcgatcactggtacgttctcacaactccctattcattatttcaataactgcatttgcattgcatcatgcatatgggaaaggggaggtactcagcattctaagggaatgtgtagggaccttgagagtaggtgacgtagtaacgcacactctatttgattctggggctacacattgttttgttagtccggaattggttgaaacaggtgggttcagggccaacagacgtgaggaaaacggctttcctgacaaggtacggccactttgagtttgtggtcatgccattcggattgaccaatgcaccaacagccttcatgaaaatgatgaatggggtattccgggatttcttagacgagtttgttatcatcttcattgacgatatccttgtttactcgaaatcttgggaagctcaccaagaacatctaagggcggtgctggaacagctaagggaacatgagctatttgcgaagttaagtaaatgctcattttggcaaaggagcgttggttttcttggtcatgttatctcggactagcggggtattaccgaaggttcgtaatgagttttgcgagcatggcccaacccttgactcgactgatcggaaaagacaccgcattcaactggtcggatgagtgcgagaaaaacttcctggagttaaaggccatgttgactaatgcaccggtattggtcttaccggaggaaggtgagccctatacggtttatacggacgcatccgtagtgggactagaatgcgtactgatgcaaaaggggagtgttatcgcatacgcatcaaggcaattacggaaacatgagaagaattaccctacgcatgatttggaaatggccgcggtagtatttgccttgaagatttggcgatcatacttgtatggtgctaaagttcaaatctatactgaccacaaaagcctaaagtacatattcacccagccggagttgaatctaaggcaaagaaggtggatggaacttgtggcggattacgacttggatatagcgtaccatgcgggcaaggccaaccaagtcgccgacgccctgagtaggaggcgctcggaagttgaggcggaacggagccaagtggacttggttaacatgatggggacattgcatgtgaatgccttgtctaaagaagttgaacccttagggttgggagccgccgatcaggccaacctgcttagtaggatccggctggctcaggaacgggacgaggagataaaaggatgggcactaaacaataagaccgagtaccaaacctcgaacaatggtacaatcgtggtgaacggtcgagtatgtgtgccgaacaatagggcattaaaggaggagatcctaagagaggcgcatcaatcgaagttctcaatccatcctgggtcgaacaagatataccgcgaccttaaaaggtactaccattgggtaggaatgaagaaagacgtggccagatgggtggccaagtgcccgacttgtcaactggtcaaagcggagcatcaagtaccaagtgggttgttacaaaacctacctataccggaatggaagtgggaccacataacgatggacttcgtcactggtagaccgattgactaagtctgcgcacttcatggcgatctcggataaggatggagcagaaatcattgccgagaagtatatagacgagatcgtgcggttacatgggattccagttagtatagtgtcagactgagacacaaggttcacgtcaaagttttggaaggctttccaaaaggccttaggaactcgagtgaacctaagtactgcctaccacccacagacggacggacagtccgaacgaacgattcaaaccctcgaggacatgttgagggcatgcgccttggattggggaggaaactgggagaaatatctaaggttagtagagtttgcatacaataatagttttcaagctagtattggtatgtctccctatgaggcgttgtatggccgagcttgtagaacaccgttgtgttggacgcccgtgggcgaacgtcggttgtttggacctatcatcgtggatgaaaccacggagagaatgaagttcttaaaaatcaagttaaaggaagcccaagatcgacagaaaagctacgccaacaaacgtcgaaaggaattggaattccaagtagaagatttggtgtacttaaaggcgatgacctacaaaggggcagggcgattcacctcaaggaaaaagttaagcccaaggtatgttggcccgtacaaggtgatcgaacgagtaggggcggtggcatacaaacttgaccttcctccaaaactaaatgcgtttcacaacgtcttccatgtgtcacaattacggaagtgtttaagtaatcaagaagaaagcgtggaagatgtacctcccgggttaaaggagaacatgacggtggaagcatggccggtacagataatggaccgaatgacgaaagggactcggggaaaatcaagggatttgttaaaagtcttgtggaattgtggaggtcgtgaacaatacacttgggaaaccgagaataagatgaaggccaatttttcggagtggttcaaggagatgggtaaaggtcaacttgatgcggattcaaggacgaatccaattcaagggggggagacttgtaacgcccgcgatcctcaataggatcgttggctaggacttggtccgagagaagaaggtggagtctcggacaagcgagaaggagctggccataagctcggacaaaggggaaattgtaacgaccgcgtcccgcgttcataaagaggccaggttgttttaggagaaaactagaccatggtcaagaaacggactagaatacttagtcagaagaataagaaagttcaaagctgaaccagctaggtgagctggacaagctaggatgaactagctagctaagctaggtgagctaaaccagctggaagactagctagctcggctaggtgagctgaccgacagctcaactgagctcggtgagctgatcgtgtactgacccagctgggtggtccggtcagctgacactcgagctggtggactgtggtagctcacgggtgaagaggtgtctcggccaaaaggtgtaaggtcgagcgggtaccaacgaacggttgcatcgcctaatagatgcaaggaacggatgtgaccttttggaaggatgcaaggaacggatgtgacctttcggaagggtgcaaggaacggatgtgatgcttcgggaagcatccattcgccccctatataaaggaggacgcccaaggcctttggaataatctcacatcatctcacaatctcacaatctcacatcatctcacaacatccaaaacaccataaaacgttcttaaaggagtcccaacacatcctagagttgttggtcggaaaggggatgcggctcggcgagtataactcgaccgaactgatgcacatgctacctcccgatccaacggttcgatggagtgtagaggatggagagggtagaccgttcgtcttagagacgaatcggatctagtagaccgatcgttggatcggatcggccagaccgatcgtaagacggatcggccagaccgatcgtaagacggatcggatcggccagacggatcggacagaccgatcgtcggacgggtcggatgggacaggccgatcgtctgacggaacgggtcggacagaccgatcgtcggatgggatggatcgagaaaagtgttcgaggaagcacaaggataagtgcatccgaacacacccaagggtcgcccatggatgcaatcttaccggtaaagggagaaagcaccaagaatgggtaaggaacgtgattcaccatataagatcaacatcgcggccgccttcatgtatctatctcctcagccatggtgaaaccgatcagagatcggtaagaccaaagggtgactcgacggataaccaacgggaaagtccacggtgggaaccgatggacaaaacagatgttggacccgcgagaaaacctaaggccgacggaagaaagatttcatgggctagcctacgatgatctagtggatgaatccacggacccttgggtgtgataaggatatagttcggatcgtatggatggatcaataagccaaaagctttatcgaccaccatagaccggacggataaacggttagtaaaccgtgggcggtcgtagtaaatgacaggatcggaaacatggatggttcgataagccaagggctcaatcgtccaccatggaaccgaaggggagtacgtttggaggacggatggaccaataagccaagagcttgattcggtcatcgtgaaccaagggaatcgtacgatccccaatctctatcgttgtacttagaccagtggggttggttggttgtatggctaagtaatgatagggattggttcatcaattcacgaccgatgacgagtcgttgaatgaatggagtaaggcgacaaacgggctaaggaatcaaatccgcatattggccaaggtatgtaacgatctagcttattagttaagatagacgtttggtaattgaccgtgaaagtaagataaaggaatatgcgattgtttggcttagaatggttagcgaacatatgcatgtcttgaccgagtaaaggatcgatcatagaattaaacgaaggttagaaagacttccgctgtgtaataagagagcaattatagaatttagcctcgtaaaggcaattctatgttgaatcgcgaaaaattaagaggttcggccggggagaggcgcgaacttgagtacacagtcgccggacaccgagacgtccgggactgggtctcacagaaatcatgcgggctaagctaggatcgtaaagaaatcagctgggtcagctcgcccaaagctcaagctcagctggaaggagtgacggttactcaggttaagtgacagtccagctcgggcagctggacgagtgacggttgagcttgaggtagctggacgagtgacggttgagctcgaggtagctggacgagtgacagactagatgggcggttatgggcgaagagatacaactcttcggaaaggtgcaactcttcggaagggcgcaactcttcggaaaggtgcaaggaacggatgtgttgattcgggaagcatccattcgccccctatataaggaagggcgcccaggaccattccactcaccacaacacaccgaaaacacaagaaactcaccattaaaactctctccctcttgggagaataaatagtcttaggattcggtagtcgggctgtggccggcaataaagaaggagggtcggatcgacctaacctcgagaaggaaggtaagggatcctagactttgagtctaagggttctaggatgtgagttagtagtcggatccttgaaaggatcaactagagggctgggtagtatccgggtcatgtgcatcctacacaagactcggtccgggtagggatcggctgaggcggggacgcggctcggcggaggaccggcgggtcttaactgatctgccgagaatcggccggactgatgtgcgatcttcccctctctgaattctctccacggatccgagtagtgtatggcatatagagcattgcatggacttgcatatgattaagtaaatgagattacttatggctctatgactttcaggaacgaatggtgatcgtgggaaggacttggcttaggcgcgagagactcaagaccgggatgatgggtggtgatagttcggatagtctagggatcgattatatgacttgtaatagcttatatgcaaactcataggttgtatcgaatcctttgcttaatcaataaagtatccgattgtttgtttactctattcgtctcatatattgaatcacggaatcatatggaacggattagactaggaaagaacctcataaacggttagggccgagtcacttagtggcttgggtcgagagaactcgtccggaatttaggcagtccggatcggggcctttcaaaaaccaaggtcctgctgctcccgatgctgaaatgaaacaaatggtacaacagctgctacagggacaagcatctagctctacagaaattgctaagaagttacctgaattgcaccataagctggactgcagctttaatgacctgaatgccaaagtggaggcattgaataccaaagtcagatacttggaaggacaatcagcatctacctctgcacctaaagttacaggacttcctgggaagtcaatacagaatccaaaggagtacgcaactgctcacgcaatcactatctgctaggatcgagagctgccaactcgacttgttctgatttaatcactgggacagtgatgttcaagagggggacgcttctactcagattgaagtctctgttgttgaattcaaccattatgctggttctcgccatctcattcaatccacctcggaagagaaggccgccataatcgagaaaatggtaaaacgattcaaacctactccattaccctcccgtgctcttccatggaaattcaggaaagcatagatggagagatacaagtctgttgcagcgaaacagctagacgagattgaagcagtgatgccactaatagaagttctcaacctgattcatgatcctcacaaaaatgtgagaaatctgatattggaaaggatcaagatgtatcacgattcaaatgatgatagtgacgctactccatctcgagctgctgataaaaggattgttcaagaaaagtttggagatcctggatcttttactctaccatgttccattggggaattagcttttagtgattgcctgtgcgatctcggagcctctgtcagcttaatgccactctctatggcaagaaggttggaatttattcagtacaggccttgtgacctgactttgatccttgcggatagagcttcaagaaaaccctttggcatgctgaaagatctaccagtcatgattaatggagtggaagtgcctatagacttcgtggtgctggacatggaagtagagcataaggatcccctaatcctgggaagacccttcttagcctcagtgggagcagtgatagatgtcagggaagggaaaataagtctcaaccttggaaagcacatcatgttgcagttcgacatcaacaaaactccacaagagtcaaaagaagatgaaaaaacctctggagatgatagagtgatcccaggagaaaaatatgagactgagaaagtaaaagagcttaaaaagaggtctgataagcaagaagaaactatagagaggctagctcactctgttgaggaacttagaagtaagctgaatcagttgcagaaggaagctcaacctaaaggcgagattgacactatcctgagaaagaagttcacttcaagatggtttgaagagatagattaccctccagaagagaaagaagcatattttgaagagaggggaatcgagtattctgctgcagacctctccagggaggacgctgaatatgatgatgatacaagagaggactatgcagaccctctctatcattcattttcttcttgataagtgtgaggattcaagctagggactttaaacaagctcacttgggaggaagtcccatgactatcactgtaaataaatttttattttcttgtaatttttgatatgttttagttgtgtttgtggttctcaggaatggaggaataacgtgaaggtagagtaaaaattcaaaacttttactttagagatggcctagagatcgagtatatagggtagcggagtgcaaaacttttaaaactttttgttgcacctcgagaccttgcactcgagacattagtcgagtatgagtgatgtttaaaaatcaaaaaattttatacatcatttactcgaccaacaaaagctataaagtcttacggggagtttatcaagtttacagaagattacgagatttcctgaggtttttacagtaaacagagagcacaaaataaagacaagaagacattgtgggacccgccgctgacgcccatgtcttccatgcaagagaccaagagacaaggaatctctttacaccccctctccaccactcgacctcatcgccaccttatcccccccatcactcgacctctccgccttctccttccatcataaacactcgacttctccctttcaccttcatcccaacaacactcgactctcacttctctcatcgaccctcactctcaagctcaccaaacactcgatctcatcgaccactcttcgccaccaccacctctcattcgtctcagtttcactcgaccacaactctcttcgcctctccatcatcacggcctgctccctctctccaaggaaacaactcgacctcaccatttcattcactcgacctctatcaccaagtcgccttcaccacttctcgctcttaaccactcgaccatcttcaccatcaaccaatcaaatcgttttctcctccattcaagttccaaaactggaccgccgcttcactcgaccacaaccacgaaaccagcttcactcgacttcacaagttcactcgaccgcgtctccttcttcaccaatcacacgaactcacctctcactctctcatcttactcgaccgcgtgtaagaagaagctaaccaaacaatccgatgaaccgtctacaacactactcgcctttgccccgcgatcaagtacttgaaggtttcagccttgctcatttgggttcgtttggagaatcactctgtcacaacatatcactcaaccaaagagttcactcgaccaccgcgaatctctcttcgctatcaccggttcacaagctcactcgaccgcttcgctcaaagtgtactcgacctcttccaccatcaagcaacaaaaactcgatttccaaaaccaacaaaatcactcggccggtttactcaataacattacttgaccaatttactctgttagtttatgtttttggttttgttgggactaacgtattaacgtttatctttgagtttcatctattttcaggtttcatcatgagtaactacaatggagaatcctctatggatcctgattataatgtagatgaagctgagtcttggtccactagaccaaagagagaagaacacgtttacgaaagcttcaaaggagaattggaacgctctgcagctcgacgtaaccagagaagagctaaaatcgccagaggaaagagagcgatgtcaagtagatatgagttgattgatgaggacatcgaaactgagtatgagccagagtcatggcgcatggagacgaagctgctgaacaaacccgacgaggttacggtggaggagtatatcagattctttgagatgaacgacttctgggggacgagatatccctgctatgagactttagcccagctggggttactggaggacgtgcagcatcagttcgagaagtgtcatctggagacactcatgtcttacccttacgctacctataaagaggagaggatcgagtttctttccacactgcaagtggagatgtattagagtctcacagactttgagctggataccatgggattagggttcttgacgttctcagtggatgaacaacgttatcagctgtcgatcaagaagttggaagaactgtttggtttcccaagtggaaatggaaccaaacccaagtttgaaaggaaagagcttaaggatttgtgggctactagtgggaacaatgtaccactaaactctgcgcggtccaagagcaaccaaatcaggagtcctgtgattcgctactttcagcgttcaattgccaatgttttgtactccagagagtctacaggcaccgtgtttaacacggacatggagatgatagattccgcacttacaggaattctccgccgtacaaagggaaagaatgtcctgagaggcaatctcaatgacgcgccaccagtaatgcctctgttgatccacctgtgtggatacaggaagtgggcgttgacaaacggcaagaagaaggtgagaggagcactatgcgtgggtggcgttgtgacgccaattctggaagcttgttgagtaccgctcaaggaaccagggttagcaccgagaatgatggactttgatcatttgcgccgatgtgagttcttggagtatgacatggttggcgacttccaccgctacaggttcgaggattcatcgattagaatcgccaatattcttctcccctgcattgacgctaataggattctcgagggaaggaacattgacttcaagcctgcgcttgaagatctttattttgagggcagtccgccaaccgaagagatcagtcacacagaaggagctataaaggaagatgttgatgtgacagttgaaatagatgaggtggagtttgacacgagcatgtatcatttcagtgagcatatacctccagcgagggaaatcaagagtttgagcgaagctcaaaagaacaacagtaagctgcagaagtggtgcaagaaactggataagttactcgccaagtgcctcagggctatcaagtttctgaaggacaagcttagctgctcctcttccactacagctatcccgcagggacagctccctcaggacatgccctcgaggagatatgacgcgcctaagccaagtcggcgtaggcctgagcctagtgagcaggagattccgcatgtccctgcgaggcattcatcattcgagcctcgtgaatctgggaggaagaggaggaccacactcactcaatctagcagcacgagcaaacgacttctccagtctcgtagtttacgcgaccgcggtgctgtccgcagcagaagaagagaggtcgagtatcctcatagcggtgctggccgccacagagctgatgagatcgagtacccacctgctggagctgatacagaacatggcggttcgtctatggcctgtgagcaatgacaggcagccattgacgaccaactccgttcattcttcgactgaggtaagcgcctcacttcaccattgtattatatcatctcttgcgatttgttctttattttgtttttgtgattggatttgtcctgaatactcttttccaagtttattcacacagtggactatgtgatttaagtttgggggagggctcaggaagtgtgtgttgcattgtttatattcttgagtctgcattcatctaaggcatagaaaaacaaaaaaaatttgaaaaatttcagaaaatgatttcacaaaaatagtgttcatgtagttgcattacatttaggatcgagtctagagtgtttcatttaggattgttgcatatgcataggggataattatgatatagctttgtaagcattttggttcaccggataaactcagcccttgttgctagttgtctgttgcgtagtcaatgaaattgaagtaaaactaaaccatgcctagattgctctactcgaccacactgtcatgatctgataccattccctatcaatttgaacctgaatccgatctttaattatcatgtatgcatcaaatttgaactcatggataccctaaaatacttggattttcttattcattttgatcactcttgttaatccaagtagctgactctccttataagagcagttaacccaaacccaaacctagactttctatcaagccctatatcacttgtgagtgtttgtgaggtcttattccgattaagcttggtagaaagtgttaggttcgtaacgaaagagatagtgtctcatgtagttctacttcgcattttttagactagataggactaggttggcgcttatactttgggttgggatgtgttttaaaaaaaaaaagggttgatttattgatgagaaaaggtaaaagactctaggtgaagtaacctaaagaagcagaaaaagtctagtaaaggttttgagatttgtaaagaaaagaaagagttcttgttagctattgaagatgggataaagccctcacttttaaaattttaaaaacaggaaccttagttgttaaagaaatccaaatccgctagatgtatcaaagtgttgagaaagcttctcttagagttaagagaaaagaaaagaatgattagaaacaaggcttaaaagattcatgaatgcaaagggtagagttaggttcttatattgggattggagatgggattaccattagagcttcattggttatactctaggtagatgggatcttatctctgtatgcatagcttgggacttacctttaccattctactaaagcttaatcattttttagagatcccctgttactgaaacttattctgtaagggaccatctttgtctcttgacctttaccttagccaactgagttcattgatgatgcattgcttgattcacattccagaactaattaatgttaaagggattggtagatttgagaacatgtgtaggtcgagcataagagtcggattgattgataataatgcatggctaacgtttttgagtagaattcgataatgtcgcagcttagaactatcaacttggacaatgatttcatctggtttatctggtgctttggctttgagtccccgctttcaaacctcacctccagcttgttcttgattgtttgcttgagggcaagcaaagactaagtttgggggagttgataagtgtgcatttgacatgttttgagcatccatttgttatcattgttgcatcatatcaccactgttttatactatttctcatcatttgtcatcactttgcatgtttaggatagttttgcatgcatgttgcatatttgtgttgatttcaggttatttggagctgttgacgggctaattggaagaagcggacctgatcatgtcaaaccactcgacccccaggtcgagtagatgctccacgacatcaaaggaccactcgaccccctggtcgagtagaagacttcaccacttgaccacctggccgaataccaccatgagagtcactcaatcacttcactcgaccaccaggtcgagtatcatcacctccaccacctgaccatcactcgatcacaccactctaccaagaagttgagtatcaccatcaccatcactcgactacatactcgattgccagcttcagagtcttctccattccgcactcaaccagacactcaagcacaaggaagaaaagaagactccagctaatcactcgaccacccactcgaccacctgggtcgagtactgttcttaatccatcccaatactacgtcgttttgagtattagggtttcagaaatatttcgctataagtagcatgtactttacatttttgttaatctaagttttattctttagacactgtgttcttgacattttgtaatccggatttctcttaatctattcagtattcagcatttgcttttgattttgtttactgttgttcatcctgttatcaacttgctattactctgttgttatcatgttttcattctattcaacgtttatgttctctgcaatgatgtctgagtagtgaataggtttctgaggatgggttagagtagtttagaattctcagtatgctaggtggttgagtttgattgatagatcccttctggattaattgttcttaatgcctattgctttatgatcaactagaattggagcccaaacattttcgcgcccaaaaggtgttcgatgaaatgtctgaaccactaattccagagatttgtggccctgtacctaggtattggttgcagggagcattttggctttaacttgttgattcgtaataacttttaggttagctctcgtcaatggttattgagtctgggactagtttaacttgagggtctctcttgcggtggcacttagatttggttttcgaacttgttgtctagggataatttattgagcatgtcaatcacctgtaaactgaggaaacaaaactactcaattaccccatcctcggaaatttctcagccaattgatttctttggttactctgttgttgtttactgttactcgacctgatactcgaccacccagttgtctggcaacagactgtgcagtcgagtatccctcttatattttttgtctgttactcgacctgtcactcgacaacacccagtgctctacaacgagctgtgttggtcgagtgcttttactattctgcttgaatttctgttttctgcatgttcacttaggactgctagagcacacaaaaaactgttattgcttggcttgacttagtgacttctgatcacatcttgattgttagtatcacacctatttggattgacaaccttcagtactacaacgacatgataatgcattaggataattgatcttaaaaacctattatcaagtacgccgatatgaagggagcttcgatagaggagggggatgctaatcaaaatatggatgaagttgaggatgtaaatgcagaggaggatacaaatgaaaagaaggatgaagacgagatgtccagatttgattgtttcgatgacactgatggagcgagtgacggggatgaagagtctagtgtgtgcacaacgtatttgaagatcaaaaccagtgtggatttgataatggaaatggtgacaatttgtttgaactatgggaaagttcatcaggatgacaacaagtttatagtagaaaaaatgagtttgtgaaccttgattttggttctgtagtagatttagaagttggtcaaaatatttgattcaaaagatgatttcagaagtttgacttcaatgttggtcgatcaaccctggagttgtatactatcaaatgatgggtgcccggttgtaaatggagagttcgagcgacacccacaggggttggttcatgttttgaaattcgggtctatatatcagaccatacatgctctgtgacagcgcgttctaatcgagcgcgtcaagctactcatgctatattaggacagatttacaaggaatctgttggtggtgttcgagctggtgttcaacctgttcatgttgcagatgctctaaacctatgttatggcattaaagtaaagctaaataggtatatagtattacatactagcacttatatagatttctcttatgtctcatgccttattatttatatatatataggttaattattggatgtcacatcgtacacttaagtttgcgaggcatttagttaggggaagagatgaatctgaatatgaccaactaccatcttacttatatatgataagaaaagcattgcatttaagtaggcttgaagtagatgtgttagatagattcaagtatgttttcattgcatttggtgcaagcattgatggattcccatttattagaaaagtaattgtggtggacgagatatttttgaaagggaaatacttgggtacgctattattagcaacaacccaagatgaaaatttcaatatatttcctttagcttttgctattgttgacactaagaacgatgcgtcgtgtgagtggtgatatagctcaaattgtcttaagcttactccctcaaataggagatcgtcgttagcacttaagggtcaaattccactgagctctcgatgttcacacaataaacttgtgatgattttaattaagctagacaaagtatattaatgtaaagacaataaagcaagtaaatgagttgtagattcaagtgattaaagagtcgggtctaaggaattatctagggagatagataaattgtagatctagctaatattaggattgttatcgcaacgttctcgaactcaaactatgattttagagtaaccgttggtgttccatgaaactctctatacttagagctaacataaccggagaagccgagaaatgctatactaaagcatgcattattatcaagtttgataagttcacctagtatctaaaccagagcccttctatgagcctacatgttctttcttaaatgcctaggctcgtctatgatagttcatataataagtacctatggtggtatacctattatctaatataaagtagtaggtgatcaatctaaaactagcaataagaataatcaagatgaagaattctaaaaataatccttagggttttcgatctactaatccaactaaatcccttttgggactccttaaacccaacaaggtgattactcagacatgataactagtcctgggagttcggcctaaaccgatcaaaccgaaccgagtaaccccaaatttttggttatcggcacaaatcgaagaaagaagacaaaaccgaacagaaaaattaattttggcaatcagatgtcggctcgggtcagttcggtactcgaaccgatcgggttaattcggtttagtagcttattaagcagacctatataaattctaaccaaccctaatttttatatctctttctcttcgcctccgcctccgcctcatgcaatttacagacaaaaaaagctttcatcgttcttctcatcaattcaccttcatctcatctctgatctagacatctagacatcatctcatctcttctctttcctcatttcatagtgatcgacacttctacttcttcttacccttgccatctcagaaattcaagccacaatcaaggaaatgatgcatagtcatgatgatctccatgtccatggcatcaatccttcaagccgccacatgttctatccttgccgtagaaggtcggacgtgggatcaaacgtcgaacatcactgccgccgtcacgtcctcatgagcagttttagttgaaaaccctaaatttaaatgggctatgttactttgtttttaaggtgggctagggtttttatttagtttggcccatcaatgtttttggttataattgtaattttgagcccattatctaatattttggttaattcggttcgaattgaccgaattagaaacaacatttgttcaattcaaaagtgattttaatccctataaccaaaccgaaaaatctgagatccgaaccaacccgaaccaaattttacttcggttcaataaagaagaattttagaaatccaaaaaaccggaaaaccgattaaactgaactgattaaaccgacataaccgaactcgcaggactaatgataacagaaacacatatcataatctgaataagaaatcaataatagcaagtactacgtcgttttgagtattagggtttcagaaatatttcgctataagtagcatgtactttacatttttgttaatctaagttttattcttcagacactgtgttcttgacattttgtaatccggatttctcttaatctattcagtattcagcatttgcttttgattttgtttactgttgttcatcctgttatcatcttgctattactctgttgctatgatgttttcattcatgtcatcgtttatgttttctgcaatgttgtctcagtagtgactaggtttttaaggatgggttagagtagtttagaattctaggtctattaggtggttgagtttgatttctagatcccttctggattagtttttcttaatgcctattgctttctgatcaactggaatttgagcccagacatttccgcacccaaaaggtgttcgatgaaatgcctgaaccactaattctagagatccgtggctctgtaccaaggtactggtcacagggagcgttttggctttgacttgttgattcgtaatgcctgttaggttagctctcgccaatggtgattgagtttgggagtagtttaacttgagggtctctgttgcggtggcactagatttggttattgaacatgttgtctacggatagtttattgagcatgttaatcacctgtagactgaggaaactaactactcaattaccccatcctcgggaatttctcatccaattgatttctttgtctacactgctatcgtttacttgctcttgctgctcgttgttcgatttttgcatttttcgcctatatcactctaatactcgactacccaattgtctggcaacagactgtgcagtcgagtattcctagtacattttctgtctgttactcgacttgtcactcgccaacactagtgcttggcaacaagctgtgttggtcgagtgttttaattgtttcttcttgaatttctgcttcctacatgttcacttaggcctgctagaaaccccaaaacctgttattgcttggcttgactctgtgaactctgattgcattttgattgttagcatcacacccatctggattggcaaccttcagtactacaacgacatgatagtgctttaggttaattgatcttaaaaatctactatcatcaaacgtcaacactggcatgtctgtgtggtgttggtgtcgatcgacatgaggtgggtgttgttcgacaccatcgggaagaagttcctcctcctttgggaaattatcgattccactcgacaaaggcaaaacagagtagtcaagatcaattggtgtcgatcgacacccttatgtatcgatcgacactaaggttttttctgcaactagacgagatgaagtcttttctgaaagttctcgctgaaggatcgtcttgggttgcttccattgtgtaatgtgactgcattgacagatgatgttgtagaagaagacacagatatatgagatctcagattgttgatcttcccattaagatatgtgtaaagagaatcaaacttgccattaaactcaaccacgagctttgtgtgtccctcaaaaatctgcgcaatcatggattccattcggctgtctaaggtgggtggaggggcttggataggagcagaaattgatgattacaacattggtgatgaggagtaatgcttcactagtagttcttgtcatgaagttacagtagcttgctgcatcgagttgattccggtatggcttagctatccctttgtagaatatattgatgagttggctctcttggaaaccatgttgggggcattgtcactgataagatctgtagcggagccatgctgctctaagggactcggttggagcttgagtgaacgaagagatttgtaaacgaagtgcctctgtcacggattcatcgaagaagtgattcatgaaggcgttctttgtatcagtccaatttgttagtgagcctggttctagttgacgcaaccatgatgttcctctgcccgcgagagagtgggagaagagtttgcaaagaaggtaatcagctggtacaccttctgctttgataaaggacattatgtcttctaagacttccaaatgttctaatgatgattcatcgggagctcctttaaactttcctcttgacacaagatcataataggcagggtatatatcaaagtcttctctttcaaatggtggtagcttgattctgatcggttggtgtagaaaagatcagttctgctaaggtcacctattgtaccctgtcagttctacagagggtgtcaatcgacacccagatggtgtcggtcgacactatcattgaattctaacatagaaacgtgtaacaaaatctgaaggtacctgaaacataagaaaaaaaaaagaaaaaaaaaactgaattagtaatgaaagaaaagaaaagtctagacttaaatcgacacctactctaatggtgaagcaaagagaacttcgacaatggcaccaaatttgatatagctcaaattgccttaagcttactccctcaaataagagatcgtcattagcacttaagggtcaaattccactgagctcttgatgttcaaacaataaagttatgatgattttaattaagctagacaaagtatattaatgtaaagacaataaagcaagtaaatgagttgtagattcaagtgattaaagcgtcaggtttaaggaattatctcgagagattgataaattgtagatttagctaatattaggattgtcatcgcactgttctcgaactcaaactatgattttagagtaaccggtggtgttccgtaaaactctctatacttaaagctaagataaccggagaagccgagagatcctatactaaagcatgcattattatcaagtttgattatttcacctagtatctaaactaacaagtacctatggtgggtaacctattatctaatatcaagttgtaggtgatcaatcaagatgaagaattctaagaataatcttaaggggttttcgatctactaatccatctaaatccctattgagactccttaaacccaacaaggtgattacttagacatgataacagaaacacaaatcataatctcaataagaaatcaataatagcaagagaaagtgtaaagaagatctctccaaaggagtctccacaggttttgctcccaaaaatacaaaagagataaggagaatagcctctccaagcttagtgtctaaaaattgacctaaaaactatatatatatatatatatacatatatatatatatgtctgaaaaacgtgttgggccttcattaaacataggagaaagttctgggacggatttgaaaatcttctaaacttcaataagttacgtcttccaattgccgtcaggtattggtgtcgctcgacaccaggggtggtgtcgttcgacacctacgcgctttttagtttccggatttcttcaccagcatgaattctatgttttcctccagaatgctccattatctccaaatgaatcccaaacatgtaaagacctgaacaggactagaaaagactctaaaaaagaaatagacttaaaacatatacttaaatcatagctaaaagcaataaaaataaggttatatcaatgtgtttttagacaactaagcggtgtgattccggatgatgatgggctagcgataatatcttataggcataatctaaagggaaagctataggaagtgtgtatcctctatctagccgtggtagttgcacataccatttacataagaatattttgcttagattcaaggggagtgaatcatttgggttagtgaagaaggcagctacagcttttcggctgtcagactttaatgttttgtttcagcagatccatgaactaaatctagagctacatagctatttggaaagagctgatttaagtatgttgaatagggtacacttttcgggggatagatacaacttcacaacgagcaacaatgttgagacaataaataaagttcttaggccctacagaaactatcatattgttgcattgcttgataaagtgaggatgatgctaacccgttgatttgccgctaggcgtaaacaagcctgtggaatgacaacaactctgactactagtgttaaaaaactattacaggttcaaattctatttaaactctccataatagataatctttctacttatgttattgaatgactctcctttatatgtggtcagagccgcgtgttaagagctagtattctaaaagtacaagagatagatcctcatcaatacgaagtgagaagctcttcaacaataaatgttgtcaatctatcccaaaataaatgtacgtgtcgtatgtttgaccttgagaagttaccttgcattcatgctctcgcttctgtagaaatggccaaagtatcaaggatcacaaaatgccacccctactaccgtaaagactacctttgcaacagatatgacaagtcggtaatgtcacaagaatcatgcactttgcccgacatcgttttgcagaaaatatgtcactcgcctgacgtgaggccccaacctggtaggcctaaaacaacaagagtgaaatctgcattagaggttgcattagatagaaaaggaccaaaaaaattgcatgcgtgttcccaatatggtaatggtggccaaaatcgaacaacatgcaaaaactaatctactgtgttagaggttgcaatagatattaattctgtattttatttggaattttaaaaccagctgaatgatattcgcatatttagttgactttaattctgtaagactttataatatcatacatttccaagtatttgaagtttaagactacatataatggagcctgtggcccatttaacttatattacactataaatcaatcttactacggtccatttaacttaaattacactctaaatcaagcatactactacggctgattactcttatagtacaataaaaatagccttctgagacttatcattcttacaactcttactactatcaatacaacatacaaaatctagtagcaaatgagtaagcaaaacaatgtttgcatatagatccggcgggaggatgttgttggtagcatggaggccagatatcgaatttacatgaagtagcaagaaaacgataccctagaatttccattgagcttacttgttttgctaccacattcccgaccatcaccgctgtttctagatcggggaccaagcttaaaaaacgttctgtgatatccattccttttctgaaacatccacagcatatgaggagtattccatacgcaaaatgggcaaacaatgaatgttccacacataaacttagcatatgaaaagctt

SEQ ID NO: 523 - DNA, 25102 bp, Arabidopsis thaliana
tagaatttccattgagcttacttgttttgctaccacattcccgaccatcaccgctgtttctagatcggggaccaagcttaaaaaacgttctgtgatatccattccttttctgaaacatccacagcatatgaggagtattccatacgcaaaatgggcaaacaatgaatgttccacacataaacttagcatatgaaaagcttcttctgaggatggatcatcttgagtcaatatccgcaacgattctacgtaccttgctatcatatttccctctttgacgcactttaataagaacactctataactcgactctacgttggcaagtgtaccattgaaaataaactcatccatatctacattcgctagtacctcaccggtgaaatcaagcttcttataggctagaccatctactatgagtggaccaagaaatctgaaaccttgctcgccaagtcgtcagaatatgtctgtcacaattgggatagggaggtaagacattttgtgaaatgttacagtttcattttcacacataactcttgtgtactccttacttatacacgtatagcagtaattgtttttttgtaaaaattattggaatgggttagaaatgactagagcaactgagcatttaccttacataggtaagtaattacttctttgtaagtttatcattactccttggtaaatgtatcttcacttgtttgtaataaattatacttatcggtaagtgtatctacatcattattctacttattagtatttttaataggaagtacataaacagtttcgcttctgttatcaatcatggcaaactgttataagtcattcaatatttcgtaaattataaccaagagaaagaaacttcagggaaaacaacacaaactattcaacgaaatcatataaaacgagttccgcaaacaaaactagtaaactaaacagaagtagaaatatgatccgcaaacaagttccaccaaaaacatatcaaatgaaatcaataaagacaccacagatatgaaaactaatgatattatatcaccatctttatatctacttctcttcgtctggaacaacttcagcattagtgccgatggttttgggtgactcggattccaaggtgcagctacaccatcatggttctcacaatatgccctaagtgagtcagacatgcacccaaatttgtcgaattcaaacctaacccaatccttcgagtgagctaacaaccgcctcatgcctctctccatgtcttgcagctgaatcagtagctcttgatgatgtttttatacgctgcatgttgattcaaaacctaaatacatatatcaaatagtccgaattagggcttttaactgaaattaggtatagacagccaaaacacggcctaagaagctctaaatacctaaaccctaaatacttagcgaactgattccaaatctcatcacgtatacagaattgtatgattattgtgtttttaataaaacccttaagttttgggtgagtaaacacggcctagaagctctaaatccatatagcaaatacgccgaacgttgattcaaaacctaaatacatatagaaacttaagtagatgataaaagtcaaaactaaccagatcatgccaatgaagtagctgctcgcaatcctgttgggaggcactggacataaaatcctccgggaatagaacagatccaggaacgaaatctcggccttcaggctgaaaggatggtccatccccatcaactgttaacctgttccacacataggtcggttcaacagcaccttgaggaatttgacgacagaatcggaatcccacatctctattagacctacttagatagtgccgactccacgaagttattggagaaggaggcatgggtgatggaggggtttggttaccagggactgacgaagaagggggaaaagttgaacgatccattgatacaaacgacttttggtttcctgaagtctgaaagagaataacatatgcgaatgcagtaaataagaagtgacgatagtgttcgcctagaattagagtttcttgaagtaaacaaaattaatgtcaacagatatgggccaatcaatcatataacacaactgggcctcaattattttaaagtcccaacactaatgattaaacacgtatagcagtaattatttggtttgtaaaagtatttgttgcgggtgagaaatgatgtgatcagaagtgcatttacgttaagtaggaagataagtaattacttcttctactgtttatcactacaccttcgtaggtgtaacaataaatttgataatgtggcttaaatgtaaatagatgaacgattatgtttaaaaacaaacacaagacattagagcaactccaatgttggttcttagaaattcttagctaattcttagcaataaaactgattaaatctaatgcaaacaacaaatctaaattaagatttatatcttatttaaggtgtttgctgtaagaaatgaatcaaggtattgacctaaatggttctttgtggaagcttctccctttgtgacgttaaaatgcaaacatttgcttggttgtattgtattttattgaatgattgcttgtataataagacatgttttggaataatttgaatttttgtttgttaagaactcaatagttgttaaccattggattagaaattagttcagtttttttctaaattttttaaacttagtgaaagcaacattttaatttaaaataaggttaacattaaaaattcagaatcaattggttctaaaccattggggttgctcttaggatcaattttaaacaaagcaattacataaaatagcaatatgtattcaacaacataaccaagagttttaacaataaaaatcgaatacataagcatagagttctgagagcgatcgagtttagcaaaatattcaaataatatcaaacaaacaaatgactaaatcctcttcacagcctactttcaccacgtcagttctcgatcatcacttccatcttcaagggctcctcatcttcataatcttcacggaaacaacggctgattcaaaacaataagtgaacaatgttatagtattatgaagggtcatagctaaatatagcaaagaaaaattataaactaagtacatacaggaaattgtcactattataatctggaaatgtggggtcgaagtaaatccttgaaggctcattctcactgaataaggcattcctccctaacactatatggaagttagggttagagaaaaaatttcaaaatttcaaccactcgttaaaattatttttgtaaacgctagaactagagtttgacagaccttcatattccgcaatcctctagaaccggatgataaccacaagtggtttgtagttgtaagctggggcaattatacgtcgataaaacattgaggtaaatacctcacacatcctccccacagccacacaggttatgatcatatccctaaaacattataagaatccaaaccaacacatatttaataactccatcatatataatcactaattttaaaagcgagaaaatatgaaatatgacttgtctacagttacagattatctttgatgttgaaagtgacatatctgacgtggtaattagactctccttgacgacagacatatggaaaccgcttgacttttgagacacttgttatgacacccattgcatcttcaaagaaggtatagaagaatattaaagtaagtatgataaatatagaaacaaaaggaaaatattaaaagttattctaattacctgttgtgaactgttagtcatgttcaccggcatcttgtaattcatcagggtatatgcagtcaaagaaggagcgagtagatataggacttacatggcacattttggtaggccacatactcgatctgaaagcgatagtacacgtacttgataggccagtggatctcttcacgtggaagtcagcaatgtagtaccaatccccttccattatacctaccttaaagttgtacttatagttcccaacagggacgatagcatcgattttcgtaccctagtgcaaatataaagactgaatcatcatcatattctaagaaccaacaagtgacaaatttaagaatcaaaatgcaataaaaggtaaactcaccaagatgacgcaaataacaggtggataaaagtgcaatcaggggtgaatacaaataaatctaagaagaatagaagtcataaggatggattcattgataagggcaactctagggttcatcaggtggctaacatgcgaaagtcaaatactctagacgatagattcaaaaccagatcaatccactctcgtgacagagatcctcataacctcaccacttcttaatatcaactctcgttgatgaaacatagcaaagcaggctttaagcaacaatctaccaaagtcaataagcagtctaagagcatctctaatgcctaactctatatattgctctattttagagaaaatataggtggttttggtctattgtatgactctaaaatagagttaactctaaaatagaggaaaaaagtagagattgctcttttctaaacttttcctctattttagagttaactctattttagagtcatacaatggaccaaaaccacctatattttctctaaaatagaggaaaatatagagttgagcattggagatgctctaaacatccaatctcttggggtagaatctacaaatctcttggaattcgtagatcatgcatccatttgaacgtctttgggacgttggatacctagggttgaattcccacattagctagtgaaaaccgcataggaaccaacgaatccagaagggatctaacctaatcttacccacctgactaacctagagattaccctaatctaatccatcctcaagaaccctaatcactactcaagcaacataatgaagaacacaaactcagaaattactcttaacatatcaaaatgtagatctaaacaagataaacaattttgctcaaagaactaaatgcaaaaacaaaatagattaagagtaattaaggtttcaatattctaaaacacaaagaaaaactacagaataaaagcttgatcctttggacaaatcccaaagaacctatttatactaaaatctcgaaaaccctagattcactagaagacaagagacttgaggcggtttggatggatgctcgatcttggggatcgagtaaagagggtgttgcaaagtctgcgcctttgtttccatgctctgagtgatcaattggtcgagtagttgcttcttcctctcctattcttatgctcagctgtctagttgagtggggaatgaggaggatccaaagacgcttggaacgatcaacaagtcttgtagagtaggttgcccttgattgagtaagtggtcgagtagaggatcgagtagggggtcgagtagattctacttcctcctctgtagctgcctagatcgagtaaactggtcgagtagattgctctactgcttccctcctagtttgatagagttgagggtcgagtagattccttgtaagctcattctacacctaaaaacacaccaaaacatgcaatatgtatgcaagatgatcctaaattcctaagtgtgcaaaataagctaaatgtgatgcaaaatgatatgaaacaatgagtgatcactaagctaaatgatgataattacatgcctaaaatgagtaaaatacagtgttatcaaccctcccaaacttatctcttgcctgccctcaagcaaacaaaaaatcttaagttgaagagaggtttgaaggtggggattaaaaaatcgaagcatgcatatagaacgggtgagatcaatgtccaggtaggtaattctaggttgcaaggtgataggtccttacttaaaaacttaagccatactcgtcacaatgcaacctaacaaccgccttaatctattcaaacattcatatcaaccttttttccttcaacatttattaagcacgaacagtggatcaagcaatgcaatgattacgaactcatttggtttcgggcttaggctaagagacaaaaatggtccctctaatgaattggtcgagtaacaggggactctcatagaaaagattgagctttaccagaatgctagaatgctaaaggtaagaaccaacggacacatacaaaaggagactcccatatacccaatgatatatagtatgatagctcaaaagatgatcccagtctcttagatgtcctaactctacccttattctcattctttctctcttttggttcaagttctcaagggtgcttctttaaaacgattcaagagtctagcgggtttggttttaaactttggtaaacttaaggcttttcttttaaacttatagcatagaaggcgttttacccttttctttgaattacaatgcctaactctttttaagttccaaaccctttactagactaacactttctttggtattcccccttaagaactctaaactcttactctctttttttattttcttttcattcccattctcttttccaatcattccatacacaatcccaatcccaaatacaagtctccacctagtcctagctaacccaaaaagcgtgggctaggtctacatgaaagactactcttgtcgggtcatacctaacacgttataccaagatcactctggaaaagaactcacaatcacacacaaaatgatatttggcttgaaataaggttaagttcagggtaagggaaactgctctaaagatgagagccagctacttggattaacaaagggtggtgaagtgaataacataatccaagtatgtatatggtagccatgagttcacaaacaatgcatagacatgataattgcaaattcagttcaagttctattagatagagaatggcatcagattagcgagtttcgaatcaaagcagtatagtcaagttgtaaattgaaagcggggtgcagtcttacttcagagatacaatcggttatgcaacagagaactaataagctgggcattgaacttacttcattgaatttacatgctcaacggtttgaaatcatcattatcccctatgcaaatgagcaatcctaaatgcaagcactctatatacaattctaaaatgaaatgcaatctacatgacactctgtttttgtgaaatcattttttaagaaaatttcaatttttatggttttttctatgtcttagatgatgcaaaatttgaaataagaaaagagaacacaatgtcaaacatgtcttgaaccctcccccaaacttaaatttatacagtcccttgtgtaataaaaatatgagaaggaattcaagaccaaaacaaacaacacacaaagataaaaaaaaatgctatggtatatacaatggttgtggtggtgttacctcagcggtctggtgaagtagacggatacgaaatcgtccatactctcttgagtataagcatggactgatgttgaggcgggagggttttactcgtcttgtccagtcgagtagttggtcgagcgtgtggatgctcttctctgcctactctttggctctctcaactcggagatcacttcccgaggctcaaatgatgaagctcggggttgatcaatcctgtcagcccttcttgcagcagaacttgtgaaaccacttcttcttactttgggggtgggagacgggggccttggcttgctctggaaggctttgatttgagcagccatactcttcagcgacttcttcatggttcttatcttcttcttgaaacctttcattgttttgctgtgaaaattcccaagctcttcaagcacaccgagcttcttgtgaacttgagctatctcatctcctccttgatcagcatcttcttcatagtgagcttgctcgaattctttggtctcttgctccggttgttcgctatgttgctccaattcgacttgttgctcaaactcaacaagataatactcttgattctcatagtcagcttgagtataatctggttcatcttctctagctcctccgatgtcgatattcagggatatggcatgaagttgatgttgcgccttgtcttaactgaagtttggttctcgcaaggtaggggtaacaaagaaggtccaagctccggatggttgaacttgaagatgtagtgatccgccggagttgtcttgttaagataatcctttcccctgagataatcgaggtcgaggaacttggggaacatgtcaggggttcccaagtgtatccccacagctcctaggattggtgttaagagaccaccaacacaaagacttccgcgaaggatggttgcagcatattgtctatagctcaataggtggtccaaaagaacaatagtcagcgaagtgtctgctctatcacccgccatcttcctcccatccttggtcttcctcagaatgaagaccaaagcttgatcaatcatgcatagctcttctccaccaacaaatccggtagtcttctttggaaaaagggtgttggcgatgcattggtggaggtctctaatcacgggacttcgaattgaataagtcttgctcctggcgggcgagtagggctttggaccggcgattattgtccaaagagagagtagctcatcttggtcatagtcttggcggatttcctctccgcttggaaacccgaaaatagtatcaaggtggctgatatccaggacatactcgacacccttaaccttaaaggtaatgtaacagagacctcctctttcttctttctccgaatcctcaacatgaaagtggaccttgagggttgcaaggagttggcagcgctcctctttaaatcccccaaattggcagctcatgaacgttgcgagattggccaaccctattaagtattccacatccccacgaataccaatctcttgcattgtttccttatgagggtatctagttccctcaaacttcaattccatcaagtattgatagtactcgcttggggtgggctctctcttcctttttggccggtttcttctcccaacaggggctggtgtatcatccccgatgatctcaacctcttccttagaaactgcttcttcaaagactgcctcttcttggtgttcttccgcagcctcaacaatcctcttgcacctagctacttcttctctttgcatggctgagcgatttgaactttcccattgaatcaagcttgatctttgagcacagcgagcttggcgaatttggcgctcagtcatgctacccatgtcgatcactgaacttcttcgctatcaacaaaggatcttctagcccgagataaatcctttcttcttgaatccatggagtttggtgatgagcttctataggacaatcaggaacaattctccaagaggtatcaaagtggaaaggatttggtttttggtgatggagttttgagcttaaaaaccgattgaatatttgaagatggacttgggaatgatcgagtaagtttggtgaggtatggtgaaggtgagaacagattcttgaggattgatagggagagtttggaatgaaacttaattttgaagctttatgagagatagagaatttgcgaaaatgaaaggatgaaagagagaaggtttcaaaggtggtttggcgatttcaatgggtggaggaggatggtctttggtttcttttggaagggatagaaaagtgagttggaaacaacagtgagggtatgggtaattggtttgtccaccgagtaatgaagtgaagggagacaagtgggccactcgaccttactctttggtcgccgaatcattcacaatcgagtaaaggatcgagcatcccatgaagtgcgtaatactcgattagatggtggggaatgtttcactctttaaaacgctcgatcaaacggactagaataaacctcaagaagtcactcgatcaaacggtggggatgatttctctcatttggtcattcaatcgcgcggctcagaacactcctcctcattttactcgatcaacggtggagatcatcttttgacttggtttgagtttactcgaccgttgacttcctcatggtcaatgaaataaacctgaaacacttaaacaaaacatcaaaaataacaaggaaaatagaaagttatatacatggataaacatgtaacttcctccaaagtgagcttgttttaagtcactgaggttgactcttacagagcttagtcagaaaaaaggttgaagagaggaacatagaagtcctcatcttcagtggttgagtcatactctgcatcctccttgacatatggtaggatgagtattcatttgacttttcttcaaaataagcttccttttgatcagcagagtagtcttcctcttctgaaccaggttcctctaaccaatcctcaatttcaaaactggggtaacttttaaccatttcttgaagttccaagattgcatggtttagttcttccatcttgtaggttagctacccaatggtatcttcctgagctttgcattctatcctgagttccagaagttctccagtaatagagtcaagtgtcaaatgttcttccttagaagaaggtttactaggcattttaggcactcttggaaaataagtcggaatagggatttctttctcactcaacaagtcatcctctaagctttcttcctctgaatgaactcctttatgatcttctggtgcaaaccattatgttgtgaaatcatttttctctttgatagctagtgcagtttccatcttctctggatcaatacccattgaatacttattaactccttttcaaaaacccatatttgatctttcagcttcatcacccttgacgataacccctctatgactctgctttgccatttatttttttttctcatctcctgctagtcatcctctaaagggtcttcagtctgagctaacccttctatggctctcttcttgaggtcaaaatttttctttagcttgctgaattgagaagtgttgttgaatcttgatgggattcgagcttctgtttcttcatcaacatccatgccttggatcccaaaattccgacctcttgttgttgatgtccctgaagctttgctgatgtcaaatttcatcttgatgcctttttcaaggttcaggatgatctttccattattgacatctatgactggtcttgtagaggctaagaatggtcttcctagtatcaggagatcctttccctcttcatttgtatccaacactacaaaatctgtaggtatctcaacatttccaattctgacaggaagatcttctattaaaccatgggggggggggtccaatagaaccatcaactaagagtaaagctaggttgcagatcttgtattccatgatccctagcctttgagctgtagagagaggcataaggctaacagatgctcccaaatcatagaggtacctattgaatgtcaatggtcctagagaccatgaaagagtgaatgaaccaggatcatctagcttttcttggatgactttttcttgtaagtttcttgagtgatgacactactaatcatctgttgattttgatccttcttgagtttttctactttgaaaattttcccagaatggtgagtatccagcaaaggtgtgtgctttatagtccagatgaaatgctggatggcaggtgcagcaatttgagttgaatcccccctttcttgaatcatactgtcctcagtattgggagtctgatgacatggtggagactcatcttcttgttgaatggttatagcattagcagtagcatagtccttaggattctgaactgccttttctggaagttgttgaggatgtttcggagcagaggtggatgcaaactaactctccacatacttgaacttggaatttagagcttcaaacttgacatttagatcactataagaacaatctatcttgttgtgtaattcagttatcttcttttcaaaagccatagctccagtagcttgtccttgaatgatctgttgaataagttgcttaattcaggatcttgtgctgctggggcttgttgtggttgttgagtgaaccctggtggtggattctgctgttggtatcctccattgaactactatttagggacataaccttggttgtactgaacaaatggcttagactgattctgttgtggtggatacacttgatcttgggggttagctacattagtgctcttcagtttgatcattccccccttcttgcatttggaaatgctcttcatcagtgatatagtgtatctgcttctgctgagccagcaacagtttgtctagcttttcattcagggccttggtatcctttctctgtctatcttcagtttctctagttcctcgcagtgagcgatcatagtcttcattgtagcacccatcagattgtgctagattttcgacttactcccatccttctgctacatccttgttcaggaagtttctatttgaggcagtgtcgagtagcatttgaatctttggtaacgctcctctatagagtgtgtcaatgatgaagctttcttaaaaccgtgatgtgggcacagagtggtgtagcttttaaacctctcccaagcttcacagaaagtttcattgtttttctgagtgaagcctgagatctcgttcctcaatttagctgtgtgagcattagagaagaacttggcaagaaaagctttcttacaatcatcccatgagttgatggagtctgggggcagagtcttctcctagtggtgtgccttgtctcccaaagagaagggaaataatctaagcttaaacccatcttcagtgacaccagtgatcttggtgaggctataaagcctatcaaagctatcaagattggccaggggatcttccataggcaagccatgaaatttgtttccttggatcatggagatgagaccaattttgatttcaaagttgttgttctgaactagtggtggcactatcccttgtctttggtgatgatttcttggggcatcaccagcaccaatgtttcttggttgttcaacattaggtgggtcttgtacatcaactggtctgttctgttgatccataacagctggtctttgctgatcacgggctgcttttgtttcggtttcttgtaactcacgagctattctgtctatcctgtctttgaaaggtagtaggtgtgcagaacctttggaccgggtttgcatgcacaaagattagtacctgtaccacaaaaacaagcaaacgaaaagatgagttagtaacttgagtaatgtaaaagaatttgatcttaagttttttcttatatcttaaatgtaacaatgcaacaatgaattggcaacggcgccaaattgataagtagatttttacgcctacttatatgctgaagtgtggttcggttcaattccccttaaacactaacatgtcgatgcagctatagggggtgtcaatccagtccacgtattcctagcagtcaagatgtgaacataagcaactaagccacgccagattataatgatggtgggtttctagtaacaatcctaaatcaggattcaaacaacaaaatgagaacttaagagccctactcgatcattgggtcgagtagaaccaacaggtgacaaatttaagaaccaaaatgcaataaaaggtaactcagcaagatgacacaaataacaggtaaataaaagtgcaatcagggggtgaatacaaataaatctaagaggaatagaagtcctaaggatggattcattggtaagggcaactctagggttcatcacgtggctaacatacgaaattcaaataccctagacgatagattcaaaaccagatcaatccactctcgtgacagagatcctcataacctcaccacttcctaatctcaactctcgatgatcaaacatagcaaggcaagctttaagtaacaatctaccaaagtcaatacgcagtctaaacatccaatctcttggggtagaatctacaaatctcttggaattcgtagatcatgcatccatttgaatgtctttgggatgttggatacgtagggtcgaattcccacattagccagtgaaaaccgcataggagccaacgaatccagaagggatctaacctaatcttaaccacctgactaacctagagattaccctaatctgatccatcctcaagaaccctaatcactactcaagcaacataatgaagaacacaaacccaaaaattactctaaacatatcaaaatgtagatctaaacaagataaacaactttgctcaaagaactaaatgcaaaaacgaaatagattaagagtaattaaggtttcaagattctaaaacacaaataaaactacagaataaaagcttgatcctgtggacaaagcccaaagaacctatttatactaaaatctcgaaaaccctagattcactagaagacaagagacttgaggcggtttggatggatgctcgatcttggggatcgaataaagagggtgctgcaaagtctgcgcctttgcctacatgctccgagtgatcaattggtcgagtagttgcttcttcctctcctgttcttatgctcagttgtctggttgggtggggaatgaagaggatctgaagacgctttgaacgatcaacaagtcttgtagagtagattgcccttgatcgagtaactggtcgggtagaggatcgagtaggggatcgagtagattctgttgcctcccctgtagctgccttgatcgagtaaactggtcgagtagattgctctgctgcttccctcctggtttgatagagttgagggtcgagtagattccttgtaagctctttttgcatctgaaaacacaccaaaacatgcaatatgtatgcaagatgatcctaaatgcctaagtgtgcaaaataagctacatgtgatgcaaaatgatatgaaaaaatgagtgatcactaagctaaatgatgataaatacatgcctaaaatgagtaaaatacagtgttgtcattgttcgacacaacgatgtgagggttaacccagactctcatatatatacttgagtaaagacgcaacccttcaatatccccctcggaagttacgttataatataacaactgacttttattattttgtaaatgggccgcttttagtaagtggttttttttagagctttgtttgatattactagtatttccccatccgaaactaataattacccctataaccatggttcgtttccgaacaggagcacccaaaccacctttactcttttttagaaaatcaaaaaaattaaaccctaatattttgagatattttcgaccgattgttttttgtacccgttaagattttgcgatatctctccccttctccttagaaaccaaagaaattagcctcaaacatcattcccaatttaaaatcaattaatcgattttgttcttctttcattcttgtaacctttaagatatctcagattagagatgccgcctaagaccagtggattggcacgaaaaagaaagagagtaccgccagctaagaatgagagagataaggtaatggctgaggagcagtcaccgactcaaccggcggtaatgttgttgccggctccgccggctcgaacgacttcgacgacgacggttactacggctccaacgacagcgatagacgcgacggctccaacgatgcctcataagacgtgatgcttgaggatgatacgttttatgatgctttagagaaaattcccagaagaaatttaaaagaatgttctaacttgaatggtggatgagaatgaaagagaagcatgtgaaaaagaagaatcattgagtagtagccgaaccgtgggctctgattccaattcagaggagacgaatgcaaacgatgacctctcgtttgctaatcctgtggacgaggaggatgagagagacgatgaagtcatagtgaataaatccctagaggatgagagaggcacgaacgtcataggggaaaagctcgtggaggagaggaccgtaaacaaggacatcccaatggcgaatctcatggatattgtaagtattccaagtaaaatcccttgaattgggtaataatataattgtgaactgtggaaagtactagtaacaaaactgaaatactaggttgatatctaagaaatattgtcggaagtgggtaatactacaattgtgaattgtggaaaggactagtaacattggaaaatacttgcagattattgagatatacagaataatactgttaatgtgatttcatgtagtactggtagaacaatggtagtaaagataggctgcggatgggggtcctttatttcttaacaagcattattgtcgtgcttactaagaccggggagaagggcagtccagttgataatttctgtttaagggctgcaagtgatctgacgtttagtaagacttttccttggcggaggtattcctttgagttcatgttaaaaccgatctcacacacattggatcattttaatggtagtgtcccgaacattcagtcacattagcctgttcccgggttctgtattccacttgaggtaagttacatgttttatcattgttacaatttcgtgtttaatcgaagataacattaagatttgcatatatgattttgtgtagtttttagcattggaggcaattccatcacttagagaacaattcatagaaaaaaaggagggtgcatataccggttgttcaaggatgtgcaaggtgaatttcaaacggaccgagataaaagggtttactctagagcaaattaacaatgtcttggatacaactgaggttagtattcctagtattcctacagttaatatcaggattttatgtatttctaatattcattgtttattatgtccgtaggtcattgagagtataataaaacagaagttgaagaaatacctcttttggctcaaataacaggagtagaggatgatgttgataagcatgatgttgtagttgatagttggatgaggcgtattggtgaagggcgtgaaattagatttgaagaggtgtacaacgaggatgtgcagacccgtactaaagccccaactgaagaggaagttcccgcagttgttgggcccggacacctgacgcttgttgatttaatggagaagcttgatagcatcaatgacaagttgaatgaagcttttgtagctcttgcagatatgtagaaaaaacatgcaacgttcgaagattttatgaatgacatgaaagctaaggtaagattgggagataccggatatactataccatagtttgtaataccacgtaataggagtgacaattacttaatctgttttatagatgcctgcgaacccaccacaggagaatgatgcaacatccaaggacaagcctgctgctcctgttgtgaccaagcgagtgacccgttcaaaccgtccaagctctagtttaatgtaaaaactaatcctataacccgggccttattttgatttcttgtactttgaatgtggtttcagattttgtaataactcgtaatactatgtttggatttattaatgtattaagattttatatgatggaattatattgaaatccaggaaataccttgtaatactacgtttgagagaaatccgagaaatacctcgtgctaccactacaagaaaacagacaaacaacgactacagaaagcgacaacagatgtagtcgtcgtttttggcgactacgtcacgtccgttttacgacgcatatacgacaacatgaacattagtagtcaattagtcgttattttacgactaaatatgttagtcggcatatactcgtatagtaacgactatttaacgattatattatagaagaaaaacgtttgtcgttacatagtcgcaaatggacgacaacattttccgactgcggttgttagtcgcccaatcggcgactaacatacgacacatatctgtaatcgtaaaatagtcgcaactgagtcgcagaatagtcgcattaagttgttggaaaacgttttccgcattgccaagttggtacacctaatttgtttgttgtagtcgtaaattagttataaaaattcgtctatataatcaaaattcacgacactcttctttcgcaaacaaatcaaaacaacaatcaaaagaaaaaaaaaagaaaacaatagaaatttagtttattctataatggcgggaaactacaattatggcggtagtggcggtttctatcgagattggatgtacaagagattcgatgaagtgacggggaatttgtcagccgaatacgtcgcaggagttgaggaattcatgacattcgctaatagtcagcctatagtacagagttgtcgaggtaaattttattgtccttgtagtgtatgcaagaatgaaaaacacatcatctcgggtagaagagttagtagtcatttgtttagtcacgaatttatgcctgattattatgtttggtataagcatggagaagaattgaatatggatatcggaactagttacacggataggacgtattttagtgagaatcatgaagaagtaggtaatgttgtagaagatccatatgtggatatggtgaacgatgcatttaattttaacgtggggtatgatgataacgtgggtcatgatgataactatcatcatgatggtagttatcagaatgtggaagagccggtccgtaaccattcaaataagttctacgacttgttagaaggtgcaaataatccattgtacgatggttgtcgagaagggcagtcgcagttatcattagcatctcgactcatgcacaacaaagcggagtataatatgagtgaaaagttggtggactccgtttgcgagatgtttacagcttttttaccagaaggaaaccaggctaccacttcacattaccagaccgagaagttgatgcgcaatttaggacttccatatcatacgattgatgtttacaaaaacaattgtatgttattttggaaagaagacgaaaaagaagatcaatgtcgattttgtggtgcacaaagatggaagcctaaggacgaccgtcgaagaaccaaagtaccatatagtcgtatgtggtatctacctattgcagaccggttgaagagaatgtatcagagccataagacagctgcggctatgcgatggcatgctgagcaccaatcaaaggagggagaaatgaatcatccttcagatgcggcagagtggagatatttccaagagttacatccccggtttgctgaagaaccccataacgtttatctcgggttgtatactgatgggttcaatccatttggcatgtctcgtaatcattcgttgtggcctgtgatcctaactccatataatttaccccctggtatgtgcatgaatacagagtacttatttcttaccattctgaattctggaccaaatcatcctcgagctagtcttgatgtcttcctccaacctcttattgaggagctaaaagagttgtggtgtactggagtcgatgcgtacgatgtttcattgagtcagaattttaatctaaaagcagtactactctggacgattagcgactttcccgcgtatagcatgttatcaggatggactactcatggtaaattgtcttgtccagtttgcatggaaagtacaaagtctttttatctacccaatggacggaagacatgttggtttgattgtcaccgtagatttcttcctcatggtcatccatctcgtaggaacaaaaaagactttctcaaaggaagagacgcttctagcgagtatccacccgaatctttgacaggggagcaagtttattacgagcggttggctagtgtaaatccacctaaaacgaaggatgttggtgggaacggtcatgaaaagaagatgcgaggctatgggaaggaacataattggcacaaagaaagcatattgtgggagttgtcttactggaaggacctcaatcttcgacataatattgatgttatgcatacagagaaaaattttcttgacaacatcatgaacactctcttgggtgttaagggtaaatcaaaagacaatatcatgtcaagattggatattgagaaatattgttctcggccaggcttacatattgatagtacgggtaaagctccttttccaccgtataaattgacagaagaagccaaacagagtttatttcaatgtgtgaaacatgatgttagatttccagatggttattcttcagatttggctagttgtgtagatttggagaatggtaagttttcaggcatgaagagtcatgattgtcatgtttttatggagcgactacttccatttatctttgctgaacttcttgaccggaatgtccaccttgcattatcaggtacaattctaacaattttttatggaagaattttttttatgtaattatttaacttccacatatattttaggaattagagcatttttccgggacctatgttcgagaactttacagacaagtcgcgttcaaattctcaaacagaacatagttttaatcatctgtaacttggaaaagatctttccaccatcatttttcgatgttatggaacatctacctatccatctcccatacgaagctgaattgggtggccctgtccaatataggtggatgtatccatttgagaggtttttcaaaaaattgaaaggaaaagcaaagaacaaaagatatgctgcaggctcaattgttgagtcatatatcaatgacgagattgcttatttttcagagcactactttgccgatcatatacaaacaaaatcaaggtaaatacctttatttatttaacatgttgctatactacttcgatcttaattcaattatatgtgacaggttaacaagattcgatgaaggtgaagttcctgtatatcatatccctggagtacctaacatatttatgcaggtcggtcgtccaagtggtgcaatgcatgtagaatggctttcagagaaagattaccaaaatgcacatgcatatgttttaagaaattgtgactattttaaaccatttgagaggtatttttaatcactttgatttattcatagataagataactttgatttatttgtcttcgtttgttgagacagtatgttcgaggattatctttctgcgaaatatccatccttgtccgaaaaagaactctacgttagaagagctgaagaatatcatctatgggttaaagaatatgtaagtctactgtaattttggttcatgaatgtaactatttgtctgttttcttgtagctagcgtgatttaatttaagatcatattgatattgtttatctatattatgtaggtaacatattggaacagtaattctccatttcctacttgggttcaagagattgtgcaaggacctttgaacaaggttaaaacttggccaatgtatttcacaagaggatatttgtttcatacgcaaacccacggtgctggacgaaagacatgtaactatggggtatgtgttaaaggtgaaaattacgctgattcatctgatgaagcagatttctacggtaccttaactgatgtcatagaactcgagtatgagggcatcgtcaatttgaggatcacactttttaagtgtaagtggtatgatccaaagatcgggagaggaactcgccgaaaccatggtggcgttgtagatgttctatctacgaggaaatacaataaatacgagccatttattcttggtacgtaattaagtatacttaaaatttctaattcattaataaatactattgtatatatttttgttgatatatgtataacatgtttgaacagcatctcaagcagatcaagtttgttatattccatatccatatacaaagaaaccaaagaacatttggctcagtgttttaaaggtcaatccaaggggaaacatttctggacaatatgaaaatactgatccgacattgttgcaaaccgaggatgatgaagctgttttgcagactacaattgaagatcttgtaatagactatccggtagcagacgtaaccccaatcatcctcgattacgatattggagatgctgaaccagaagatgaattccgatgtaatttatcgtcctcggatgaagaagaaatagaagacgaagatgtataattaattatttgaataaattttgtaatatacgatgtatttgaataagtatttgaataagtatttgaataattattaaaaaattattaaataattttaaaaggcataaggtgacgaaattacgactattatgcgactaactcaggtggtgattaatatacgactacacagcgactatcttgtaagctgttgggcttcgaaatcacaaagcccaaacccaacttaagtggtgacaattatacgactacacagcgacacttgtgtatgttgttgggcttcgaaattactaagcccataacctaatttacgtggtgacgattcggcgactatggggcgacaactttgtaagttattgggcttttaatcgtcgaagcccaaacccaattgatttagtgactattatgcgactgatatacgactactccagtgttgtaaaccctaattcgattcatttccccttcattccaaacacttagccacttcttcgattcttctcttcttctctcttcttcttcttcctcgatcttcttcttcctcgatcttcttcgatcttcttcttcttcttcttcttcgtaaccctaaatcgattctcttcttcttcttcttcttcttcttcttcttaaccctaaatcgatccgtctttcaccaacaaaccctaatacatcgatccatctcgattctctcttcttcgattctctcttcttcgccaaactctcccttgcctcttcgatccatctcgattctctcatctccaagaggatgcctaacgccggtcgtggaggatctcgaaagaggaagaccacaccaaacgtgattcaaagagccggaggttcaacgcctgctggaagaccctcttcgctaccgcagcagtacgatttcaccccggcggcggcgacggttcaagtttctgcatcgattccgcctcaaggagccggcgctggcgcctcatcctctgccccccactaccgtaactacccaccaccgcagcaactcttccaacactccaccaatcaaccacagcgtgtagatccgttgccaccacaagagactgctcagcaagaccctcctctttcgccggatccagaaactgcatctcacagtcatccctcgtctcaaggcaacaacttccaagagggcattcctgcagtgttgccggagctccaagaagactccgtggttgctctgaatgacattctctctgtgcctggcagagaagcgtggtgttgtgtgttgtctcccattccccggccaaaaaccgaatggtaagttcactttaaattccctgttttcttgttctgtatactctattgtgaatcaaaccgaaaatgtgaaccttgttggctgttgtgttgtgaaacattgttggctcttgtgttgctagtgttttcgggttaggcatttagtcaagtttagttctagactcattagtttatgtagtaatgcctgttttattgttgtttgatgctctgttgtgaattggtcaaacatagatgagtgttgtgttgtgattacattagttcttggtcattagtttagttcagttctaaactcgtgttatgttgttctatattacacaaatgatgatgctttgattgtgaatgatgctatattgttgagacagtactattgtggaacatagtttatagtcgtgtgtgacttgtatttcttttgggaacataactttgttcacttttgtaacatgtttacttctttctttgttggatttggaatcaaaccaaaaatgtgaaccttgttggctgttgtgttgtgaaacattgttggctcttgtgttgctagtgttttcgggttaggcatttagtcaagtttagttctagactcattagtttatgtagtaatgcctgttttattgttgtttgatgctctgttgttaatcggtcaaacatagttgagtgttgtgttgtgattacattagttcttagtcattagtttagttcagttctaaactcttgttatgttgttttatattacacaaatgatgatgctttgattgtgaatgatgctatattgttgagacagtactattgtggaacatggtttatagtcgtgtgtgacttgtatttcttttgggaaaataactttgttcacttttgtaacatgtttacttctttctttgttgcatgtggttggaggtttactcgagacagaggatctcgcttggttaggaagatcactagaattttcttacaaaaattcgatgctcccttctataactggtcatgtgtgccagttgataaaagagaaagattatttttagagtttgcggtaagcttcctctatatctgcacttgttcaagttaagtttatgtagtttcactaacttcttccttttttttgtagaaaactcaccactgggatcccttaataacagggacagtccagtattacttcaatgagatcgtcaagaggcgcttgaaggacatggttagcaccgcaaggacaactcgagagcagcctccatggattggagaaacgctgtggggaacaatgtgtgcttactgggacacagaagcagcacagaaaaggagtcggacctattccaaagctcgtctctctgaccgtaacggtatcggtcctcacgtccactactctgggccaaaatcttttcaagaaatccaagatgaattggtaagtgtttctgcagattctcataagttagagttttctgttttctgttttcaatccaatatagtctgttttcttgtgagtatgttgagttcttatgtctagtgactactgttgatattgatttgtgtttgcaggaagagaagttgggaagaccggtccatcttggtgaggtgttcatcgaaacacacactaagtcggatggctcatttgttgatcagaagtcggagaagattgctcaagcttatcagcagaatgtgagagataggctgtcagcactagaggcgtctgcttctgctgtctctgatggctcttcacgacctccggagctcacactagatgattatacagccatctttctcgaggtaagatgttttagtataattattagtcttagagtccaatttaatattctgtcactaatgagcttcttctctatttcttgcagtccacagaaaatgattcaagaggcaatccttatggactaggatgtctaaaagacactctaggcagcgccaaccgccatcactccggttcctcatcatcctttcaagccctagaagaacggctgcaggaagctcaaaggaaaatagaagagcaggctgc

SEQ ID NO: 524 - DNA, 68251 bp, Arabidopsis thaliana
tgttaaaagtatatgtaagtggcataacgaaatatttacaaggtattttaaaaggattttcaaagacgttttaaacaggcttttacaaaatattttaaaaaggtaaattattagaattactattaaaattacttgtaaagtttgatagtaattttagtaaacgacttacaagaaatttaaaagattcaagttaaaagcttgtaaaagtgtttaacttgatttacaatcgtttaaagtatatgtaagtggcataacgaaagatttacaaggtattttaaaaggatttaaacagacgttttaaacaggattttacaagagattttaaaaggtaaaatgttggaataaccttcaaaattacttgtaaaagtttgatagtaattttaacaaacgagagtaataacacgacagaatgaaggaaaaattaaaaaacccaacaatattcaattctctggagataaagatatatctaaattgcagcaacacaagttgatttgttgtgacccgactgaccacacctactgcatttgtgtaattttggttttggctgagaccttccatgctcccaaacagaaggtatcctctttttcttccgtctgccactaggtacacgagtagaaggtgggagacaaataacttcactaacagtgtctggaatctcccaatattccatatcaccatttgggtgaatgctctctgaatatgcttgacgccacctgtaaattacagcaatgtaaactgagattaaaaccacataaacacagataaaaacataaaaagagatattaaaacatttaaaaacgcctgtaaagttgttaagaatagagataaaacctgtaagtagaatgaaactcatcaacaaacatgtttttgttcagattgatatgtttagcagaagcaattccatgtgcgtagggaaatttatcaatatcaaacatacagcatgtgcaagtccttttgtccagattaaccaaatgcgttttggtatctccttttacctcaaactcttcttgattaacttgacaaacctcaagccatcgtgttgaagtatcatatgacgctttcattttcttccctacatttatagtaacagcagacggatgttgactactctcttcacgtcgctcattaaaccatcttgtcataatagatctgattgactcaaataggcaaacaatcggatactcgcggttctgtttcaacaaggcattaacagattcagctagattagatgtcatgatgttgtaccgatttgaaggagaataagctcgagaccatttcctaacatctacctcccaaagatattgtgctaactttttatcactattagtgattttccagaacaaagaatcaaattctgtcttcgtgtaaactctagaagccgcatagttaactggaataagtgaagaacctctgaaatgggtttccaagtttttttgcaaatgaaaagtgcaaagtccatgatgagcaagtggataattctctgaaagtccgcttgcaatagaagcagctcggtcagacacaaaaactaaatcattctcatcagggattatattcagcaaacacttcaaaaaccagtcccatgacgcgtcattttcagtgtcaactattgcaaaagcactaggatacaaattaaaattcccatcctgagctgaggcaccaagcaaagtccctttaaactttgatgtcagatgggcaccatcaatagatatgacttttctcatcaacttataacctctaattgatgcaccaaaagccagaaatgcatacttaaacttattagcagactcttttttttaaaaagtgatagaacctggattcgtcacttgtaccctgtggaaccacctcggtaaaacctcaaaactatcatcaggtaaacccctcgcaagttctactacatgttcttgaactctccaagccttcgaataattgatcccaactccatgatcttttctaaatatttctatcaactgtttaggtccgaggggaagctttcctccttcaagatggttacttatcaatcttcctaatgtccttgcaaatgcttgacgatgactaacattccttaatgaagagtcacaactgtgatgactaacatacttccgaataacataactctcggatccaccagccttagttgcacgtagtctccaactacagttttcatcaatacaatgaagaacatacctagtgagatctgatttcactgtatgaaactcaaagctgtgcttcactgcaaacatccgcaacgtgaataccatttcatctttgtctttgaatttttttccaataaacaaagaatcagcatcacttagaccagttgaaaacgcagaactagaatactgttgatcaaaaatactagatgtttcagatacacacgcctgaataatcctagaggttaacctcggctgccaaaataaaaagcttaccttaaacatcaatctatctttaataatgattttacaaggatttttaaaaggggtttaaaaacgttaataatgattttacaagattttttaaaaggattagtacctgagtagtagatgtagaatgagaagcaaaatgatttgaagtcgtctaagcctgtaataaacacaatcactgacttaataatgattttacaaggatttttaaaaggggtttaaaaacgttaataatgaatttacaaggatttttaaaaggggtttaaaaacgttaataatgattttacaaggatttttaaaacgattagtacatgagcagtagggagagaatgagaaacaaaaggatttgaagtagtctcagcctgtaataagcacaatcactgacttaataatgattttacaaggatttttaaaattataacacaagaaggttattgaaaaatctgctcaactgtcacagaaatttgctctacagtcaaacataactgaagcaatcctccactctgtgagaatttgtgcataaaagttgcaagctgtctatcgtttctaatataaagaggatgagattgtatggttgtagatgtggagactaacttgtaactaagcttcaaagaattggttgaactatctatttgaaaatcctctacaagaatatccaccaacgcgtgataggtaatgtgctcatcaatgaccattaaagaagctcccaattcaatgtctaattcaaattcccaagtcatattgtttgtcaacttccacaagccacaaacaggatacaattctagcattataacctgataagataaataacaacaatatcaacacccataaaaacactgtcactacagagagaagcatggtttacaaatcgttttaaagcgtaagtaagtagcatagaataatttacaagggattttaaaagctttgaaaagtggttaacatggtttacaaatcgttttaaagcgtaagtaagtagcatagaatcatttacaagggattttaaaagctttgaaaagtggttaacatggtttacaaatcgttttaaagcgtaagtaagtagcataaaataatttacaagggatttaaaaagctttgaaaagtggttaacatggtttacaaatcgttttaaagcgtaagtggcatagatctatcacgaaagcatatgtaaaagaggtaaacactaaatcagaaccaaaatctattacgaaatagtataacgaattcacataagcaaatctatcacgaaacagtataacgaattcaaaaggtattaacgaatttacaaggattttataaacaaattcaatcatcaaatctcaaacaaaattcaaattcgaagctgaagcaaatgtcaaactgtcgattgaatcaggattcaaataacgaattcacataatcaacaacaaaaatcgaataaatcaattcgaaatcgaagatttaagctaacattataaaatcaaaccggggaaacgcaagagattcgacggcgacacacagctctacttccgacggcgaagatgggttttcacggcgagtaaactcactatttccgacggcatgggattcaacggcattcacaatttccgatggaggaagaagagagagagtgaagaaatgaattaggtctgtgggtagctcattaaaggtaatttggagagaaaagtattagaaagggtagaaatgaaaatgggaaaaagggtagagttgcaaaagggcattgagaaaagggcattacagtgaattattcttaaaaataagtatataactgtttgtttagcaagctaacatatataataacgtggtaaatttacatattatatgttaaataaatgtttatctacttaaaattatgaataaatatttttatttatatatatatcaacaaaataaaatacatcatgttacataattaacatgataacgattataacaacattttacatagaataataacatgctaacatactaaatatcgaaataatatttgtctcaacacggtaagataatcgatatatgaataataacatggtaacatactaaaaatcaaaataatatttgtcttaacacggtaagataatcgatatatggataatatttatttgaacgtactaatgttttagttaaggtactaatgtttcatccaactttttatttttagtttaattaatttaggggtataagtgtcataaaattaaaacagtagaagacaacaatgttttttttttgtcagttaattatcagttcttctgggtatagataatcatattacccaaaactataacattagttacttttattccaaatatatatgaattactaaataagtctagtatatttggatttataattttaagggtttgttacactatgaggcactttcggagaaacttaattcactttagacactttaaaaactagaggcactttgccttgcttttggagtgaaataagacatatatacccccactaattcgtttgagatatttctacaaaccggtttatggtttcgtttggtattggtctaaaatatacggttattatggtcggtttagaaaaaacagtttgggcgtgacgacgatcgtcggatttcagtaaattaaacggccgagattaatcattgtaacttcccttgcttttcgactttattcaaactgaaacacgagatccattgaaacacataagattctgggtttcaatcatcgatctttggccaactgtcgtgtccaaggaggtacgattgtagaaaactgatatcatgatattaaaacgaaatttcgtgcattctatttgttacgggaatcagaatataaccaaatttatttttttcgtttatctgtacagggatcgatggacgactatatcatggttatatgtggagagtggttttgttcttcgactggagagtggaaattggagatatgtaaccaacttttctcaagggttgtaccaattcatgagggaataatattggttgcgttgaacgaagcaattctgcaggagtttggcgtcaagggtttaaatcctctgttaagttactctgtaccgaataagaacatgtttgcaacaaaggataagactccaccggttctggttacaagcgagattggacttcaatactatctaaacacccttagagaaaacaggggtctaaacttgtttgtgaagtttgaagaaaaggttgatacaccaaatttgagttgtgaaacgccaggaagtagtgcaaaacgaaaagttgaaagtttgtatgatacaacaagtggttcgagaaatgctgacacaggttctggggatatatcttctggtgtttcaaaatctcctaatgttccagtgacccctgtagatgacgaattcatggatgcattacacgatgcagaagaaaaaatagcaagaagcggtgggctgaaatctaacgaagaagtaattgttaatgatgaagatgacatattcgtggatgacttatttgtggacaacaaaacagaggaaacagaagacgggatagatatttctgatgatactatgccctgtggcggatatgataaagagttctggggtaatttcctgtcggatgattatggtggctcaaacgctgaagagttgatgtctaagggtggagtagatgcaaggtacaagggaaaaaaataataaagacgagagttttgaggatttaaatgataaggtaggcaccagtgaggataaagttgttcagtgcacaggtagtggtgtctttgaccatgctgtgtttgtgagtggtggaggttcaggtgtaaacgcagagaaggtaaaaacggaatgggctgcgaaaactaaggttggttgtaaagctgggagctctcacggattgagaggtggtgcaaggaagttggaggaaattgatgatgaggagtttgatatcccaccattatttgaagacatcgagtatgaggtagagaacataccggatttgggtatagaggatgatggcaaagggatatacaaggggaaagtgtatgcaagcaaagaagattgccaaatcggtttggctatatatgcgatcaagaacatgtttcatttcaagcaaacaagaacaaagtggaattattttgttcttagttgttcagatgagaaatgtgattatagaattttggcgacactcatgaaaggtactggctactatgaaattaagaaagcaagtctggatcacacatgttcgttagatactagaggacaattcatgcagaaggcaacatctaaagttattgcatccgtctttaaggctaagtacagtgatcctacgtccggtcctgtcccgatggatctacaacaactagttctagaagatttgagagtctctgcgtcatatagcaagtgttggagagctagggaatcagctttaactagtgttgccgggagtgacgaagaatcatactgctatctggcagaatatttgcatctactgaagctaactaatcctagaacaataacacatatagaaaccgaaagagatgttgaagatgagagcaaagagaggtttttgtatatgtttttagcttttggtgcctcgatagcaggatttaagcatctgagaaggatattggttgttgatggaacacatttgaaaggaaaatacaaaggggtcttactaacagtgagtggtcaggatgcaaacttccaagtctatccacttggatttgctgatgtggacagtgagtgagaatgacgagtcttggacttggttctttacgaagttggagcggatcattgcagacagcaaaactctgactatattatcagatagacactcgtcaatccttgttgttgttaagagagttttccgcaagcaaatcatggggcttctattattcacctttgtaggaatgtccaagctaagtacaagaacaaagctttgacgcagttagtaaaaaatgcaggatatgcgtttaccggtacaaagtttaaagagctttatggtcagattgaatccacgaacaagaattgcggtaagtatctacatgatatagggatggctaattggacaaggcattatttcaggggacagcgtttcaatctgatgactagcaatatagcggagaccttaaacaaggcattaaacaaaggtcgatcgtcacatattgtggagttgataagatttatcaggtctatgttaactagatggtttaatgcgcgtcggaagaagtctctcgaacataaaggtcccgttcctccggaagttgacaagcaaataacaaaaaccatgttaacaaccaatgggagcaaggttgggaggatcaccaactggagctacgagataaatgacatgttaggtggaagaaatgttattgatcttgagaagaagcaatgtacttgcaagaggtatgataaactcaagatcctttgcaatcatgctttggtggctgcgaatagttttaaaatttcctacaaggctttagttgatgactgtttcaagccccacgcatgggtttcgagttaccgggaagcagtattccctgaagctattggaagagacgaagaaataccagaagagcttgaacaccgatcgatgttgccaccatatacaaggagaccatcagggaggccaaaggtagccagaattccatcaacaggagaatacaaggtaaggatttttttttgctaaagtagtactttctaattgattgttaaaacctaatgcataatgtggtttgtacatggtaaatgtagaaacctaagactggaaggacgcatcagaaccggtgcttgaggtgcaaaggcatgggtcataacaggacaagttgtacaaatccaatttgaacaagttgttacggtggatgactttgagattgcaatttaggatattaattgtttttcttttgtaatgtaatgcgtaggtgtaaaacatataaatatttattgagtattggatgctaattaggttttttatttatactgcttatgttacaccagggacacgcaagaatgtcgcagaaaaggtacaagtagatgaaaatcaaatatttctgttttctatccaaatatagttgaccatcagatcatatccaatcgtttgattcaaatagatctatttgtaagattagttcgatttacatgcttcaatattgtaagataccccaatcagttatatgttgaaaaattagttattgtgagcaaattattttcagatcatctcagatttaaaaaatggaattagaacctatcagccatgtaaacaaacatcttttcccattatattcctttttaaaacttatgcaattgccaaatttctgctaaaaaacatcgtaatgtaaaagtgcatgtaaggttagaagtttgttggttctgaataaaaaatgtggacatttattgagtcggataatatagaatagagaatatcgactaatacatgtgatttcatattatatagcttagttttaaataataaaaaaatctttaaaaccttggtaatgaaatggatgtctctgaatatttacatgtagataggaaatgaatatttatatgtctatccacacaccccagaccaatcagatataaccaatctttagtatttttggaattagtatagtcggaaaattttgttatgcatgctccaaaatcgaaagagtccctataagtcatgataaacgagaaagatgttcactagtttatacgttaaatacaagagagaaatacaacttcataataagattacattaataaactagataaaagagggaaacaaaagagatagttatatactgaaagtgggtaattgatgtttttaaataaactaggaaagcaaaaggatgtctctgaagaggaagaagtagatgcaatgtgaacatctctcaccattatattcgttgtaaaattcatggatgagccaacagtctggataatcctcataatggaagagctcagcgtaagatccgaatcgttttggttccgaatcagaaatgtggccaattagtgtcttggccatgatatctacatctgtaaaacacttgttctctcgtttgaaagtattaaacgcgtctaatacttcattacctgcgcagcggtttagagcaatgtaaagaagtttggctataggaatgacatctttacaatcattcaatattgaaatggcgcctatcaggtcaagagaacagaaccctagcctcaagctctggagatacatagcgtaagggtttcgttttgcaagacattttgagaagaatgagaagtgaacagagtcgggcgaagacatgttgatgaagtcagggcttttatctaaacgaactcgggatagtgtctcgacagagaaagctgcagatttcccttcatgaccagatttaatccagtttttcagagcctcaattccttcttctgaaacgtggctaacaattagtgcgagaattggttccggaatatataatcttgcaatcttcctctgttgacaacgcagacgaaaagttatagaagttacatatactttgtggaatgaatgtaaactatattgtttaaaaatgaaaaatttaacctgtgtgtcgctagattgtgtgatagagtgtagacatttggatgatgtactcattttgtcaatttgttgcgaataacgaaagagtaagatgtgatggagagagaagttttagtactgatcaaaacggtttagaaatgagtaataaaaatagagtaattaattggaagtttctcttaataggtcacaatcgtgagggatgaagcttagtggggagtacgggttcagttatatattaactctaaatataaaagctaccacttgaattccattaaagcaatttcatatacaaaaatgcaagtcatagttctgaaacaactctaatcatttatataataattgtgacaccttatagttgaagactcgaacaatatataaataaagttggcaaaatatgcaaaacaaactaatacataaaatcaagaataaaaacttagattcaaatatgttttctgcaatcgagaagaacgataagatgaacataaatgaaattggtacttctgaaagtattacttatgaaatgtgtgcaatttcctgggacatgtaatactaaatacaagtgttacaccactgtccctcgtactcattcaggttctgatggtccgaccaacactcaccataatcctcgaactcccaggattttttgtatgtcccttggcgacgtggaccaacctcgttgatatggaacattaatttatctgcaaataagtcgacttcactaaatttgtagtaccttcgcttgtactgaatataaaattcccacggaattgatccagcgcaactatggagcatgatgtaaagtagaccagcatgtgggaaaacgttctttatgccatccaatatagcaattaactcttggagctcaaacatatgaaatgccagcactaaactatgaagatatagggcgtacagattttttgcggtgaggcatttggtgtaaaacatgtgaaaactagacgattcttcagccatatgaataaaaaaaggggacttatctattcaaacagaagaaagggtttcacttgaaaaaacaacggcttttccatctggacctgattgaatccaagcctttagcatatctacaccgtcctcacaaactaagctgactattttagctgctacatgatcaggcatgtggaaatcagggaatggaggaggctgaaagaaaatgcgtaccaacattaacaccaaatttgtgaggctatatactagttcaaaacaaaatttcgcaatttttggatcaatttcagtctatataaaatgagtgcctcaatttgattgaaatttgttttgagtaaacattacctgtaggttaaaatgaactaaaggttgacgaagaggctgcacggcaaattgatttcccctaacaggggcaagggcgtttgggggtcgccagtaatgtctagtaggggacattggtcgagggtgggtacattttcctttctcgcagacgatttttgttattttggattatcaaattagtataatagtgaaagtgaacaaataatgatctaaggaatttgaagaatcactgataattaaagaggaccaaactaggctgaagggaaacggatttgagatcgtgatgaaatggaaaccctaattctctggataaatgaatagggagtggtttggtggagcgatgggttactaaatataattagtggatcctacaaatattccaaaaattgttcgtgatagtaaagtagatatgtccatattctcacgtccatgaatatatatacgcatggtctataatatattatatagacgtgctacagtgatttgttacagccaatttagccggaacttatttatggggatttacgtttttttttttataatgtttttcgtaaatatgagaagataataggttttacattcatagaccgatgtcattaaagacaaaaaaaaattgttaaaatgaaaagacttcacttatatagaaatgtagataaaatgtaaacaagaattaacctaacaacaaaacagcagacacagaagtttaaacagtttgaaaaagttattatggtttgacgttttacaaacagttgtaatcatgtatgtgggtaattcttcagttttaaaacagttcaacaatgttccataggtgaacttaattcagacacttgattactattgtactgcttaatctaagtttttgttgcaataaataaaaaggacaaatttttaataaataaataactttttattaatatataatatcatttataaaaatattaaaacattgttggaggtaaacataagatgtgaaaaaaaaaaaaaaagaagatgagataacaattgtaagcaacaagcactttgatagttctaagcatcttacaaccattttgatttcttcaacttcctcaacatcaggttcgggatacatggttgatattggcgcatggctaagaatcttaaactagttacaacctgcataatatctaaccaccttccaccaagcaagtgcaataaaaacattgttcttgcgaaatgctcgaaatcttttctccaaatccactactatttgtccatacgcctcgcattccaatgtatctttgctgaaaatcagtaagtatttgagattatatactaaccttactacaaaaatgtataaacatgatatgtttgaaaaaaaactgaaaattgatgttgaagaaatgtactttttatccatgatcatgaacggcagtttgaatccagccgtatctttcccgttacttgcggtattagtgagaatcccaacattcacgagtgcaccaataacatctataagaaatatgtcggagatatgtgtttaaaaaaataaattttttgaaaaaagtgaatggaatttatgaagaagccattacttaccaaccaaggtatgtttgccaacaacatcatccacaatgtagtcaaatgtaatgaacttgttgagtaaactgattgctaaaggtgtggaataagtgataatggtgtgatccatgaataaaatgcgaaactcatgatgagttgttcttattggttcgcagttaggtcgaacgagaaacgtacttatcgttttccattgattctcttggatcctgtcaaaatagaaggcagagaaacgaggtccgatggttgcttctatttgggtgccctgttacaaataacaatttaggggtgagggatacacgggtaaataaaaattccacaaattgcaaaataaattgaaaaaaattgtttacccattcatcggccaagacaagacgtagttcgaaagcgtacaagttgagaaattttttgtaaattctcaatacaatgacacagatggtccagccagtaaccatcggagacaactcgtaaagattgtgatgttgaacgatcgtgaacaggagaagtaaagagtaacgaaaactgagaaatattgtaatctttagttttgttttgcgtttgtgatgtggttgtcttgatgaaatcgtgagtagaagttgaatttatacaaactgaaacgatgtaaactgtaataatgacgtgttgattcgtcgaaggaattaaacgttgtaacttttaattaaaaaacgttggttctatgaaaattcaataaagtaaaataaagtttgaaatacggtatggggatttaatgtgtcttgtactaagcagaaatacagcttgacctcggaaattcatcttgaagcaggttgcggatatcatcaatttatatgtgttcataatctttttctgtccaaaataacatatccaccgataaccgtccgtttggatgtaatatacattcttgatctgagttatatgacccaaaagggttagcatttgagaatattttttggggatttaacttattcaaacttgctcaacagattcatgtcaaccaaaaaagttagttgggagaatgaatgaatttacctaggattaaacttcaaaagatataagataaattaagtatagcaatgtacatgacaagataataatggacataacattatgaacatattgatttctatgcttcatactctccgtaaagctccgcccatacggtagctctatagcattcggctgcaaaattctcataagctattggtttgtacaatagagccttcaaagcaggtggatttttggcttcaagacattttgtgaagaaatgataatagatggagtgcgtcatggaccaccacatgtaataacgagatttgtcaaggcggacacaacttagagtttcctttaaatacacagccgatttaaatggtggtccagctttcacaaagggtttcaaagcatccacgccttcttcagcaacgtagctaacaattttagcaagtactggtgccggtatgtgaatttcagggataatagcaacatgcattaaaaaaaaaaaaggttggaaacaattggttttttgtttatgttggatgtcaaacgtataagactatagcttatgatacgctgccctaccttttgacacctgaaacagatgatggttcactcatgtcggccttcgttaacttgagcattatttatatgttttgaagttgaaactgatggaatgggtatggaagaaacttaaacgaatcgtgggaggtttttgtagctagagattattatggttagatttatttttatatttttccggtttattaaaagttgtagttgggaaggtgggaatattcctgtaataacgaagtttatcaatgttatggagggaagtaaatttagattgttctttcatgataatagagaataataatattctctatataactaccacatgatctacatatccacataattttttttatttgtagttacctaaattaggaatatttacttttacagcgtcgctccaaatcaaaacttatctccgtaaaacttgcgaaatggttaagatagggaatattctgcttttcaaattttagtttctggggcgaaattaaagaaagtagaagaatagaagaatataaaccatattcttttttaaataagtatccacgatttctccccagtttataaattattctttatttgatttcttacgagcatatcaattatgagaagacagaaacgcaggagtgaaccatcagccagctgtagtgtaaaaatggtttttcatacattacaaaaatcataaactctcctactttatacttttatttatattgtcttattaagttattattttttggacaggaaaccaccattcaagaatttcacatgccccctccattgcttgctaaaattggtagctacctggctgaagatggcatggatgcattgaaaaatttgattaaagcaggtccggtatttaaggaggctgtgtattcagaggaaaccctacggtgtgtccgacttgacagatctcggtatttcatgtggtggtcaatgccacactcgatctattatcatttcttcaataaatgtcttcaagcaaacaatccccatgctttgactgctgtattgtacaaaggaatagcatatgagaatttcgttgaagaatgctacagggcacctttatgggtggagccttatgaagaggacggaggatgggtacaaatcgatggagcttactgggctcagccccgagtgcgagcaatgaatgcaaggtgctgccgatgcaaaagtgcagcacacaaaacttgtccaaatatgtgaagttcaattttaatgttgtcttttttcttgaaccgttaagaacctttgtttttcatgtattagcttctttcttttttctggttttagttttccaattatgctatattaccatttaagatttagacctttctactaagtaagtaacaaacctttattttataattagtatagaataataatccacatatcgtataccttatggatataaaaatatggatggaacacaataatataccgcatatcacattaaatccatgtataacatataaaatagagattgttccttttgggagtaatgaaaaaaaaggatagacataattcatacaacaacaattagattatgtttactattcaacaaagcaaaatagaacacacacgttcaaaaaatagtttacagagtgataatattcaaaaggaaagttaagatggttaatattacaaaaagcagagatggttaagatggttaatattacaaaaagcagagatgattatcacttgcttgaatctcaaggaactacattgccaccgggccacagtcaccagatcgcaaattcttatataagccatctaatcgcttccaataaaaaggctgaagaccatgattctgagaacattcaggcttacagtacctttggatgaggtatggcatgattgtaacaacaggttcaatgaaacgtcgaacctcgtcttcctcgtaaagatctgtatttggatcgagaatttcaacggaccagactcccagatttattgcaagtcctacccagtgttttgaatcccatatcataggcaagtaaatggtatcaatgtctgcgaaccattcagtgttgggccctacgatgaactgtttcatgggttcggaccacttgacgcgtgacttcattttggcagctttgaagctttttaattttccttgtagatggtttgcaaaccatggttgaacaaaagcggcacgctggtttgtaagtgtggtcgcaagcttttgagaaagcaaggacaccaacacctccatatgctaggtaaacaatcaataagaattagactttctcactaaagattataaaggtaatatttgtaaaaacaattgttgattttataccagagttgaaacccaatttgtaggcttggcaagtgatagaaggaatttgtttgaaattaagtatccagacgaagtgagatgttcactgcgaggaaaaaaaaaagtataagcttataacaagattataactgtattggtgataaataaaatgaaatgtataaccatacgtattgggtgcagcggagagggtattgcgaaacagtgcaaactcagatttactcattgaaggcaaaagttcatatgagcctgtttttgattttgataacaactctgctacaagaaaaacttcagcttcagacagagttggtttctctctttctcgcgctggagatgaatctgaaacatcaacataaccttcttcctgtacattataatgtaatattagtgcaaagaagaaaaccatcattaggtttgaaagtagaaacattagtttatagtattaaagatgttgtgtttatcttgtttagagcatacctggttttcatccagatcatgtgcaccaatgtcttgagaatcagtgatttgatcctgataggatatgtcaaaaaggataagtaattatctgtatgaaaaaattattgaaactgatatctaaaaaacataatttttgcagagatggacagaattataatatttgaaaaaacctccgttggagtgggagaagattctaattgtttgttaggtttggaatttgtatcatgaattggatgggaatatattaccatagcctccaataatgagattggttttgaaaatgtattagactatctttcgcaaatataaaatgaggagacctattataagtgatatcctgcaaattatttagtaaccaaataatcatgtcgaataacacagccttgttgttactatttaccttcatggtgtcatcatcgaagttgacttctggtggcgtctgtgacaatgcctgagatactgcagccgactccaaagtgacctaaatgtagaagtaccaataagatggtgagaaaaacataagaaaatattatagcgtatccacaaactcctgtccaatttaaagagaacaagagagcctaattaagtatagacataaggttgaccttcttttttgcgaactttgcaaaccctaacaacgaatgagatgctgcagccgcctccatggtgtcctgaatgttgtagtacacaaaaatatggtgagaaagacataagtaaatattatctgcaaattataaagtatccacaaggttctgtccaatataaataattaacttgctgcagcaaaatttatttcagacataaggttgacatcctttttaaagaccataattagttcagacataatcttgacttctttaagaacataattatttcattcatagttcagacataatctaaaagaaataccttcgcctgctgttcttcagagctctgatctattggtagatctatatgagaatgtgatgcagtctccctgtccaatgagtcctgaaagtgattgtagaatgaaattgttgtgttaaatatatatacagagatgaaaatagaatatgtattttcgatggttaaagaaaggctttggctttgatttgttgtgtttgtatttataaaagtacctgcattttgccatcaacatctgtttcattggcattcgtttccagttcttcagagttgtgttcttttggcagatctaaaccagaatgtgtggtaggaactctctccgatgcgtcctgcaagtaattgtagaatggatttggttaaaaaaaaacataaccattggtctgcgcagtaggtccaacaaatactatattatcttacatcaataatatgatcttggttgagagggagtagtttttcgacgcttgggtctgaccttggatcaacctgtttggaaattacaatagtcaatgtctcttatatatatatataagtcattatgggtgtccaagaaaacctgtccacccaagattaatattaaagacaacacaaaacaaatgtagttttgatggttaaagaaaggctttgatttgttgtgtttgtgtttataaaagataaaagtaccttcatttggctatcaacatcttcctcattggcattcgattcctgttctttagagctgtgttcttttgacagatctaaaccagaaggtattgcaggaactctctccgatgcgtcatgcaagtaattgttgaatggatttggtcaaaaaaacaaatataaacattggtctgcgcagtaggtctaacaaaatactatattatcttacatcactaatatgatcttggttgagaggaagtagtttttcaacgcttgggtttgaacttggatcaacctgattggaaattacaatagtcaatgtctcttatatatatagagaatattatgggtgagcaagaaaacctgtccacccagaattaacattaaagacaacagaaaagaaaattttgttttgatggttaaagaaaggctttgatatgttgtgtttgtagttataaaagtacctgcatttggctatcaacatcttcctcattggcattttgatctttgacatcagtgtcataaacagggttgccttcatttgcatcatccttattagagtgctctgattgtagtggagtaacaaatacatccatggggtcatcagtaatctcctgcaataagatgtgttgacgtcgttaattctaccaattttgtaaatagttgaagttaacaattacactaaccgtgtttatcaatgggatactatcactggagtcttgagttttatctaaatgatcgtctgggacttgctgtgcaacttcaggctgtccaaatacatgctcaggcagcgtgtgtgactgagatgaagtctatgagaaaattaaaagatttattaaaacagcctgaaattgaagtctatgataatgttcaaatatttaaaacagtttgaaatcttgaatacctcagaggtttgagattggatagggacctccattatcttcttgcgctttgatatagatgaacatgcaacaaaactggaggagagttttgtggaccgcttgaatctgacagttttttttgctttttcaagcttcattacacggttcgatagctcttccaccttagtttgtagttcactgatgagcctagacttctcatcatcagagagattgagttccggtttactacgagttgaataccttcgcctggatttgggagccatagacttcacacctaatttcttcttacggtccacaatgtccacgagattgcttcttctttgggactgagattggaggcaatgtggcatcacctcctggccaatcggttttttggaattgatgagatacccatatcaaatcatacatgtatgcaactttcttatctttcacctcatcgtcccactctgcccaactttggtcagcattaaggtctccaactataagcggatccactggcagctgtacaaaattagaaggttagtaatagtatataagactgaatttatagaaagagaatattatggacacaatatagataattgaggtgaaaaagaataccttaaggttgctttccaaagcatgaatctgaggaagcgatataacttgttttggatgagttaatcgtttccaaaggaggattgtcttagaggttgagtcatctaacaccaaatctaacagtccaggtatgttacgaaatgctatgagctgcaaggctggggggaaacctttcaaacggaatgttttctgctgaagttgactcaccaaactcttgatagggtcagttgtcagctgtcttttaccagtggacttaccgagatttcgtttgtcaggtctcattcctactgcagtcttcagaaaagactctctaccccaaggaaatgaaaggaatttatccagatctgccaacatctctacatatttaaatgtaggcctaccgatttggttcgatgctatgagtacaccatctataataagtagaaacgcgagcttaagtctgtggcagatgacaatgtcttgtgtttgttggttagcatgtctgaaacatcccctaaggtaacagtcttatctggaccaattaactcgtcccagtaactcttcatgccaacaacataaaccggatcatcatctggatcataatcctcagaaaactccccacagggcaatccagtcacgcaagcaaattcaggtaatgcaaatctcaggggtatccaccaaatactgtccacagctcatactttttcttcgttaccagctgcctacatagcaaggcatgcataagcttaccagacatcgcacacttactaaccggcaaatgaatagaggtccaaagcaagattgcagaatgaaatccaattcctttgtcccctgaaaaaccttccggagaaaggatagaatatctggtcttgagtatatatttagctttcccctcggatattgatcagtggcgaaaagtctattaggaagatttgaatcacactgagaagatggttcctgagacgttgaccctgtcattagcaagaaacaagttcagaagattaagattagattaacagataatatgaccaaatgaaaacgagttcacaaacgtctctctattgcttgcttagattagattaacagtgtaagagtaccttccatagtgtaacagaataaacttatctgccaatgctatcgatttagatgtttaactgtcttccaaatcctgtaacacaaacagataaactcatcttagatatggcagcaatagatataggaaaaggaaattataactatatgcagatattattttttttaaacaagtcaaaatctgaagtatctttttcatctccacaaaagaaaatcaagttgcaaatgaaactgacaaaataccacaaagtgaacaaaacaaagttcacaaaccagcagaagattaggtgtaaccactaaactacagctaaaataaaatagaacggattagaaaaggatcactctgaagaaccagcagaaggacaactctaagaacctaacaaagcctagtaagtgaaagaaaccaaaaataattaaggctacttcagaaatgagaacaagagttagcaaaattcatcaacaggtcatatggttttgtcaatcaaatgagtttgttacaaatgaattacgtttcccaaacaagaaattctcttgtttataactgaaatacgaaaagaaaactaaacaatgaaacaattcacataaagatatcttacttatgggattgtacaattactctattattgttttttgctaacatataacttagaagcaccactaaaatgcatatcaaatgaataaagattttagttctgaagcaagaaacgaaagaaactctaattataaaatcttatgatgaaagaaagaaactctaattataacagtatggctcacgtctagcacagtcaaatatggagtaagctagtgacgctctgcgagtaagtcagaaaggtacctaaaaatgccaaaatatcagagagtaaacaaaacaaagttaacaaaccaactaaagattagttactgaaaaatcaaaacacaatgtgaattgatgttatccaaatatagttgaccatcagaccatatccaacatgtttaagataactgccaaagttgaaaatgccaaacaatcagtgagtaaaccaagattagttactgtaaaatcataacacaatgtgaattgattcagtgccctgtccacaaaaagggcgagtgctaattattaactgtaagatcataacacactgagtcatattggtggtagcttacctgaacttggagaacactctggtgagtatttaggcccgtaaatgaacctaaaatccaaaaaaacaacagacagacacaaccactataagtaaaaagctaaacatgggagaataatcataggatcaaggtgaagtggaataacctaacaaatactagtaagtgaaagaaacccaaaaaggttaaggctttacgagtaatcgcaacaagagtgagcaaaattcataaacagagtatatggttttgtcaatcaaatgagtttgtaacttaaatacgaaaaacgagaagcgaaaaccgaagatagaaactagaaaataataatcaaacagccaagtataactgttttagagtttcgacaattcaaattttacatgaaacataaatccaattcgatataagaacaaagagaaatttgggggaaataccggtggagtcttcagaagagagaaagtcgtgtgcaacaatggtggtggacagtgacggagaagttggagagaatttagggtttgtgagcgaaattagaagtcgtcgtcgtctgcgtcttcgtctgagcgaacagggtcaccggaaaatcgtctgcgtcgtcgtctgagcgaacagagtcaccggaaaaactgaagaggatgatgtcgccggattcgtcttctacaacaaacagtaatttgcagttttttactggattaggtttttacgctactgaaaaagtcttcaaaagtcaaatagggtaaggtaactgcaaattcgacgagtgggttggttaagggatctctttggttaatgcggatttggtttgaaaacaaccggttagggtaatagagtaactttgccaaggcaaagtgcctgatgattttaaagtgtcgaaacacgtctaaagttatgaaaagtgtctgagtatgcaatattctctaattttaattttggatatttaaggtattacgaaaatatatcttaactaatatttttaagtttagatttgtattcggatactgaggaatattagattcagtttaggtttggtttaggttcggttcgaatttttttggatagtgtggtttaggataatggataatttaaaaattcagatttggctttggttccgttatttattgggttttttggtttggggtcggtttcgggtactatcacatgcctatgtactggttttcgattttttaactttggcgattacgctcttgattttgaagatgtgttagcaacttagcatcatcattactctttcactatatatgaaaaaaaatcttgaattacttttgatctctgataatgaatgatactccaaattccaataagagaaaacatagacaccgtgattaaatttcgtacgtaacactcgtgaatctctaggcacacaccacctcactgaactcacgtgcaaccggactaatttgagccgtaggattcagtaatcaataaatgtcgaggatctcgatgatcggacggttacaaagaggacacgatcctcgattaagccacacctctcgagaacacactctgcaaaaagtatgtccacatgggataaacgctgctcctttcttccttcccatgcacacgcaacacaccgaatcattattaactcctctaaccgtcgacgacgccgacgccgttactctctccgtttcattctcttcaacgacgactctctccgccgtttcttcgagcaatctcattaacgacacttttaacggcgttaaactccctgatgcttccgtttcctccgttcggtaatttctctccgctgctaacgccgttgcgagattcataccttgatttaacggacccgttacatgatccgacccggaaacaagccggttttcaaatggctcgtcgtcgtcttcgccagtgttacttgttaaccggagaccccaagttggtccacagcatccaattcgtttgaatcctagccgttctttaagagttcgtttccttctcctacttcgatcgagaccgtccatttggagtcggagcaaatcgagaaatgtcgttgactgtggcgtctccggctgggcttgactagtttcaacaccgagttgactcattgtcgactcagctacagacgctttaaaagaagagaggattacgagaaaaataaacaagaaaggattctgaagaaaatttccgccattgaagagagtgtgaagtgttttggaattcgtgtattgctttgggttttaaagcttttttcggttacgtccgaattacgattgaagtcattattatattattctctctttaaattgaaaaacacgaattaataccaaacgtttcacttttaatttgaagtcttcttgtattaatttttgctatgattgagttctgaaaaactgatactatgtaatttggtaattcgtttttagattgaacattaccaagttggatacacttgaatacaaaaaataacaatatagtaccaacatttatgacaaacttgttctacatgatagcatttaaaaggattaaaggagtgtctcttatttttctacaaccatccgatccaatttttatttatttgatttggaataaacggacttttattgaaagatcaaaatctcccattttcatctagcttcaaaactacaagttgcattcaacacaaagttatacatttttttcttcagtaatcaatagtattagtatacctcttggagcatgagaaggaaagtggtgtatgctttagattggagatgtcaaagagctccatgaatctctggtctgagattctagctttcgcagctgcgaatctttggtactcgtcgaagatagaagacaaacaccatctttgaatcttcctcacacaacctacaagacatcccgtccgatgctgcaacggatagagagacaagatataaggattacttcgatcatatcgtgactagggttaagcagatgagagatgtctcagtttacctttccacttttgcaatgaatcaagacaggatgattctctgtatctggttaataaggcaagataagagtcaaggattagatggttttgaatcttttgataatctaaacaattacatttctcgatgaaaataggttatagagagacaagagagggtacctagaagtacttgtaaggcttctcggattacctcgtcagggatattaacaaatggttccttaaaacacaaagagaacaatcaacttatcagtccacaagcacagaatatgttacattcatcatctttgcatagctctatctaatcaaatgctaaacaagaagattaaacacaagtttttacagaagcaacaacctagaataagcttatgaagttatgatccattcttatgagattcagactcatcattccaccaatatgagatattgaaacaatcatagataaccacagactatgaaactaagaagaggtgattcaaagcttcaaaaacatcgataacgagagtaagaaaaagtaaataattagtatcaccaccaatctcaccttgcatctttcaattccaaattgaaaaacttggatcccatttgattttgcaaactctctattcacctctggatatgcctcaggacacaaatatctatagatcacaatacacattcaaaacaataatcatagattagagactaattcttttgaccatttcacatttcactataacagaaacattctataaaaccctagctataattatatctccatatcaactaaatcagcgactatttgcgatacaggacgacgaagctgacctaattaaggactaagagaatgagattaagagaaattacatgatggatttgagacgcaaagactggagaaagctgaaactgacgggttcaggaaaaccagaacggaaaattccattatcgaccatagcgaagttaagaggtggcacgaaaagctcaccgccgcctctctcctccatcgagttctccgattgtggtaccgtgtgaacatcgccggcgtaactctctaacgtcatgattgtattgagcgccaaaaagggaaaggaagagagctttcgatgagaaaatgtcgagaaaaattgagaagaagattcagaagttttggggaatattaaaaggtatccagaagaatattcttctctccactattttactaagatcagacccgtgttacagcacggaggaatatatgtgtttctgtatgatgtatgatgtgtattagaacgtgcttagatagttttaaaacgtaacatatttaggggttaacttaagtaatgagattaattattagaatattttctaaaatattggaattaaattgttttttttgtttaaaatatttttttcatgtgttaaaaataaaataaatacaaaatattctttaaaaaaatttctagcgattttacaaaagtctatcatttagttataccagatttattcttattcagtagaattttttaaatacgacagattttttatatcatacttttttggttgacagatttcttagaagatagtgataacaaatttataaattatctacatatacaattttgggaaagatttgtgtcgaaaaattctttttcaatttcgatattgtatgtttagtccctataaaatcaatcagacaagattgtctgcgttaggacaatgaccaaatttttgatgaactattcacgttttgcactaattaattacctaaacaaaaatattattttgcactaccctcataaattgcacacattaatcccttaaatctctactaattcaatattacacgaaataatatttcttaaaaatccgaacaaccaaataactaaccatatctttacttacttcattccaaaatctctaaatatttactacactcttaccaaatattcgtatttcgatatcacatttctataagttaaacgattattaatcatgcattaattccataaaccttaaaagaaccctctatttatcatataatcttacatatggtatagtcaatatatttttacacattctacaaatcatcatcaattcaaaattccaatatatcacctcgcaaattaaatttcgccaactataatattattcaaattgttattgattattgccttccaaaaaatttatccgatcgaatcatatattctctccactcctcattcatagcaattatgtatcctgatttacgtatatcaccttaactacaaaatcttttactatttgcttgccagtcaagatataatctaaatcccgcaatattccatcttataaaccacccaaatctttctgttttacatgtacaagcgtaaaaataagggtaaatacatttaccatatctcgacagtttgattcagaatcaaatcaaaatctaaatacggcattttgattattattttgcacttatgatactcaagcatattcctattctaaaccattcagaatcattctgttttcaaagaaattacgattgggactatgtagaggataaaatatgatttgattcaaaatctgccagatttaacattcatttgttttaatatgtttttggtatcacatatattctcctatatttttcttaattaattccaacaacaataggcaatcttagtcaatctttaataaacgtaattaattcttttgctaatcacaatttatgatttccttaacgtcttgccatcttaatcgtctctatcaaaattatttcctaaaatctctccatattaactccacgatttcttccaaacaaatcatatccatttttgaaattcatacattgcaatatatccctacaaaacagattttaagaaactaactaatgtttcttctccataaaaatcaattccgttttttactaaaatcaagtaataactcaccaattcggatttcatattttatcctctacataatctacacaaaaaccatttaaagaaacataataatgccgcataaaaaattaaaaacgcataacaatagtatattcctcaaaatctatcgaattcatagattttcttccaaatatcttgcttcagggaatattttctatttaatagatgcgggttagtaacctattagttgtccctataaatactatgcaccaccacgccatttaccatcacccaacacaaaggtatgaaatattttagcgtttacagacaccttatttcttttagttttcgttttgattatttgtttcattctctagctaaaactcgaaatatttttctatttttttagtttttccaattattgttagaaataaatgctgatttctgccacgtctaaagtttgtgttgtttggattttggcagaagaggagaacatatatgatcgtgacctggctaatcaaaagattcagaaatatggcttctgtcttactaaaagcaatagacacagtaaaaaagatatcatctatccgactattttcacagatgtcttagatgtgaaaaaattcatgtttggattcttaaagatattttgttgagaaccaataataatcatattgatcttacatttattgattgtgaaattaaatttacagaaaatactaatataatatcaaaagtaaatagatataaaaaataatatgataaattcaaaatataacttgattatttatattaacaatcaaattacagttatacaattttaaagtactaaaaataaacaatattaacaaaactaatacaacttaaaattttcattttttagttataaagtatccttccaaaatgtataatatatttaaattaaaaaatatattaacatatatttataaaacatgctaaaaacaaaataaaaaaactattgaatacaattataaacccgtagtgtaccacatgtcaattataagaatgatcataaattcttacataaattttgtaagaatgatcataaattgtgttcattttggaagagatggtttcagtttaactaagtaataaaaatcaagttttattacataaaaggtaaaattataacacatgtaagtaaatgaacaatacaagcctaaattataatttcatgtatagtatcacgtgtttaaaattacagtcaatgataatctacagttacaatccaaaaattaaatttcataccaattgaatcatatgggtttacatgtaataaactaatattgttatttacaaaagaattcatgcttataatcatgtaatcataaaattagtacaaacacacgatgtatataaattgaatatttacaaaaccagaccgaaacatacaaatataatcgcccatgtcaatagatataaatatatagttgaaaatgcaaactaactataatgatttaactgtcaattatattacaataaaaccatcatattacgattaaacgcaaatactcaacccgcggtgtaccgcgggtccgtatccagtaacatatttaatttgatggacaaatttttagttttttcaaccacaaactttcatataatttgacagacttatttttttgtcgatgttttttttacggtaagtgatagcagatttataattttgttaaacaaatctatcaaattgtaatagatttgttgtcaaaaaaataattactagaatgacgtctaacgataaccgatttttttaatgttagcagatttaatttgattgacagatttgttttctaaaatataaagttttgtgtaacgacagagttatttaatgttatgacagataaatttatattaccataaatctgtcgtttgatggcaaatttaataaagaagaaaagaaattgcttgaatgatcgtaaatatcatttatgttacgacagatttgtaatttgaaatccttattgtgaccgatttataaatttttttccatggattttttgtaatagaataatactaactattgtaacagttttctatttggtaaatcatattatgacatatttgattttttggaaaatcatattatgatagatttgattttttttttgtcaattgtttttagaaattcttttaaataccactaaaatgagtttttccaaaacaatactattataaattttatttttcaaaaataccacaaatctaaaactaaattttaatattcaaaactaatttccaaatcctaaacactaaatcctacacctaaaaaacatacagtaaatatacatagtcaacctaaatataaaaaaaaatctacaacttcaaaaattaattttttatgtttatggtattttaggaataaatgttttctggtatttttggaagaaaacacaaaacaattgtcgtattttttatttttttattttcaatgtggtatatgaaagaatttctcattttttatctttattttttttggagaaaataatttaggaaaaaattatattaagtaatttattttgttggtaacaacagatttaatatatgtgtgacagtttttatatgatacttgccatattggtagtaaaaaaaacaataaataactagagctgtagtttgagcaatggtttttggacttttaacacaaaatttatgtaaatctagtaatgagaaaatatagagtgttaaactaattatttttagcctaatttgggttaaactaggtaaattttagtaaagaatatataaggttgtgtggtaatagtatatgaataattggcgattccaattgaggaagttaataacttgaaatcgtaaacacgaaacaaaagtacgtaatgatatttagcaaatatagtgtatcgaatggactttacgaataggaatactgataatgtaataatatgtagtatagtttcatataataatatttaattctaatatatatgtggatttattagccaaaacaaaattttgtttcacgaactatgaatattttacttacataatgtaactaactttctaattataaaatttatactacactaggttaggccgcctaaataggcgggtttaaaaaacaattagaattttttatcaatgatatttgaattctaaatagtaaatgataacccctaatttttaaatatttaattgagtaaatttattttaattcaaacgttaattttacaatttttattttgctatacacttaatgactttaactatatcttattgataatatttaaattttaaatagtaatcaacacattttttctgtattttatttagtaattttctaaaaattaaaattttaatcttacatattctatttgctatactatttaactatctatttcatcataataatcctgattttttaattagggagatttgaaaaactaccctttattttctacccttttgcaacaatacccttttatgttggccatttttaaaaatacttattcctttgaacagaatgaccaaattaccctcatataataagaacatgtaattggaaactgaaaattttcccgccaaatttatttttccaacaaaaaaattttccgccaaacttttttcccgcaaaaaaaaaaaattcccgccaaaaacttttttcgtaacaatttttcctcagccaaaaaaatgcttttaaaatctttgttaattttttttttgcaggagatagatttacaagggattgtaaaaaggttttaaaagatttacaaagaattttaaaaggtttaaaaagatttacaaaggattttaagagggttttaaaagatttacaagggattttaaaacgtttttaaaagatttacaagagattttaaaagggttttaaaagatttacaagggatttgaaagggttttaaaagatttgcaaaggtttttaaaagttttttaaagggtttaaaattgttttaaaaggattttaaaagatttacaagagattttaaagggttttaaaagatttacaaaggttttttaaagatttttaacgggtttaaaagtgttttaaaagatttacaagggattttaaaagggtttaaaaatatttacaagggattttaaaagggatttaaaagatttacaaagaattttaaaagggttttaaaatatttacaagggattttaaaaggttttaaaaagatttaccagagtttttaaaggtcttgttgtaaattctttaaaaatcttttaaaaacccttgtacatcttttaaaacccatttaaacactttaaaaatctcttttaaatcttccacccttttaaaaagaacaaaaacgagcaaacttccaaaaagtgaaaagaataaggaagcttataataaacattccaagaaaaggaaaatatgatatattagtaggtcttgtatcatcaactttattagattagtcaactagttgaactttaggtcttactggaagaaggtaaagtatatattatacaatcatgtagaagtaggcaaagattttaaggtgattgatcttccaactccatttgctcatatccaatgattacatagccctcttgagatcttcataggaatcatcttttatcctctgctctcaacatcttcgtgcatcaaactcttatgtgaaaacagcccctccaacttcctcactccttagcatgctcaaagattcaaaacgaacaaaagaacatcatcagctcaagaatcgaagagctttaagttcaagattgaattcaaaatgcgataccacaatggccaattcatagagttatcactaaaggttcaagcattcctagacaaagaacaagcagaatatgatttttcttcactctattttttatctgagaataaatgaaagttccaagaatcgcgatggcagcacccagggcattgacatgtttaagagggtttggaagatgatgattgaggcaacgaggactgagatccgcttcattgtgtttccagcgctaaatgttagtggtgaaatctagttcagggacatgtatgagacttgattatacaaatggtagaaaacactatgtgccactacccacctgaattcaaacatttagaatcaaataccttacaaggttttaaatcaacttcttcgaattttttttgtctcttttgtattgtacaacatcaatataaacttactagacaaagtttggtccgatttagagacatcgttttgccaaccatcagcccacatttggggaccttccacagaattggcgaaaggagtaacaatgagaagagacatcatagataagcaagcatagtaattcatcacactcactgacttccccttcattcccttctttgagaatatgttacgaaacacaaacgccaaattcgatatcattgcccccataaaccctgaaaacccccaagaaacacccgtatatcaacatctcaaaacatttcattgaattgcattagcttcttaaggtatcaataggatgttgttaagtacctatcatattgaagttgagctccataacagcagcaagagcacatcctcaaataatgggtaagagggagaggtaaacatgtagagggaatgactcgcccaagaagaggcttgagacaaggacgctaaaggctgcctcactgcttttgatgatgtgtgtgtgaaggacactactactttagacatactcactatcgcttcaacatgtccaattgtatgcgccaaagccacctgaacaatcaaaatcatcatcatacagttccatcaatactacttacacacttaatctaaagacgtgtccctttcaaaatcaaacacacctaaagcaagacaatttatgaagaaacaacagtaatgaaagttagatcctttaacgggaacaaagttttccagaaatagagatcgatttaaagagcatctgcgactccagtgacccaagagacaagcatcatcaaagagccacaagcaagagaaagcgtcaaagttagccacaagtaaggaaaagcattcaaaaccttcttgttgtagttattgaacacaccgttcaatgcccaccaaattgcgaaatagatcccaatctaaactttctgtcccgattgtttgtcaagaacgttgataccaatctacaatttcaatcgaacgagaccgatcagcctcgtaagctccaaccctaaaaacatcactcccctgcgccgccgccgccactaaagcgaaattcgacaaattctgaaatgataaaagatgtttatgaggtaaaggattaggcttttggaagtttccgataatgggtaatgcaaaaattgaagctttgcttgaattgattgacttacgccgacgattgcagttaaggaaggtaaaaccggtttaattgaggaaatcatcggttcttaatttgagaatttggtgtaagcaattgatctctaagtgggtttgattgaagatttgataagaaaagataacgatccatttgtttcttgggaaaatggaagagacaaaggaacaaagagaaagttttatagggttaggaaggaggtgagggcagagaggaggaaaaatatgggtcattagaggttgacaacataagaaaaattgagattatgtttgattacgtaaatgatttttgattgtgtctattagagagctctagatatgggtctttttagtatttacgtcttgttggccgtagagactgtccatgagctaagttaagtatcagtgattttgataagtgagattgaaattaaaatacgaattaatgattggttaagcaaagctaagcaagtttgaacttgtctatactatactggacacacaattgatctacaaggcaaagaaaatctaatccgttcacagaatgatggatatataaatcatcatataaataaaattgtgtttttgttatatgtagcaattttaaggtccatcatgttaaggtccatcacacaaatgaaacaaaaatccatttctgatatcatacctctgtatgaatacaatagaatgtaaggcctcggtcctaaatccaaaagtgatgcgatcaatcatttatttcaactattaatcccaaatcctaagcaaaaacaatatgagaatttataaccttagcataacatagagaacaaattctaccaaacaaccaccaatctgcgtagaagaaatggattcttatctgttgtcagtttcctctagtttcttccatcatcgtataaaaattctattagcaattagagaaacagcccacgagtcaactcacgagtcaacaagttgattaaaacgatttagagaagaatttagcttggatgacaaaaaaaaaaaagaatgtagctttaaacgagagattcttaggcagagggagtggagaaatgttttctatttttcttattttttatatattaaaaaaggataatggcaacaatcatactaatattattattattatagatctctattacaatattcttttttcttacttatgaaacattctagaatcactaagagaatcttagacaattctttaatcaaattactttccgtcacaaaaaattgtggtactggcttcattgttgacaaatcatcagcacagttgaacatatttatcgccgttccaccgaccatagtgtttacgctgccatagtctttggcagccaaatatctgagggcttcatcacgccggtcgaaagaattttcataaaattctatacataagttatatttagattcaacacccggcgtgtagcctcctgataatttaaattgcttcagcttatctgaaatattttgagcctgataattaagcacaaatttgaagagactaggaaaatctaatctagcaatttcaggatttgcgtttagaacttgaaaacaatatgaagaattgatatcttgtttggtgcatatggtgtggatctgatcttttgtaaccaacgtattaaaccttgcatacgatgagtcaacaaaaagaagtaaaaccaaaaaacaagccaatgaaaagtttttatcgacgtaagcaaccatttttcttgttttgtgtgttttggaatttacgtgagatttatatatgctgaaaagtttttcaaaaataaatacttacagattatgtaccataataaatgatttaatttattagcaatttgtcaaacaattcattgttttctttttttgataatttgaccatttatttaggtaagaaaaatatttgattttgatttaacagcaatatgacaacccataagataaatttccttccttagatttgaaatacatgatgttactatttgactaagatctaagggcatctcttttaatggatctaggagaaattaaataaatcaaaaacaactaatctatattataaaaaagtcaaaactatttttttttagtacgtctacataggattttatacaaccaatcattataagtcatctcattaattaacatttatgaaattattcatattttctatttttttaattttatttttgtaaaatggaaaaaaccaaaataagaaaatatggaaagttttctaaatattttgtaaccaaataatataaaacttatcaaaatgtaaatttctattttattaaatttataaacgaaaataaataacacaaaaacttgatatttttaaaaatttacgagttttatattatttttttttataaatatgataatatattgaatcaagatgcatacaaatttgttgcgtgaattgcagatactaattgattctgtgtgtgtttttttttacttattgttgggcatgtttgtgctttcgatagggtcttgagaagggaatggagaaatcaggagaaagatctggaggagattcttatgtttctaacattatagagaggagaaacatgacgtttataattggaaacaaagattacacggcttctttgctttatctgcgtgcagttgtttagtcttttataacttatgatgattgtgcatttgttctaattttcaccacaagttctctgcttttctcacgatctctgtttttgttcttgttaaaacagaaaatacaagaacacgtttaaacacttgcatgtctacattgataataaacttggataatcttacacaagacacacatacatatagtggctttactccacttgcttagaccctagaccacatcattgtcttaagacttacatcagctactctactatgttggaactcccaactccttaattcactctacataacatctttgattctataacacaacactaattaactaaacatacttgggcctaattcatctgcagcccattttaacaaaacacaaagcccaacatctcttttgttgactttgttccttgctcttcttttacgcttgaagcttcttctctattcttctcttcttctcataaagctttccttattgcaggatttaatctaggattcacaattccaacactcccctaagaatccttagattaaatccccaattcgattttagggaattcaatctcattgcttcttcttctcttggtgattcgcctcttctcttgtgcgaatccctttcacgatctttggcacagctcactggtaagcttgccttcttcatctccctcttactttgaatatcctcgcatcgagattcttcttctctacgtgtttgtgcgtgaagttcttcatgtccctctgcttcgattttccgtaatcgaactcatcctctactttcttcttttgcaggtgaattggtgttaagtctcggtctcttgtcttcctcttggtgattttcttcttatcacacaaaggtaacacttttgactcttcatcacttcgattcaactactccttcttctcttttcttcaattgacctctcttgtcaattgtttctggttttcagacattggagctcttgggatttctctttccctcaagcagtctccatgtcttctccgcatcttctcggtgagcctccctcacgtctcttccggttgtcgctgcaaccttcttcagcttcctctctctcaggtaagcttctcttctcctcttcttggtgtccacctttgaacacctccttctttactttgattcttagaaccatcactttagctttagcttcagaatgtttgactcgaaccatcactcgactttctctaaccgtagtctatttggcttctccttgagtcatcaccttagccttagccggttggctctgtagagaacacgaaactgaacggttgcttgtaacagaaacaaacacagaaattgatagccaagttcacggcttaaccgctatgtctgaggagagatctcttgctcccaaagcttcactatatcaaagagattacaaacaccacttgacttgtgatgttgtctttggtttcaggtacaatctcaagaagaacaaagatcaaacacaaagaacaaagaaggagaaagcttcttgaagaataaactctcgtttcttctctttctctctagaactctctttgtgtcttgtctcacacctacatccacatatatatatatatatatatatatatatgtgtgtgatggaccacttttgttcttcttttctttatattaactccgtctggcccaataaaagcccaatgttgtgtgttttggtcaaacccaataacaatctccaccttttgacaacaacacacttcctcgacgacatcgacatctccgacaaccaacgtcatctctttctcatatcgtgaaaccaacaccactgccagactccaacgacctccggcgaacatacgaatttttccccgtcagccatcgtctcctcctttccccaccgagctctcttgttctcgacatggagaagatggagcttgcctttcaatgacaaaatcaaactcagattccgactactttgatggctacctccggcgaaagcaactgataagccctgatatgaaaagaacagaaagaaatggagggagagaagtattgcacctttaaggtcgagaagaagagagataagagagattttagaaagtttgtttgattgatcttcataagataaaaaccctaataatgcggaagcagtgcttaaatacacccacaagcctaaaacgacactaagatagtagctaagaccctctcttacaataagagtctttctcccttgtctcattcttcgacacttagtctcacaccagcttcttcttcttctttataaaggtaatgggaatccataacctatccgcaactgcaaaccttcaccttttgttggttgctcttcgttctggtgaaacaagagacttctcttcgtctctcatccaggcctctcgtccgtgacacatcacaacatcacagtcatcttcaccatcaattaactccggctgcgtttaactccgacgaatcagaccgccaccatcaccgctcaactcatggtactctccaatctctcattttctcgttgttgtgatgattagagagtatctcttctgaaattttgagacacttcaaattcaatttcagtctccattggtgagctccacctcttttccggcgaattcgaccattgattcctctgcaaatctcaggtaaatctaatctctctcttgtctcttcttcacactaagagattaagatcttctgagaattcaaaatttttgaaagttgacaaatttcaattttgataccacggtaggtttcttccgattccttcccttctgtagttaagctcattaatctgaaatgagatgtagttggtaccaactattgtagcttcatacattttgaaagtcttagcttccttttcctgactttcttgtaacagagctagaactcccttagctttatctctgttaacctccattccctgaatccttgaagctttttccaactctttcatttcaactttaacgagtcccctttcttaatgatactttctggcaacgtaatcctttcatccttaattttactatcacaaaacatccactccttgttgtgatctctcaacagtggctggttatgagaaggtccttcacttttctcagatttaacctcctctaaacaatctgattcttctgttgaggattcatctcctccttgaactgatgattcctttattccaaagccatatggagtaggtccttaaattaaattcacgctgaaagtcaccttccttgacttcttcttcctcactccaactacagccttgacaacactttttccaccattttcagcatgtggtacactcttttcagccttaacaaccgtgccttcaagatagtaaagcccttcgtgatatttcccagatatcactttcttaccatctttgtagaaattcatggaaaaaattataaaagaataatatcatgatttatttttaatttgaccgcttaatacatgtacttttaaaattggaagaaaaatacataagttaatttcgattgtctactaaaaccctaatcttttaaatattggatatttcctgcttctgagttaacgaatgttagtattggtaactgaaccactaactgtggttaaaacataactcatagtatttacgcatttatatatgaagctcttttaataatattgcgattatgttgtctcagtctggtggttagatgtaggttgatttattatcaccaccaaaagaagtttttttttccttttctcttcttcttcttcaccaaactctcttttctctattcgctgtaattttcttaaagcttttgatgttgttttgttcacaattgcttaatctccctttttcaccgtaatttgtagttaacaaactttttaatcagtaaacagaagaatcaaaagtttcaaaatctatctttcatctctcaacacttcattttccaatatgaaaaagaagaaattatctagatctacaacacaacacaagcaacaaattcgaattggaaaacaaatccaatttcaattttaataaatttcaatttggatacaaatcctaaacatgtatctacagagaagaaagtaaaagccttagaaatatcaaatcaaatctcaaaatctaggtacaagtttttcgtcgaggttgtgcatagaaaaagttttcagattctggtggttgagaaaacccgttgctctgccatctccgtcgtcctcttcaccaccaccagctccattcttcaattaaattaagacaaaaaaaagaaaaaaaaacgtcaaaaagtatattgcgggattcgaactcagacttgggtgagttagataaaaaatcaacccaaaactaaccactagactaagacaacataatcgcaatcatattaaaagagatttgtatatatatccgtaaataacatgagttatgttttaaccacagttagtagttccgttatcaaaactaacagtcgttaacttgggagcaggaaatatccaacatttaaaagactaagatttttgtagacaatcgaaattaacttatgtatttttcttccaattttaaaagtacaggtattaaacggccaaattaaaaataaaccggggtttttttccgcttttttcccttttatttagtacgttatacttgtgaagcatggaacaacattattacaatccacttttatatggaattcgactttcttttagccaagtttctccatctaagagcttggctacagtgaattctgtagcctgtttaggatctttcataactttaaagcccgaccacttcacccttctgctagtcacagctcccggacccctattttgatattcgcggtagtggagagttgacagaccagtttctccttcccaaggagtccagcctgcgggatcaactaaatcaccgatgaaagactgcagaaccgcgactgttgaaaatatcctccaaggccttccaagatacgtttttacggttgctgtatctagatccgaacttgctgtgatgttgcagttttgaattgagaagcccgatttgtcgtccttagtctcgcgtgattgagcggttatgaaattgctttgccccatattaggctgtcttgctacaatctggcagaattgaaataccgccgctgcgtttccacaaatgaaatctacagtaccggtaataaagcactccctataaaactggcggtctatgtgaggatacaaggcatcctgatatccctcgacacgacatctgtaaatgacggacatatcaccactcacacggagggcaacagctggtccttttgccggcccgaccgtgtttcggaagcacatgtctactccgatgaatcctttaccattagaagcttcaaacatatttttagtataattagaattgtctttaagaatgttatagtttggtataaagaagagaaaactataaattattcaagaatagaacacaaactcttaccaaaagttgcagtgtagaacgttcttctaacattgctagcgcttaaattgcccgtgatgatggttgaatcttgaccatcacctataagagttaaattgggtttcgtattctcaatggcgacgatttcatcataaatgcctgtctttatatagatgatgaatctcttgtggctgtgttgaggtgctgctgcaatggccgcattcactgtgttgtactttccggtcccatctttcgcgaccacaacatcggcaatcttttttagagcctgctttataaaaaacagaagaaattctataagcagtagaaagaaagagaaaaatgataaaaggtttgttaagagatgcaaaaatatcgatttacgtgaccttaaggtctatatttatagaactggtgatctctaaggaaaaagaatttatctacaagtaaatacaataaaaggtaaatatacaaatcctaaatatttgttacttgagtatcaagtctatccttaatttgtttttcacgattatcaaattataacttaaaaatattagggttccgttttattacctcagcattgagatatagatctttcttgtcaacatgagataaccaagacgggctattgggaaccaccgagttaagttcggtgttgtctctcggcgaaatggagataaaaagagccaaagctacctttgccttagaaatgaggtcttgaagctgtggctcgacccgacgtttataggcaccgtcaccaatttcgtcgatacatgtgatgtagctagtaagaacgccactgagccaagtgtggatgttttcgtaagatccaagataagggaattctcctcctaagagttcctccactgaacggatcatcctatcttttgccgactccatcatctcctcaaatagatttgtgtcctccttcaaacatagcttatcattctccatctcctcatgttgttttgtatcttccatcacaccaatcatagccatgtcgatcttccgcacggaattcttcaaaacgatgatcaataagtcacgacgtctaatctccgagagtgacgaggaagctgtcttaagctccaacaaaaagttttgacatgagtgtttgtcatcacaatattctttgctaacaccaataaccaccattgttatcataaggatgaaaaaagagaaaactttaaccaacatttttgtgtttatttcttctctcttaattactgaatttatattatcttaactgatgaaagaggagggagcgatggtggtcttatatacaaagcaaagcaacttaatcaatttacatttaattaattgtattcaataaatgacaatatttaggaaaaaaactttattttgagatcaatctaaaaattcagtgcaatgtgaattgaagctataattcagtgaagtttggttttattatccacaaagaacagaaaagaaaagtggtccaaaattttcagctcataaaagatagaagaagaattgtcttagagtactttagttgaaatacttgttttccactgtactctaaatggctaaaaaaaaatgaatttggtagaaattggtttcatccattttaggttatgctaacaacaatacaatatattctcaaccttaatctcttacgtgtgaggatgagacttagccattattgttttagtactagaaaagacaatatacacctaataaatagaaaacccctaggttttttttttggtcgttagaaaagatgttctttttttctttttggttgattctatcggttgttaggcaattcactctcaactttcactacgttacaatgtttacccgaaaagatataataaaagcactctcataacttgtcattcctccgtaaaaaaatggtactgtaattttgacaactttgaatgaatcttatgcagctattgtatctggaatcgatctcttctttgagatttttagaattggtaaaagaacaagaaagctttagatgtgctgcgtagagctgcaactaaagatggtggtcattgctttggatgctaaatgatgtggagaagaatcaatttccttcggattgttcttgaaaagggtttagtagtctgtttttgcggtatgtttcttacactcttggcagtgaaagcaaaaacttatcagttcttctattgagtgattcattgtcttccttttttggtctccaggatgctgatgtgatgtggttcatgaactaatttgcttctcaatgctttcaatatttaatgctttcttatgatttctttgttgagttgcatttgactgagaactctcgtgagatgcttcacatacttacaaagtctcagtctgcgcgcatggaatggtattgtatatcagaagaccattcaatatggagatgttgtagtaattgtcgcgtaggcttctttcttatgcttgtgtcttttctatattgttgtgcaatctgctagttttccagtatatggcaattataatattgtatagttaggtattagcatgaggaattcagctgacaatcggttgattaaggtatttatcaatgggatggagcccatcacaacaaatatgatatgactcaaaatttgttgtccttattgtctctctcttctttctggaatatttttgtatgcctatgttgatttttaaatctcccataatactcattttgttgcaggtgaaaaagttttagcaagcacaaagttgcagctcttcaatggagattattaatttagaaatgccaaaagatagatttgctagatatatgtataattgttcagttatattcattgtaaaacagatttctttttgggcggcaattgattttatatataatatagtgatcttttctgaatttttggttagtttgaatttttattgtattgagaaatacagaaataatagaaaacggaaaaaaatagaaaataaatacactgaatattccgaaaatttacgaccgatgaatgctctacttatagtaaaattatatcacatgctgatacactgtgctgacatgccatgcagaatgcaataagcaaggatcccctatatgaccaacgtgtaaaatttaatatgaaactattatttttggtaactactgttcctgataaataatgtaatcaacttaaacaaaattcatattattcatgaaaatattctcaaagttttagtcatctagtacatataataaccccataaaaaaaaattaaattgatggtgttatgactgatgagtgcgagtatgattatatattgaaaatattcaattagttagtgttaaagttattcaaaatattatatgcattaacctaatacttgcgaaacagagcatgttatttattgggtaagtcatacaaaacaaaacagaaaatacattaaactaaaacagaggtgacacaacacaaagtacaagaacaagtagacattaaaatcaaagccactcttggaaagtaactcctatgggtttcaaccataatcctccttgaataagcttcgccacagtgaattgttcggcctcttttgagtctttaataactttaaatcccttgcaattcactctcttgctcgtatccgctccaggaccagtattcgcatactctccataatacaatgtggagagcgcaaactcgccatcccatgggaaccaaccagccgggtcaatgtggttgtcaatgaaagacaaaatgatcactgttcttgagtacaacttccacggtcgttaatgaattacaagttgtacaagggattttaaaagggttttaaaagatttacaaggaattttaaaaggttttaaaagatttacaagggattttaaaaggttttaaaagatttacaagagattttaaaagggttttaaaaaatttacaaaggattttaaaaggcttttaaaagatttacaaggcatttgaaaacgttttaaaaagatttacaagggattttaaaaaggttttaaaagatttacaagggatttttaagggttttaaaagatttgcaaaggtttttaaaagatttttaaagggtttaaaattgttttaaaaggattttaaaagatttacaagagattttaaaggattttaaaagatttagaaaggttttttaaagattttttaaagatttttaaagggtttaaaagtgttctgaaagatttacaagggattttaaaagggtttaaaaatatttacaagggattttaaaagggtttaaatgggattttaaaagggtttaaatgggttttaaaaatatttacaagggattttaaaagggtttaaagggaataaatgttttttttaaaaagatttataagagatttacaagatttacaaggttttaaaaagatttacaagaggtttaaaatcccttgtaaatcttttaaaacccttttaaaatcccttgtaaatcttttaaaaacgttttaaaatcccttgtaaatcttttaaaagccttttaaaattctttgtaaattttttaaaacccttttaaaatcccttgtaaatcttttaaaaccttttaaaatcccttgtaaatcgttaaaaccttttaaaattccttttagttattttaaaacccttttaaaatcccttgtaaatctttttccccccataaaatttttttttgcgataaaatttaggcgaaaaaaattaatatatcattttgttaacctaaaaaaatttaaaaatagagataaaatggtcattaaaaatttaaagaaggtttaaatgaaaatggataaaacaaaagggtagagttaaaaaagggcatcctgaaaaaggcatcagaaagaaattttcttttaattatgcacacgttattttaatggataagtgttaaattttatatcaaaaaaatatatatatcatatcaaatcaatataattaccatatattaaaataattaacatataacaaaacataatgagccaaaaagagaaatacacaaaatggtttggaaataaacattgtttaagatatagttttgttatattctataatctcataaattagttttaccttcgttttttttttgggtcaaactgtaatcttcattgaagtaatcttaaaaggttcatacaacagggaaatcaaaagaaaacaaagcctctttggctattgcatcagctgacatattagctaaacgtgaaataaagcagaatttaaaatataggagtgaacgacacaaacaggtcatatcatgaagtatcccctgaagctcattcgatgtggtctctgtattgaacagagatatgaggacttgagagtccaagcaaactgtgatggaggtgaattccattcgcaacgctgcagtcagcgccgatttaaacgcaaaggcttcggcagctaaggccgaaggtgtatgaagtcgagaagacgagccctggtggataactctttggtgttgagttttaaaaatccatctcataccgcaggagccagagaacgtgttccaagccgcgtccgtgaaacaagtaaaatcctcacactgaggtaagacaagagaaagagcctcagaccgaggaatgctggtggaacgaacctcaatacaaggtaaagacaggggagccgcctcaataagaggtagagttgtaggtatgcaacgtttaggagccttacaagtcagcttcgcaacacagagagccttagacaaagtgttagcttcagtgatactcctattttcaaaaaccaataagtttcgggcagctggccggttaaactgaaacaaataactatgtctaagctaccatgagacaatttcaagccgagccaaatcaagacagaatctgcatactgcagaagctatcgcaacaaagcgataagggtgctagaagagagcaaaaacatagacacaaaagtatctaaacccatcgaaattgattgagttaaccccgagttccaccaaaccagaaccgcacattcaagaaacaaattccttcccatattagaagaattagagaacgagaaggacaagcaaacctgggggaccatctctccaaaccagtgtggaaagaaggactcgtcgagacgcagcactccaaagctattgagtgactttgcagaaaggagacggtttctcgtcgtcgagggtgactgagcaagagatacaataatggagaggcagactgagggtcagggggtcaggtggttctggtggagtcggcggagaagaagactccagtggtagagcaggaggaggcctcagatcaaggaaagcaaccaaaaatatcggaaaacgatgagagtggctcgaagtcaaaagaaagaaagtcatctcatgtggaaagtctcaccgaaaaacagcaacgccgccaaaaaagaggtccgcctgagagatctcgccttagcagctagcaccgatcagacaaggaagataccagaagaggaacgtcggagaaagaagctcatatttctaagggaagcggctccttggtttccgtgcttgggagagaataattagggcgaacacatttttttttttttactatagtcagctcataaattagttttacataataccaaattcacattaaatgacttaaaatttaaaaataaaacattcaaattttatattaacatttcatcaaataatcaatctctctaagccctattctcctaatctctctaagccctattctcctattctcctaatttttggtgttttcattaaatattctcatatttaaacatggatactattgaatgtattacaaaattgatgtatccctttgaatatataattgtatatttagtatatgtacttatatacatggtgtgttggggtttagtgtattttattaatacatatattaattatcaaatttgacaaattaataagacaaaaataaattttatcaaaattaaacttatattaaaattcaattaatttaattaacaataccaatatattaaaatctaaactacagtcaaaaatatttacacaatctcaatatattagtgaaagagaatctatcgatcagatttaagaaaattattgcataccttataattttgttgttcattggaagatagtagtcaaattataaatcatcatcatgtttctgcaaattaacaggaaaaagaccgtaatcccaataaaaaaaattcaatcagaattactcatcttataaatatatagagaggtaaaaaaagcttaacatattactttgcataaaagataaataattagaaagcaagacatactttaacaaaatcatgtgtgcgtctacattttaatctcccacattacctgcataaatattttaaaaaacagatgtgagaaaaacatgaaaaaaatagagaaaaacagagagtgtgagaggatacctcgatatattgttttctccatggtctcgtcgatccacaacctcagttttaatttcttcatggtctcgttttcttctgctagaataaaaaagaaacgagagagtaaaagaagataggaactgctgagtaagttcttgaaatgggacgtacaatatttataagatataaatttttaggtttaaaatatgcataaaatattaaatcgtggaagtcaagtttaatgattatgatgaatcccataattataggagaatgtttagcaattatcttataagtagttatttaattatggaaattgttcggaaactttatgttaattcaaaaatgaatatccaactaaatatttgattacctataattatggagaagtgatatattcaaatttaagaaaggaatatacgcattggatattttaaattaatatgattcagttgctgaaaaaggaattcgattaatttaattaacaaaaattaatataaaccaaaaatgtaattaattttatttttaaatgtttaaaaatattttttctattttaattatcaaacataaaaaaaagtttagttaaaattatttttccagttatttaaataaatttagaatatttaacccaatttcgaattcaaacatattaattcgatatttataatgttatatctataaataaagcagctttgattatgaaatgttttataaatattgattggattaatgatctcttagaatataataaatattgttgatatatgagtataattagttttccaattttaaacccacgtaattatgaatagtattgaataagggaatatattaattggaaataaataaaaattctctctccaaaaatcttgctatagaatttattcaaaaaacattaatggctacaattaattcaatcgaatggccaagattataacgtatgacccaataattgtaaacccgggtcataaggatccacgtgttttttaagtgaaggcgagagatcggacggtcacaaacaattcaatcgaatggccaagattataacgtaacttaagtgattcttagtaaaaggtaaactttttcatgacattaacattttaaacatatgatttaaaggtaaaaatttttttaaccgagaatcacttaacgtacgtctcaaataatagagtagatgttagatttatttaattgaccaataacacatgtaaaatcaaattcgttaattttctttttgattaataaaaataattatatatatgtatatagacataaaaattagtatatgtaaatttgtttagttttttaggttttctatttttttaagagaataaaaatattaagtctttaatgacacatataaacatcttattgttagacttgtcacatattatgatcttgttagtgagtaattttcaaaaccgtatcttaagtaactttcaaaactttattttatataaatatcatgatctcctgagtttgagttagtaacttattttatataaaccttatttcaagagtcgttgttttggtggtatattgttttctagggtcctccaatatattgtctgattttttttgtttttttctcttttgtttttttgctttctttcatgtcttgaaacgatggtagaataataatacgaatatgtggtgctcgtagaatctctctcgtctttccacactttacattttctgattctctcttcaattattcatttgcttcaatctcctaatgttaggagcttttagttctgtatgataagattttagcatgttataagagtttttacaaccataaattggggtacaagattgataactttgattatgtatggcacaaacatttatataccaagattgattactttgattactttaaggtttaccggcatgagaaattagtgctaaaatataattatttgattttttgttcttcttttttctctcccatcaaattgtttcactgctttttcacgacttcttgattcgacaattgatatttgtcccccttaaatatttatttttctgataacatatattctaggtcatatggtatatgaacaaactatactaatagtcaaggtcttggaacacgagggagtcgcatctctccactttttgcatctttctactaattgtttcatatttggtaaaaatgataatatttagtttatgatccaaagataaattaattgggattgacaaagaaaagtcaacttaattatagtagagaaaataaaaaaaggtatgagtggtagccaattcgtattttcccttattatataaagtacggtttcaaaagttactaactcactagattatgacacgtggtagtcttatcaatctcagattttgacatgtgtcaaataaaatatattcagaaaaacattatatggaaactactttctcattaaaagttcaacatttaatggaaatatgtttcaaaaaaagaagataattatataatatttaaagggttggctgattttatagccataaactaattgcattctcagcttttccccttatactttttgctcatgaaattttcaccataaactttgataattctttaaattacatcaattatagaagaaaggaaaagtgattactttgtccttaaaagtacacgttttttttggaaaaactaaataagataattatacaaaaactatatgtatcttattagataaaaataaaaattaaaaaaggaattagtaattcaaactcattaaaccccaattttgtctttcaatctgttggagaaagagcatatgtggaaaagacactttccttttggttaaaacgtaactcaccgttgtctatacttcgctagccctaattcatatgaccaaatattagaaaaggggaatattacaattaattatcaaatatagaagaaaaaggagtatatacataaatctacaaaagaaaaaaaaaaggtaaacatccacctctatataacaaagaaataatctcttattttttctcacaaaacaaataaacctcaaaatcaatattgatggcttcggtcttgaattgctagcaactaacgggaagctcttatacgcagagggtctattggtacgtaaacttctttctgggctgtgactataacacatacactgtcaaatttattttctactttagacgtgcatgaccagacacattgctattagagtattattgtacaatgcatgcattagaaaaattattcttcgttgtttttttgctaaactgcaaatatcatattaatgaaatgggtggctttacaatgggtgcaaacctaaaattggtatcttggcaaaaaaaaaaaaacaagaaagcaatacaacaaattggaccagacagaatcagagaagccaaagctgcatcagcggcctgaaacgctttttgtggcgtctagcagtgatagagttcttaatttctttgtcgatttccttgaagatgactgaaggcagcacatagacatggttgtggtgcaggttgttcctttgcttccaaatagcatagatgacagagtgcgccacaagcttacgcaaagtggttggtgaacgaatggagccgccgcagagccagtcaacaaggtgctgccacgaagcaaggttgatgggaggcacacccagtctcgagctcacagtaaaccataggaagtttgcaaaatcgcaagaaaggaacaagtggtctcgggtctccggatgcaaggagcagaggccacatgttgtgtcaatctgcataccccaactcgcaagccttactttagtgggcaggcggtcgaggtgagccgtccacagatggaaagcatgcttcggagtggctcctttaaaccacacagctctcgcccaaggcaccggagctgaactaggcctgagagcagaccaagtagcagcagcagagaagccttgacagaccttgttgtccaccacccaatcataagaatccaagtcctgcgcatcactaggcatagagatgttagtgagatgcgtatgaaggctgagagcttgatcagagcgcgggtcagcaatgctccagccctcggaggtgcacacatcactgatttttgcatttaagtgcactcttaagtctctaggaccctcattgcccagaaacttgattagtgggccaaaaggcgtccagttatcaaaccagaagctagcatctctcccgtttccaacattgcacctaataaaccgctcagccaccactctaaggcgaaggaggcacttccaattccaggagtcatgtggcttctcgggctggttccaaaagctcgttgatttgccgaggctatgctgcttgtgccaggcaacccacagagagccgctattcgagaacagcagccaaatcattctcaagtacaaggttctgtttgagacagcaaaccttcttaaaccaatccccccttcagctttgggtaagcagacctgagaccaagcaactttggcgatacctttcttatcaatcctgctagaccataagaagcgagagcaaagggactcaatttttttgatacaccccagaggaagaatgaaggaagagatccagaagttgacaattccagagatcacagaagctaaaagctggacccggcccgcaaacgacaagagacgcacaacccaagagttaaatctggcagtaatcttttcaatgagaggagcatactcagcaatagtcaacttccggctcattaaaggcaatcccaggtatctaacaggaagagacccaagcttgaatccataactagccatggaatcggattcagattggctcaaacctgcgtgataaagctgcgtcttgtttgtgttcatgagaagaccagaccaacccgcaaagtcttctagggattcaacaatgccatgaagagacgaactctttccatcaaagaaaatcatcacatcatctgcaaacattaggtgagagatttccaactgggaggttttagggtgataagcgatgtaacctgaagtgtagcgagattggagcagcccagagaaaacttccattgccaaaacgaacaagtaaggagacatggggtcaccttgtctaagtccctttgaactccagaaatgacccgctgagtggccattaagaatcacagagaagctagcagtggataagcattccaaaatccaacatgtgaacttttctggaacattcaaagcacgaagagctgaaacaatgaagtcccagcgcacggagtcaaaggctttcctgagatcaaccttaagcatagaactcggcgcaatgttctttttattgtaaccatgaaccaactcagtcgcaagcagcacattttccaagaacaagcgacctggcataaaagcagattgagagtggctgattgcagcaggtaagaaatccttcagcctatctgtcaagagcttggatatgactttgtagacagtattgaggcaggagatgggtctgaaatccgacatggaggaagcatttgtaatcttggggatgaggaccagattagtggcattccattgcttcagaagcttccccgaggtaaagaattcatggatagcttcggtgacctcaccaccaatgataggccagcaagcacaaaagaactcaggggagaagccatcaggaccgctggctttgttcctaggcaaggaaaagaaagcattcttaatctgctcagaggaaaagggagtatctagcgagacttgctgcgcaggagagcagcgatagctcagaagattgctgatgtcagcttgctcaaagagaggtaggccctgttcacttcccaaattgctctgaaaatactcaacacaatgattctccagattctgctggccctcaatgcgatcaccaacggggtcagagagaaaatgaatgtggtttagggactgcctagcagaggccatcttgtgaaaatatgaagagttcatgtcaccctcacgcaaccagttcactcttgacctttggtagaagaaactagcttcagcttcagccaggatacgccactttctctgagtctctgcttcaatcgcagcattagaggggcatggggaagctaaaagaacactctgagcaagcaacaaggcgtcatgggcctccttagttcttttctctatatcagaataattatctctgctgaaatctctgataactttctttaaagccttcaacttaacagagacacgatacatggcagaacccgtgacgctagtggaaaaccacttgagacaaataagggaaaggaagttctcatccttcagaagaaagttgttgaacctgaaaggcttctttgacctaggagaggcagacatcaggcttaactcacaagaggagtgatcagaaaagtctggctcaccaaataatccaagagaagaggggaaggtggttgtccacttatcattgaccaaaatgcgatccagcttcttggcaacaggagccctacttcttttgttccaccaagtgaatgtgttacctctgaagcttagatcggtcagagaggcaaggagaattgtttccctgaagatcctggtaggcctatccacattgaacccatcagaagtagagtgctcacttggatgaagaatctggttaaaatcacccaagactgtccaaggcttatcaatgacacagggatcattagagaagtccacaatttcgttccaaagaatctgtctagtcacttcatccgtcgaagcataaacaaaagagagcaccatagtgtcagaacagttaggcatctgaacctcgcaacagatcatctgcagcgatttaaagagaatactaactttaacacttggatgccaaagaagccaaatcttacccaaaaccgagaagtcatagttattatcaaaaagccacccatgcatcaaagcattcaaaaacttctgctgctttggaagccgaacatgagtctccaagaggctcccgagaagaggttttctacttctataccacttcttaaaaccgctgcggtgagaggaagaattaaaaccgcggacgttccaacaaaagatgtctatcgacataaaaatcagtgtgatttggggcctttgcccctcgcacttcgctgctgtcgcttagacaacacctctgtgaattgctcctcattttccagatcactatccacatcgtcagaaggtacatcagaagaatcatagtccgcctctgagactgtggtactcttagccacgacaatacttttccctttgcctttaaaggaagcagctttacccgtgataggattgggcctctgggcttccttactagagccagccatagcagcggcattggcgtctgggaccgaaagaggcgggccaatggtcaggacaacgctactcctagttgagcgcctgttacggggggcaacagtattccaatcgccttcctcgacaactggcttaggggttttggagcgcctgcgcctatgcctctttttgaccccttggggctggtcacggggacaagcatcagctaggtgcaaagtggagttgcaagccttgcaggtgataggagccaccttacatttcctcaagctgtggccaacctccttacagtgagcacagactggcggcatccaagggctcgagacctcgatccgcctaatatctcctgaagcaaagtgaacattgactgcttccggaagaggtttcctcggatcaattatagtgaagacccttgccacttcaaggttagtcttgttggcagtactaggatggaggaatttgggctcgccaaccaaactagcaatgtgctcaaggccattgtcattaaagaattgaaaaggaacgtgcctcagttcaagccaaatcggggcagtagtcaactccggcttcacaggagtaagaccgggctcccactttgcaacaaacatagtctgtccgtcgatctgccaaagacgctggctgaggacacgagttctggtttggacgttggggatgcaaaaaaggaaggcattaccctccattcttgagacagtgatacccggaattgcttgctccaaattccattaacaattgtgtggatggtgccttgagcagggggatccgaatagaattgacccaggataaaagactcccaagatttcttatgcttttcgataatcgaatcaggaatcttgacacaggcctctccagaaggaagtgtgaaaagccgtgccttgcttttgaagccgtttagaagttcctttgaagatatcacaccagctgtcaacctcagctgtgttagattcaggcttgtttactgggtctgccacaacaaccttgacgggtgtagctggcgcagtagcaggagaaggactcggaccccgagagggagtcacttcacaaggtactgatggagctaccgctggaacagaggtagccgcagaaggagctccagccggtacaggggtaaccgctgaggtcacatcgattataggcaaagtttccagatctgagccagatctaggaacaggaggagaaggaatggccaaggctgtctgagggacggcagcttgggcatctgggagagttgcagacggctggatctgagagatcggcaaagcaactgaagagacagaagcgagcgaagaggaaccaacactacgagggggggacgggtccggggctagggagcctttgcggcgcttttgcttccccatgaggaagggagggcctgaagagagggacgaagagagggcccggcgccgttggagacgctggagattgtccgtgaaagaaaccacttttcacctttttgggagagaagtcaacggtcaaccttatataaacccaaaagatatatattcttcgttgttgtttacatttaattatgtatctaaaaattatgcttatcatctaaaaaaggtaagcaataaggcatgatattaccgtactttttatataaatgtcatgatctcctgagttagtaactttcaaaaccgtactttatataataagatatcatgtacacccaacaaacaaaaaaaaaggtccagtataataccgagttttggaaaagcccatatttatgcccatttttgaatctgtcattttcattcgggaagtcaacaattttttttcaaaaccaattgtcttcacttctaggcttcccgacatcgattaatcaatttcagagagcaattcttcaacatccgttaacaaccatgtagctcatgttacaattcaatactttgtgctacacaatttgattcaagtattaggtaagagtttattttcctccgatctgattttttataatttgattcgatcaatttcgttttcaatcgttttatggagatatgtagtacacacatggaacagctaattggttttattcatacagctggatttatgattcacaatctcaatcggctactcaatatgcccaactatcgatcatttagataagtcaatcgggatttcaattaagaggtgaatcgaatttcaagttgtgcaatggagacccgaaaatcatatttagtgacctctgtaatcaatttgtcgtaaagacaaaagtaagcttccaaatatattcaaacttctttgcgtttaattttcatgtttgaatttgagttttgaagtaaattatataagtgtcatctgtttatcaaatttattcagacttttttaaattgcatgttttagtattgggttttgaagatagttttgagtataacatgtatcctatatgaatcatagattgatgtgctattttctgtatgaacactacgctatataacatggaataataacgtagtttgaatttgataaacataattagaaacgaggaagttatatgaatatgttaagtaaatatttgtactatgaatttaccaaagctagataagatactgagtttcataattaataactaaatatcaactataaatcttcaataagaaactatgctgtgaggaatagaaaattaagtatgaaaattgatatttataaatatagatgctacaagtaaattggttatgaaatatcttggataattagttaatatttttgattcttatttgtcatagattgtatgttaagcattaaattatattattaaagcatgtttcatttattaacacaaatttgacttatttattttatatattaaagtttattctatatatgtaggtaaaagaaagagagaacgatggcgagaagtcttctggaatcaaaggtatttagagcataagtaaaacatgaattattcttttattgaaataatatgaataaaaatgtaaaaattgaaaataaaaagatagtacataaaggaaattgaatcaaaaaagttgaatgaaatggtattcatccctcttattacataaattcgcgcgcaacacacactttagtgtatgtctcatacacgacaccatcccacgtcctcagctctttgttattttttggacttgtgataaaacgcataagcattttcaatgcaacatttctttcgattttccgtgaactatagctagcacggacaatttttgtacatcttttccttagttgaaactttttttcttttctgttccaagtaaaaagatcagctacgtcaaacaatgtaaggttcctagcctctaaattataagtattcagctcaaaccatgccaacaccaaaggatcatcgacttcttttgaagctatgtctcttggcatggtttgcttttggtggctacctttaataaatttaatttactgatgtaagaagaaaatgtatggtgatagattctacagttacatggaaagtatataaatatataaagtagtctttagcttagtgctaagttttcatgagatttggagttatctccaagtataacacaagattttataaataatattgacgaacattatggaaacaatatattttgatgatattataataattggttattgtcagtaatatattcagttacaccaataaatatttatgcaaaatctataaaatattctcatagcataaataagaagatacaaaatctataggtttcagaagttattatattagtgtatgattacaattaatatctaacataaaaaatattgttatataaaaatgttttaatataaatatttttttttgcggaattataaaaataaaaacttaacattagtaattgtcgaaactgtaacaaagaaaattagaaatttgttatggtaaactaatgttagagtagcaaaaatgaaaataacaaacttcatgtaaacaaattattcataaatctataagttttggaaaatctctttgaagactacattcatttttttctctgaaacttcgtatcttagtcaacaataagcacttttaatcccttcttcgatgtaactctagatagcgctacataaagctggtcgtgtgagaatactggtcttggtaaataaagaccgatttctttcaaagattgtccttgactcttattaatagtcattgcgaaagcaacaactataggaaattgttttctacgcatgttgaatggtagtttagtatcagatggggtaatgagaatctttgaaatcaacactttatcaccaatcctacctcctgtaataataacagcctgtaaaataggcggagtcatctgtatcatctgaagccttgtgccattgcataatccaccttttgggtctaaattccttaacaacataattggggcaccaatattcaaacgtaaacaatgatttggtagacctgatatcttgatagagtttaagaaatctggagtgaacactggattgtactctgaagtagtgtcggaaagatctattgaatcaatacttaggtactgaatttcttcacctgatatgaaaaagttaaaattaaacattaaatttaacatgcaactaataatacagataatatagtattctaatacatacctggtagcttctctaacagacgctgattaatagtattaacatcctcattggtaggagacaatatagctctctcttggatgaatttgagatctttattttcgagtaaaagagttggatctccacaaatctctaaacttatagctttaataggatcttctccctctgtaattaaaaactcttctggaataccaattaacacttctccatcgtttggtttggcgaagtgatggatttcattaaccatgacttgtaagttagtgaccatttgtttaattctccttttcactaattgtcatcttttaaaaacatttggttttacaaagttctggtgtcgtgtgtttgcgcacggaaaatccacttgaaagcacaaactcagaaggagatttctacttttgtattatgactccaaaggagatgtggccaaaaagtaattcaaaatacggctagctaatggacatggtaaataacttcccattgttagacacatatatgcatggttatgctaaaatctaagttattaagttttggttcatttcagcatatgtgcccaatcatgcatttgctaaggcgaaggtcgttgcagaccccatgtccctatttgagtgataggattgcctttctcgatctgtggtttgtcaaacagttgtgtgatgaagacaagaaatttgattcaattatgaattggtttttctctgaaacctatatcaagggggtaaatggcgagtatccaataactgggaagacatgaaaaacatgggttaaagatgttgacatagtctacttggttcacaacatcaacaacaatcattgacttgggaggtagacttgttaaagcggaggatcaatgttttcgacagcattttaagttgcaacaaggataaggaggtaagtaaagcatgcaagcctttcataagaatgttttctgccttactacaagcggtagcgtcaccagagaagaaaaaagaaatcagtgttgttgcattcagtttctatagggttaaaactgcaccgcaaaacattcaagaaggtgattgtggtgtgtatgctatgaaatacattgagtatttagccataggaattaatttcgttggtctaggtgaccgtgcaatgcgtgatcagaggctaaaactggcagcagagttatttgacgaggttccagaatcagattattggatacaaatgtctgatccaaatccctgaggtgaagaaagatggggagttgagttcctatctgagactaaaaaagctgtctgaaaaatagtggtgtgtcattcctttttgttgaagttttttgccatctaatttttgtaaaacttaatattcgatagttattcggtttggtaaaaacaaaatattgatgtatccttgtttattgaggtttattaatgaagtaaaggctaaagatgaattaatagtcggtaatagagttaaatattacagcttgtgactcataattaaacatcgatgcatcaggtttttaaaatgctcccctaacacaactccttgaaacgacatgaataagtaaatgcaaagcaatcctcacatatgtctacattaagaagtagttaaaatggcaatctggtatatcaaagaaatgccaaaaccctttgaatactttccgaccacctacaccgatatctttgatctgcctttcaaccacattggcaatatctactctttcttgaagagtttcaactcttctaaagaaagctttggtgacgtaaacaccttggtcataagcaccacatcatatcagcatcatagctaaagcaaacgtcgcataaatggaagatgtacacacctctacaagcatgtcaagccgtgcttgcgttggacctaattgagtcaattggcagagagcttcgaggtaccatgctgtcaggtgtccttcagtcgcgcattataacaggaaatgacggtagatggatgtctctcttccaagccgagagttgaaaatgaattcgtctagatcaacatcggctaaaacttcaaatgtgtagacttgaatttgaagccaagggcaatctacaatgaatgggccaaggtaccgaaagccctgtcagccgacgcgacggattatgccagttactagtgcatctagaatgaagttcatattttgtttactaaattatgtccgtcgctacgtatatttatactaatttgaaatatttggttgacctaatcgacagaattgtacacatcggtgacgcataacaatatgcaatcatacaaaactagtgggccacaaattattgaccaaatatcaaactaacctcatataaaagcccacttaatgaaataggcccatttgcaaaataaaagacagttattctattataacgtaacccccgaggagggaaagtgaagggttgcgtctttattcaattatatatatattagagtctaggttaaccctaaaatcggtgagtctctcaactcttctgtttaaccctagcattttatctgcaacttttcaacttctgatggcaagagtcgattttttgggcaatttcaatcttgagaggaccaactggatcgtgtatgtcaagttattgagcatctggaataagaggggagacatcgctcgtgaaccgatgaagatgattctctatgacgaaaaggtaagtcgtttcaacctattcttcttctttgcatgtctttaggatccgttttttgttgaacaagattagaaatagtagaagatttggtctttaatttggattagggttcgaaaatcgatgcaatccttccagttgggaactacatgtataagtttaaggtagtctcgtagaaggggattggtactacatggctgacttccacgtgaagagatccactggccctatcaagtacgcgtactgtctctttctgatcgagtgtacttggccaacaaaaatgtggcctataagtcctagatctactcgctccttcattgactgcatgtacccaaatgagttacaagatgccggtgaacatgacaaacagtttgctacaggtaagttgatgaactattaaatattatcaatttgtttctatatttatcattctttaatattcttccctaccttcttggaagatgcaatgtgagtcatatcaagtgtctcaaaattcaagcggtttccatatgtctttcgtcaaggagagtctgactatcacgtcagatatgtcactttcaacatcaaagataatctgtaagtgtagacatgtcatatttcaaatatattgaatataaaattctagatttaattttttggagtttaatatgtgttggtttggaatcttgtttgctttagcgatatgatcataacctgtgttgctgtggagaggatgtgtgaggtattaacttctaagttttatcgccttattagtgctccaacttacaactacgagccacttgtggttatcaaccggttatggaggattgtggaatttgaaggtgtgtcaaactcttctactttacgtatataattttaacactaattgaaattttctttatctaaccctaaaccctaaatttcatatatctatttagggaggaatgccttattcactgaggatgggccttcaaagatttacttcgaccccacattcccagactataatagtcacaatttcctgtacgtacttcgtttgcaaatttaggtttatttttttgcacagacctcccatattactttaatattgatttctatgttttgaaatagcggttggaatctatgtcaaaccgaaagatggaagtggaaattgagaactaaagagaaagttggatgtctaaaggatgcacccttcattcatatgctatggtttatattggatattattaatgcttttgttggtattgttgttgctactcggtcttccgtatattttaaaactatagcttatgtattcggttttgtttccttatgtattcggcatgaccaaaccctaaactcttgcttatgttgttatttaattgtcgaattatatttctttctttgaattgttatggaatattataatttatgattcattgtctttcataaattaaaagataattacagtttgtgcaattcaatgtttcaaataaaaaattatatttgattaattacaaaatagattcaacgtaggttagttccaaataccattgcaaagtaaaactatgtttgtttcaaccattttttgtaatgttagtacaactggaaatactaagttggtattatggagttcgaatttgttttttctcaaaactcaatgaaaattaaagacattgaagaagtactagtaatcatataaaattaattaagttagaaattttaaaattaaatcgatttcacttgtttttagtagactcagtaccacatatcccttatgattttaagcccactttcaatataatcaccaacttagaatgaaaatctcctaattttatatatttttaatttttgaatggacaaaacatttgaaggtctgtaaatataaagttcagttcagtgtactaccaaataaacaatttgtaaatatagaaaatactactaaacatgaaatacacggaaagtaatactatttttttcacaaaaagtaatactatttgatagattggtactaccaaaacattgtgaaatactatgttgtaaaaacctgcgcccatgtaaaaaataaacggcgcacacgtggtgaataaaatatttggtttccccccaaatgtattggcgcccgacaaaatttgagttttcccccaaaaccaaatattccaatttttagagcactttcttccccctaaacattttcgatctctctctcatctctcatcttcttatttcatctttcatctttccccttttcattattatctctcttctcccatctcccatctctcatctctcatctctcatctctcatctctcatctctcatctctcatctctaatctctcatatttctttcatctttctttgataatggatagagagtgtgagagacacccgatctacaatcatttgaaagaggcgaagaggatgatagagcaaatggaaatggtcgggatgatgcaagggattcctaagatatgtccttgtggtgatagcatcgtcgacaatcgttatgatggaaagagatactatcaattgcgagaattttaaggtatgttgatgtagagcattagtttttctaggttttgtagatctagatctttttttgataaatatttggtattttgtaggacgatagaaatgatttgatgcacatccttaaactgtgggataaagctatggaagaagaggtgactagcttaagtgagggtgttgattacaatcggatgaaagtacaacgttgtgagtatctcacagaagaaatgcaaaaagaattgaaagcccaccgtgatgaaattctaaacgtgagtaaagtggtattccgttctcctattgttccaaggaagtaatgtgttatcctattgttccttaatattaatgttaatttccttgtaagacttgccctattctttgtatggctttccctattattgtaatacttttctttctcgtactagcacgaggcatttccagtatttctcttagtcatagtagcacgaggtttttccagtatttttcttagtcgtagtacactacaagaaaacaggtgataaacgacttacacatcagtcgcatagtagtcgtaaaaaatgataatccgactaatcagcgactaacgacgttagtcattattacatagtcgctgaatgagatagtcgtgaattagtcgttgatcgacgactatattacgacaataacacaatcagtaaacaattgtcgttgtatagtcgtataattttggcgactatttaacgaccatagcacgattaattgtcctgtacgaagcgtgtgaaacacgtggtcgtataatagtcgtatcatattgacgactatttgacgactattggacgacaaattctatcaatgtaaggaaataattctcgtagtcatataacagtcgtataatgttttacgactattatacgtctcgttgacgattatattgtgactatgtatcttagtcggataataatcggtaactagtgtgactattagacgactattttacgtctaatttgctacctaaatacgactactgagcgactacttgttttgtccgaataggaatttggtcatcgattgttgggtttcttgttttttgtttgttggttatcgattgttgttttcttgtttcttgttttctccttttttatttgaattgctaaaaagatgaaaagacttgtatatatagaaaatcaagtacaaatacacatagaattatcttgtttattacacaaacaacttattcaaataaacatatgttcaagtagagtttgggcaaagataatctaaggatcattaggtggaggacttggtagacgttctgtggttgtggtagagtgacttgccatgaagtccaagaactgcggatcggtttggcggagatacttctcgactaaagacaattgctcgagcttgtccttttgctcagctgtgactcgggatgactcagcttctcgggcagcaatctcagcatctctcttctcattatatgcagcctgctcttctattttcctttgagcttcctgcagccgttcttctagggcttgaaaggatgatgaggaaccggagtgatggcggttggcgctgcctagagtgtcttttagacatcctagtccataaggattgcctcttgaatcattttctgtggactgcaagaaatagagaagaagctcattagtgacagaatatta

SEQ ID NO: 525 - DNA, 88848 bp, Arabidopsis thaliana
aagcttcatctcgttttctgccttggctagggagagcttgatagcgcttatttcctgttctctggcgtactcctcagcccatcgaacgttctcttttgaatcttcatcgtccgagaccccgatctgattggcctcgacattttctgctcagggaggagggagctgcggatcgtttccttctgttcgattcgtgtctcgattccccaagattgccggctcggctcgatctcttccaatttccggtgcggttcggcggataggcctcatcgtgttgccaggtgtgtgtaacacgagccatgttggattgagatctgctgctgttcgttgatcgtgaagatgccttgcgccgaaacgagtagtcctgatctgtccttgggaggtagctgcttcgagttgttgcgccaaagaccgattcgcctgttcttgatcgtttactttcttctgaagttgagccatcatgctcctcaattctgctaggaccgcgggagcggtggcttcaggaacgtctgtttggtttggagggatcgggtttccctctacgtcaactgtgttaccggggattcgaatgttgaccattgtggattggttggttggttctgtgttctggaagtaagagaaatctcaatcccctccttctagcgccaaattgtgagagtcgaaactcgcacaagagaaattgtactaagggtttcttcaaagaatggatctttgtgagtttctcacagaacaacagcttgattaccgcggacggtgttcttggttatattattgaaataatgaggattcgatcgtacaagtgtttagaaatatgaaaataagtgttttgccttcaaaatcagggcgtatttgatagcctgaagttgagagcgtttttgtgcgtgtctttttctttgtcctcagaagttctttatatagggcgttatcagatcgcttctcgcgatattctcggaagatttctccttatcttagagctggcgaaggagatttgtctttatcttccgaagattctgggaactcctatatttggtgatatcctcggagattctctaatatctcttctgggtttttcggaaatggtatgttcgatctcatattggttaagtcatttcttgaaggttctgtcccgacccgatgttcctccgagccgggttgagctgaccctcaggttgtggttgagcggctcgaaccttgttagtcgaatgatgcgctcacgaggcgtcttaagacccgcctcgggatgactttctgggttgtcatccgaggcgcttcaagaccgggtcgaggaatcctttgtggtgatgctccgaggcgttcttgttgtcgcctcgggatggttcctcgacatgatccccgaggtgttttgaggcccgactcaggatggttcttcaacaagatctccgaggcgttaatcatggtcggctcggttacctaggtggaatccgaccccaacacgcatcttgaaatttttgacacatatccatctaggaacttcacttcagcaacaacccactagaacaactccttctttgcatcaggagacaagtggaatttcaaaccggtaattttccatctcgtgtaacatgcaactcaggtctgctgcatatttcagccaagtccaaccttgattttaaactatcttttgttttgccctgcagattcaagatctagcattaagtataacttaggtctggattcaatatctagttaattactctagatctagcattaagtataatcaaagatgaaaaattctacagataacttaacagggggcgatctactaaaccatatgaatccctaataagaaaccctattccaaacaagcaaactacttagacatattgaatgaaacaaacaacataattgagatagaaagcataaacacagcaaataagataggggaaagaagggatctcttcactgtattaagaactgaatgaatctctcaagaacaaggtatgaatagcttatatctctgaaaatagggatttgcaaagaacttgataaaagaaacttaggtctaaaacaatatataaaaaccttataaaacgtcctgggtctaataatgtaaatagggaagtcttctggggcaaatttcttcttctgtaaacttgaaagcgtcatggactttgctgggccgaaactggtgtcgatcgaaaatcatgcttagcttccttttccttagctttttctctaaaatgtctccttatctccattgttgtcccattgcatagaatacctaaaaagacactaaaaagactcgagaaataacataaagactcaaaatcctaaccctaaaacatagataaaattaattaaaatagggatatataaactcccccagacttagcttttgcttgccctcaagcacaacacaaaagtcgaacccgtggaagaggttttgaaaacaaaggaactcccaacctaagttccacaactatatccaccaggctttcatcgctgggtctaatcaaacaatctaacattcaagatccttctagactcatccatgtactataccatgataaatcgaccattcttttattattatttttttttctttggtgttctttctctctccgagacttattctttttagagagtaaacaaaagggaactcgcatactggatcgacaccctcggtatttttctaaactttgtaattgatcattccaaataatgtataataatggggtcataggaaacattcctacctctatacagtatctgaaaatcctatcaatctctcatttctttttctttttataaggggagaggaacactttttctttatcacatgggtctcaatatcaggtataaacaaggagtcaagatctatgaatactaaccgttcgaagaggtaaaaggaagatcagtgagattagctccagccttagtggttgtgttggaaactaggatatcctcaagtctgttggtttgccatctagattttccaatagtcggattgagtcgaacctgcagcactcatcaaccaggcaataatcaagagaaatatagatcatgattcctaactaaactaaaaaaaacagtttttttttttttttttaagggagactcaataaactcaaaaacaaaaaaataataggaatcataaataaaagcaatattagtaagaacctctccctgactaaaatggcactgtctccagtggcattcaaatccgaagaaggcgggaaaaatgaatcaaaaataaagaaaataaaagaaaggaaaagaaaaatcaaatcagtgggttgcctcccactaagcgcttgttttgagtcaatagcttgacttggcggagttcaggatgtggtgggataatggaagattgttgctgccttctcgccttccaaggcggtgcgtaaactgatctggtcggggcagctgcaagtgtcgatcgacactcatggtgatgtcgatcgacactctcctcgtttcctgcaagaacaacaggagaaagaaactttcgaagaactctaggcttgttatctcgtgaagcagacttcgaagaatctaaagaattaatcgatgggtaagcaggagaaaagatagaagagaacttatcacagagggccgcaagaggtgtgggctgaagagaatgtgcagtattctctgtctgtgaatcccgagggtgtcgatcaataggagggatggtgtcgatcgacactgttgctctgcaactctcattggcgagctgagctgatgggagcgttgtttatggctctggctggggattctacgcagtccgaggaggtgtttctgtgctagaggcaatgatattgatagtcttagtgaactctgaaccatccatgccaaactccatctccaaatcacaaactttgagagagatcctacctttcttcacatcaatcctaacaccaactatagttgggaatgctcttccaagggtaagaggatccttgggttccttatcgtagtccaggaccacaaaatcagcagggattaaggagttacaaaccttaacaggaacatcctcaaggattccttcagggatgcatttggaacgatccgcaaagaggagagtgattctagtcggcatgtagttagtcatgcctaatctctctgcaacagacttaggcatgaggttgatacttgataccatgtcacacaaagagcggctgaacctgcttgtggagatagagcaatcaagtacaaagctacctggatccgggagcttctcagtggtctgatcaagagtgatggtgcggatgtactcagcaatgtccactctttgtgccttctctttcttaaccttaggcagcatgattgcactgatgtcccttgtcagcaatttagcttcatctgagctaataccattgtcaacaagttgcttgacatacctattgagtggagcagaagatgtctcagaaacattcttaggaagagaagtgaggatcttctccatgatggctgtgcacttagtagcatgaatctcctgcttagatcgacgcttcctcggataagggataggggggcataggcagactcaggctgcatcgggattctcacctcatatggtgcagtccggacccagtgtcgatcgacatcaagtagaactttcactcgaacataatcttgagcatgtgacgtttaagggtcaaaagcacctgtaaaaccttaccttcacacttatcagtttccttaattgtttcctctgtgtaataattgaccggaatattacggaggcaaatctaagttggaagaaacattaggtaatcagcctgaggcctttcaatacatttatccatgagcacacaccagtcatcttttgtccaaactcctgtctttaagatttcaagtaaatcatcttctgatttgaaaataaactgaaacctttcttgagataaagccacttcatagactctattatttaatctccaaattctaggcatgtctaaaatccaattagacatcctttgattactaggattcaagaacctacccataagactgcaatgattcttttcagaagaacataacttagcttgatttggatgaacaagaggtttatcatctgaaattgacaactcttgtatagctttgttcagatccatattcatatcctttttcttgattaaactaaaaccctgtaaacactgaaacacccaggaaacctttttaatcacctcaatctttcttctttagaaaccaaacttgaaacgaatcgaaaggttatgaagacaattagaaaaccttttgaacacttcaatctttcttcttgagatacccagacttgaaacgaatccacagaagaaacgagtccaatatgacagaccagcaccacttcatcgttttcttcgtagcgcaacagagttctcgctttccaccgtcggaacttgctttagaaacacctaatccactctccatcaacatcaatactttcaaattcatcaatatcactctccttcgcctccaacgattcacaaacttttcctccaccaatctcctctaatatccaatgaatcaaattaaacgagttttgtttaaaggaatctaaaccagagacaatgcctagagaacccaagggttctagtcttagacacaaatcggaacaattaatctccaattcatcaacattctaaactaaaggaaaatcacttttcattgaagcttcagaaaagtaatggtctttggtttgtaacatgggagattaaaaggggaaattactttcaaaggatgttcggtttgggttcaaactgcatttttcatttaagctttagaatcagatcggagatacatgaaacgcttggccggagtttcgaacgagaagaaagaaaattataggattgatcgattagcagagatggtgttgttcatctaaggaaatcacaattccaaagccgtgtaaaatctccgccgtgtatgctccatcgagaaacgcaaggagagagaagacacgtacggttgatgaatttaagtagattaaaactggtttaggtgattaaggacaactatgtccttttagtggaataaaaatgcctattccggttaatacattgaaaatgtgtgcttgtagcaaaggcataaagaaaaagggagttttttgtaattgatcccataccagataataaccacttaaatccctcacatatttcttaaaagctggtctgcacgtaaattaccatgtccagtatgcattaggtttgtctgtataactaacacaaataagtcgcattatctttcgtaatagggattggctgaaaggaactgaaaaaaggaagtttggtatacttataaaacgtatacagaggatttaggtactagctaggcgaagatacatacaaggacattccatatataatcaattcattaccaagtgccttcttctaatgcagacttttaaaacatgctcttgcatagaacttgttattcaaatctgtgattaatacccatttaccaaaaaaaagccttgatgattttttaccaattcaatttaagagacacagacgcacaaatcttcaaaagcgatactacaacaatttatagtatcataaaactaaaatcgcttctagggatgtcacctgatagaacccgattcagttctatcaagaaagtaacataaattaggtgagaagtagaagaaagagatgaaaaatcagaagaaattgaggaagaagatgattgtcgattttttaattgatctttcgaccacctttctcgtaagcgaaagagtactaaatccagaaattaaaaggcttaagatgctaatacaatagcaacccaataacaagataacaaggcccaataactttatttgggtacgtatcattactccctctttgaagaagtactttgtcctcaaagtagaaggaaatgaaagctatggaagagtaccttagcttctgttgaccctgcaccagcaaccttcttcttaccgataaagaacacatcagactcctcgactgttgatacaaactgcctctcacctatctcttcagcttgtatttccaacaaagattgctcctctagtggtgaagtcggtttagagatgaaccactctggattcgctgctcctagcaacattactttgtagacaggaatgatctgaactctactctcatttctgtattttgaacttcactggttgcttttaggccctcttgttctagaacttcacaaaaaaaacgaattgggtggtcgtggcgatcgccacacttcataggagagtatcatctctacaaggtttccaagatgaaaaaacagtaatttggtctctaatgtagcgtcatccttgctctttgttaaattggttacatgaggcttctcgattaacgtccatactctattcagctcatacacatagtcagctcatcaaaagagatgacaacgtacaaaatgttccttatactatatactatgaaaagtgttttatataaaacaatagtgttgtattatggaaatgatagctttatttatttaaaatcgtttctttctgtttgaagatgttatgtgaaactttggtacaaatactatctttagtataactatattttgaatatacggcaactagtaaacttgtggaaaaaaacttgtcacttgtaaaactagtataactgtaattagccttatattaatttagaataatattaatatgtaatctaaactcatgaataatgaaaattgttagatagataaatttattttatgatttctagaaaaagtcaaatataataacatattaactactaaattaattttttaaacaatgatggatctaatttattataataaaatcagaacaagtgacatgcatcccacatcaaataacattaattatcaaaaatgatataatattaatttaaaatataatactaattattattatgatgtaatgttaatttccgatttgactaattattggtgtttgttgttttttaattaattctctaatacccttttcatcataccccttttaaaatcaacctctttttctggccattttcatttgcactctctcctaatttgtatcccccttttacctatagtgaactacagaccagcggcctaattttcatttgtctctcttgttcttggtctgtcgccgtcggagagtacgacggcgtcgtcggaatcgtcttgtctttcaccctcgcagtcttcatttcaccatcaatttcccaggtttgtgtttctcttatggaatcgatttcgaatttgttattttagcctaaatgtctcaatttcgaattgaattattcgattttggtgttgattatgtgaattcgttatactattttgtgatagattttggtttcgatttagtgtttagcttgattcagtttattttttagtttagcttgattcagtttattgatttagctctctcagtccatgtgtgaaacaatatacaaaataaatcaaaatcgagatctaaactataagatttagggtgatttgcaaaatgattaattgttaaggtaatccactagaaattgcacaattgagaatcatatttaccatagaatctttggcaaaaagtttcttcaccggatctggcgatttcttcgtcggatcttcaaataggaaatcgccgtcggagaagaagaaattgtgtgtcgaagagaagagaagaagaaaaacctaatctttcagggtaacgtagtcattttccgcaagagaaggggcaattttaaaaatgtccaacaggaaaggttatttttgcaaaagaacactagaagaaagttatttttgcaaatctcccttttttaatcccatgaactcttaaaatatgcttatattttgtaatcgcaatgattctactcccatgtccaaacttttgagttcgaccagccaaggcctgttacgcagtctcgaaaatatggttaacatccatgtctcaagaaatcgttcaaggcaaatcaagatcaaattagaaggaagtttctagaagataatcaattcatggatatatcaagaaagtgtatagatacaaagaaccaatctccatcaatgatgattgataaaatctctcaaaataattgttgaatgattatataattaatttgatttatttttacatttatgttgatgatttgtatattgagccctatataagttcatttatccattcattgtaaatatatagatttttggaatataaaagaaaattgtttctaaagcctaggctatgtttttgtttatctaagttaggtggatttatttacttactaaacgtgtgagtatatgtcctttgtgtggattcactaaggtctagattcgtgatctcatcacaaagtagcagttctcgatccaccatcaaaaccatcaatcgatccaccgagagagggctatcgccagcttgtttgatcccatatctatctcagcattcatccatcaaacaacaagagagagcgaccaccatcttgttgcttcccgtgactccacctcctatcaccaagctttggatcttatatcagcctctagcaacacttgatcatccgaatcatcaagaacagtacgaagtttatgatgctttagcctctgtcccattgcacctatatgatccatctttatatccgttttcccaaaaatctcacacaagaaagttccttgcaaatgcaacttcatgttatagtcatatggattggctttatggtaattcttcctacacttagatacaaaagcaccatctataaagacgctagcttggaaatgacgagatagacgactaaataaagctcttgcaatggtagtcttcccaattccggaggaaccccaaatcccaaccatcctctcacttcctcatattctaagctcaacaatgaactcatctctgttatatgatcttcaataccaacaaaatcctcaacatccttggatggagttaaattcggtttaagcaaaacatcatttgcaatttcttctatcatttttgcttcattaaccctaacaacaagaaacaaatcaatacataaaaccaagttcaacacacaaagcaagctcaacacacaacgagtatgaatagtcaaatcaagttaacgtaccaattcacaaaataatatccaagaatattaagctacatcaaccaaagctgttctccacagatttatctcatcctctgttcatgttcttacaagtcttctcaaatatttttcccaaatctccggtctgtttcctaacatgagaatgatccaaaccttaaaaaaaacagaatgaccaccaatcgcttgatttcttctttgcatttaacaatctccagcaattcattcaagtaccagcatgaagaagcatagtttttggaaaagataacaaccgcgagaatgttacttagaaatctcgatgccctttctcctttctctattcattggttatacaatatatacacatatacaagaatgttctccaagtaatatcaattcacatatggcaagtgaataatacgtattcccttgtctatcactcccccacagtcttagcgtcgttttggatgatgctaaggctggatcgaaactctgtgaacaaaggagtgggaagcccttttgtaaagatgtctgcatattgatgagaacagtgaacatggaaaacacgaacggtacccatagctatgcgttctcgaacgaagtggaggtctatctctacatgtttggtgcgttggtgttggacaggattggtggagaggtagactgcgctgatgttatcgcaatacaccaaagtggccttggagagaggacaatgtaattcaagtaagagattgctgagccatgttatttcagcaactgcatttgctacgccacggtattcagcttcagcgcttgagcgagagactgtatgttgtcgctttgaagaccaagatatcaagttgttaccgtgaaaaatgcagtaaccggaagtggaacgccttgttgttgggcagcctgcccaatctgcatctgtgtatgcgattaacccggaagtatctgatggataaagctgcaaaccataattgagtgtaccttttagataacgaaggatatgtttgagggcattaaggtgaggttctcttgggtcgtgcatgaatagacagacttgttgaacagcgaacgagatatctggccgtgtaaatgtcaagtattgaagtgcgccggcaaggctgcggtagagtattggatcttcgactgctggtccatcgttagctgctagcttgactcgtgaatcagctggtgtggtggatggcttacagtttgtcatattggcccggtgtagtatatcggcggcgtagttatgttgattgagaaataatccagaggagtttcttttgatggcgattccgaggaagtagtgaagttctcctgaatctgtcattccaaattcttggcttagagatgaaatgatatcttggagaagcttagttgaagatgcggtgaggccaatgttgtccacatataggagaagataggctgttccattggcgcgatggtagacaaaaagcgatgggtcagccttgctttgcacaaaaccgattcgacacgcgtattgggtaaatcgttgattccaggctcgtggtgactgcttaagaccgtaaagtgaccgtttgagtaagcatgcgtggtcgggtttggtgggatcacggaatcccgaaggttgatgcatatacacgggttcttcgagtgtgccattgaggaaggcattttttacgttgagttggtgaattggccatttgcgagagagggatagttccaatacgaggcggatcgtggccggcttgactacagggctgaaagtctcgtcgcaatcaatgcctatttcttgtgatttcccatttgcaacaagtcgcgccttgtacctatatagtttgccatcgggaccaaacttatgcctaaataaccacatggaacgcacaatgttagtatctcggggccgtggtactaagtcccacgttccctttttaatttgagctgcatattcctcattcatggctgcgttccagttaggatcttctaaggcttttaggtgagaggtaggaagaggagaaataatgtcagtgtgaagagataatggttgtttgggtttggtaataccgtttttacttcgcgttctcatagagtgcgcaacgacggttggaggctgcggaggagctacttgtggagttggttcattgggaattgtttgaggtggatcaatttggcgaaggagaggagaaatagacaccggaagttgtggttcatctatgattgaaggagattctgagatagatttagagaaaggaaatttagattcatcgaaggtaacatgacgtgaaatgattaccttacgggttgcgagttctagacaccgatatcctttatggttagatgggtatccaagaaaaacgcacgcagtggagcgaggatcgagtttatgagacgaaaccggaagaagattggggtaacaaagacatccaaatactcgaagatgattgtatatggccggtttgtggaaaagtttggtgaaaggtacctcgttttgaatggtagatgaggggagaatgttgaagagatgagttgccatcataagtgcctcaacccaataggtggtgggcatgtttgcttggatgagtaaggaacggacagaattattcagtgtccgaagagtgcgttcggctttgccgttttgctgcgaggtgtatgggcaagagaagcgagggataattccatgagtggctaagtgattaaggaattgtctgttttggtattcaccaccattatcacattgtaatgatttaatgctgcagccaaattacacgtaagccataaactttaagaaagtggaaaacacttcagattttttacgaagaggaaaaacccagagaaagtgagtgaaatgatcaagatatataacgtaatattttattccactgatgctaggaaccggtgaggtccatacatcggaatgaataatttcaaaaggtgcagaaatagaagaaataactgaatcaaatggtaatctagtgtgtttccccaattgacatgcatgacaaagagacatgtcaattttagaacaattaattaagggaataagttgagatttagtacgtttatgaaacaaaattatggaagtagtacactcactatttataattaaggaaataatcgggtccactatcgactgtaatacgcgtcgcttgtaatacagaaaaacatgggccatgattcgtttgaggaaattacgtttaggggtcgccgtttgttttgttcgtttgcaggaaaccctttgactgagttcgggggtttgctttacaagatacaacaaacgtcatgggcctagcgtatttctagatgggccttaatcaaagtctgtttacagatttataattcgtagcgaaggcgttgaagtcaacttctttatcgtcggcttattcaatgccggagtgcgagctgagagaaacaactgcatttatgaatgtttcaaatcaacggaattagttaacaagtcggtgaataaaattttataataatcaaattctctttaggtttttctcgaaagtagctaaatttttggggggaatttgagctcgtttttttgaggattaggttatttttaagtaacaaaaggagatgatgattgtcagtttcggttgtgtttctttgttaccgggaaaattcatctttgcgtttctaccatggaaggtggaattctgatcagaaaattgttttgtaaacttgtcctcataatgtttaaaagccttcagactgataaaaagtgaattccttttttgcagtggatgatattgtcgttgtacaggcaggtagatggattttgtatagcactggtgaatgggaattcaagcttgattcttgtcgtcacggtagggcgatgagcttgatggggttaagaactttaagggatttggagcttaaggttcgtcacatcttcgggctggagaaaccttccatatctttggagcttagctacatcttcgaggacagactagctctgttagctggtgttctgccgggtccgacaatgattgggtctgattggcagtttagatgctttaaatctctaagtattggtgataaatctgtgaatctgtttgtgtgttttagagaaggcgattcagttatcgtcggtcctgcctgcgaacctagacagactagcgcaagtgttgttaagtattttgaagctggagaaccaacatttgcaggcattgtacagtttagagataaacctgttccggcggttggaggaggttactttgcggggttattatcttctgttcaagataatatggatgcccatccccccaacaatcactctgattttgttcagagtacaaccgtttgtgatttatccagtcaatgggacatcagcgatgaacttctgttagaagccctagaagcagtggagaagtctggagcttttgtcaccgctgcaggggtggatacatccctaccggcagaagtacctgattcaggtgatgattcagagtctttagcagaatctgacgaatcttcctctcttagtacaggtagtgacttagaagtttctgagttcgacgacgataccctccacgaaaacactctccaatctgataaagagattgttgtacatgaagacatcggggatgatgatttcattgagcagccccccaaaaagaaagttttgcttcaaaataccaaccctggtgctatgacagagtttttggaaacttgtcagaaaggtataagcattgatcaagtgtatgggtacgaagatctcgagccgatgtttggggacgatgatattgatgcaaaagcagcttacgttgatttgacaaaagaggatgacaatatgtttgttggaaggacctttgcatcgagggaagatttcaggattgccctgtccatttatgccattaaccgtattttccgctttaaatttactaggtatgagaaacattacttggttgctgaatgttatgacaaaaaaaactgtgattggagagttagagcacaccaagttggaggtgacagcgaagaatatgaagtgaggctggcaaagttggaacatgtgtgtaaggttcagactaggagccgcttttcaaaacatgctacgtccaaggttgtagctgctctcctaagggctaagtatgccaaggccttctgtggtccaagagcaagagatttacccgactctcttcttagggagcacaatgttcggatgacgtactggaaatgttggaaagccaaagaattggctgttgagacagctcaaggcactgatgagagctctttctctttattgccggtttatcttcatgtcttacaacttgcaaaccctggcacagtttatcatttggaaacagagttggatgatattggggatgaccgattcaagtatgttttcctctcattgggggctagtgtaaaaaggttgaaatatattcggagggttgttgtcgttgatggtacacacctctttggtaagtatcttggctgtcttcttaccgcaagttgccaggatgcaaactttcagatttttccaatcgcctttgccgtagtggacagcgagacagatcattcttggacatggttcatgaataagctctcagaaataataaaagatggccctgacttgacatttgtctcagaccggaatcaatcaatattcaaatccgttggtcttgtgttccctcaagcacaccatggagcttgtttggtccacatcagaaggaatgttaaaggaaggtatggaaagaagagtggccttcagctctagtgtggcaagctggtaacgcattccgtctcaaagattttaataatgttcgtgacaggataaaaaaaaaaggaatatgtcttgttggaattacattgaaggatcgggtgttgcgaattggagtagggttcattttacgggagagagatataatttgatgtctagtaacattgcggagtctttgaacaatgcgttactaccagctaggggaagccccgttgttgcattgcttgaattcattaggaaaatgcttgctaggtggtttgaatctaggaggaaaaaaatatctagaacggttggcgacatacccattgctgttgaaagggaacttatgaagcggtttaaaggtgctttggggatgtctgtttcggcagttggcagttgggattttgaagttgttgcaaaggacggtgagcagttccacgtctctttagaacagcagtcttgctcttgcttggagtttcaagcaattagaatcccatgtacacacgcaatggctgcgtgtcatgataggggtttggagttcagaactttggttggagagatgcataggctcccaatgtggtcaccaacggtccaagctccaatcctccttgtacgcgatccatcggaggttaaagtccctgaggaaataaggtcactgtgtttaatgcctcccaaaacaaaaagacctgctgggagacctcctaagttgcggattcattcggttggggaatatgaggtcagttacatctttttcatcaatatatttctatataatccaaaggcaacaatcctttttcttttgcatgtagggaaataacaagtccaaaacgcctaacaaaggtggacgatgtgggggattaggtcacaatcgtgttacgtgcaagaccccccttggatgatgctatttaaacttagaaagatttggctagttttttgttattaatgaaggagcttttttcggtgttgtttttgtttttggtatcggggtagacatttttacccaatatgttttaacaacaatgtctaattcctaaacttcttttgaagttgcaagtattactgatgaatagatactactttttgtgtattattcaagtagcatctggcgaggtatttcagttcaatcagttgttttcacatcttcaccaatcgtttatctcatttaggtatacagataacgttgtacagtttatacaacgtacagagatcccccgtatacctttttcaccgtacagatataaccgtacagtttatacagcgtacagatatcgccgcacacttaataagcgtacagattgcgttgtagccgtacagatagtggtctacagattgtgctgtacatatagcgatgtacagatagtggtgtacagattgtgctgtacagatagcggtgtacagatagcgatatacatatagcggtgtactgatagcgatatacacatagggttatgcatattgtctaattttcttccaaagtggcttgtactactgatcactgcataccacatttactgcatttttgtagccttattggtcatgtatttttgtttataatttgttgcactctagtgattgcagcgtacttatggtggtgtactgaaagtggtgtacagatttcgctgtacaaacagctttacagtttgtgctgtacagaaagcggcgtacagataatgctgtacagattgggttgtacagagagcggtgtacagatagcgatgtacagatagcggtgcacagatagcgatgtacatcaaggttatgcatattgtctaattttctttcaaagtggcatgtactactgatgacttgataccttcctagccttattggtcatgtattttcgtttaaattttgttgcactctaccgactgcagcgtactgacggtggtgtaccgaaatcggtgtacagatttcgctgtacagtttaatttttactattagtgggtaattttaaagagtaggcatcatgtcattaatatgttttggtttgaggatgtaattattctcaactgtaactttcccaaccactactttattgtggcttatatatttaatcaacctgcaataacatcgtagaagaagaaaacttgtctttgtttcctctcaaagattatccacaaaaaaatgagaacagaaatgcctgacatccctgacgatctgttggctaagatcgtcaagctcgtggctgatgatcgttggtggttgctaggtcctatcttgaaggctggccgaaggggaagagatatggtgtacagagataacgttttaaaggatgcttgcatctactctctctgttctgatccaagcgatttgtactatttccggaaccaggataccgacgtcgtgcatcaagggaggtaccgtcctttctttgagagatgcctcaaagctggcaacaaaactgccatctactatgaagggctaagggtggtggctgaaggttgtgacctcaatgggggtattgaacttctagctcagctggtcccagaggatggcgctccatgtgtcttgggaatgaggctatggcggtccactatctagagcagtttgggattttccacgctcccttaagtacacaaagggttaggctatggggagaggagttggtcagagatttacgaccatatcggaggataagccacgcttcttaccggaaggcgttcatctatccactttgcaaagggatcccgtcgccggattgtgccatggattgtgctcttgcttcaagcggttatgagaacttttgcaacgattgttacttatggtggttgtcaaggaaggtctgtcaaatggtctgaaggtattctccttatttttccatattgatcaatgtttaaattatattatgactatgcggatgtaatttgtttttgctttttgctatataattatagttcttcagctattatcttactatgttgtttaattattgttttaagttgttttcgcactcctggatgtataatctttgtttatgtattatttatatatatgttcttatttttcgaaagtttgtcatgacctttatttatgccgtgtgtaagtatagtatatatttagaaagattgtctttcacttgaattagtttcagaaacataacgtatggcgttacagttaataatcacatttttggtcactttgaaactacccgccatttacactataaaacctcgcgccgtttcaccagttttgctttacgttctttaaaataaatttttctatgatgttcctaactcttttcttctccacagatgaacaagtttttaatatgtgtcaataaccaaagaactgatatgttaatgatatgattggaacttcagcacacaccttccacttgcatttccttggatgcataaatgattggacatgtattttaaatatatgtctatggctagtggtgagtctttctcctactgatacttataatttgtttttgaataaattataaacgcaatcatatcattattttctcaccatttcaatttgtgttgagactatttttaccagaattcgcataccgagatttttttcaaatgcttattaatatattcattaatatttagagatgaacaaggtttggatatgtttcgtttatgtagtgaggaggtgagaactcataattaccaatatgattgacacttcaggctacactttccacttgcatttcttggatgcccaaatgattagacatgtagtttaaatttattattatagttagtgcttagtcttactcattctgacactaataattatcttttcagtaatatataaaaccaaacatatatctatcttctcaccatttcaagatttgacaaaaagaggttcttccacactaataattactttgtttccaaagccccaagcggactgccactaatttgcctcaccgctaagttggtgcttttgagagcacaaaatcttgagaaatcatttacccctgaccgaaataaattatctataaaaaccagacatttcaacctcaattttacatttatattacatccagcggtaatttacattaatattacacaaacatttatacattttcaagcggaattttacattaacactaaacttctactaggtacttcaagttacgttcttactaattagacaatttgaaacataattctacaataactgcaaatagatattaaaatatttcttcagaagttattctcattgtttgtatctctacagaatttcacaaattcgaagtgctgcattgaagatgtaacatccttcacagtaatgttcgccttcatgccaataagcacagtctggtacatttattctcttagagtaagcaaactcccagattggaccgaaggtatcttcattagctggttcatacgccaatagtgtgtcaatcaaaccttcacattctgcttccaaatcttcagagtaaatattaaacaaaagcctatcacctaagctctcgaatatcatgtcgaatgtagccccggctagatcacccctttcagcacacatttggaacatggcataggccacagtcgccgattcatcttcaggaactagttcatttagcaaagcaagggaaccttgtatatccctttcacgggtcactaaacgcaaagcttcataataaagagcctgacgtgtaaagaagcttctagctacaccaccaggatatattttcggtggctcgagacagaaagcagttagatttgctgactttacaatgtccctcgagagtgcaatgtcccttcctcgtttgtttgtgagtatcaccggagctaggtaatatgcgtcatcatctcccagcttcttcacaataatatggaagatatcatctagtaaatcttataaagacattacttttgaggtttatgaagttaaaaaggagcaaagaaaatgaggtgtggatgagtaaacgaaccactaaggacatatttataggaaacaaaaacaaaactaactttcatactttaacctaaacctatctggactattgtactaatgaaacatccgtacaccacaggcgctgtacagaacaaatctgtacattgaaatataagaacaaatccgtatgctttatatacgatacagaaaccatatgtaaaatcacaagccaacaataacctatgtagatgaatcataacagtccgtacacccaattcactgtacagataatagccgtacacccaattcactgtacagataacaatccgtacaccacagacgatctacagaacaatctgtacatcttaatatatgtacagtctccaatgtgtacaccgcatctgccgttcagacacattaaatatcaacaactaagttcttaaaaaacaataattagttctttaataattaattcaaacaatatatgttctcttccagtacgccacaataattagttctttaataattaattcaaacaataattagttctttaataattaattcaaataatatgtatgctgtacaaatacccattcgtacactgttcttatagtacactatgtatgctattcttatagtacactatgtatgctgtacagaaaacaatccgtacaccttacacggtgtacagaagcaatctgtacaccgtgggtatatacaaaataataagttataagtcatattaattctttgacatcaaataatatacaaaaaacattctttcgattttttaagtcataagcataagttcaaatctaataaatatacaaatgcatacttcgatctcaagtcctaaatataagtcttaagtcataagccccgaataagtttagaaacacccaaactctaagtttaggaacaaataactagtactcgtcctcccattcaacaaaagcagcatatgtatccatcgcataaaccttctgaatcctaatcaccacttcatccgttagagccgtcatgtcagtgtaatccattccatgagcatgcatttcaaggaacttgcatgccacaggcccacagtctccatcgcctttgttgtcgtacagtcctgttacccgtgtacagctgaaaggctcagtcgtcatctcagtggtgagagttgggcagctactgacgattggggtcatttggaattcgactgcttcttctggagttggggagatgaacgagtctagaacatctatgctttgttgcttcaagtttatcaccaatccaacccagtgagagcacccccagttcattggaacgtagacaacatcaacatgtttcaggaattccgatttcatgtgtatcccagtcgacttccctgttatgtatcccttgattgttttcccccattcgtactttgccttgtcctcgcatttctggaaatcttcatagtgtgtggacagaagcattgcaaaccatgtatcaatgattgccacccttctttgactgtatgctttaccccggcgtttcatcagcattcctgtaattagctgcatatgctgcaactcataatagagtaagtcatgtcaccaaacccattttagctacgaacgcatgaaatattattagtttttgctcataatacctcagtgtttacccatgtctccttcgttgcaatgtccaagaagtggttgttagtcactgtgtgcccagtgcagatagtgtactcgctgtttagcttggatgttagatttaaaaaacattgtgtctttttctaataaaactgagattaacaaggatcaaacctctgtggatcatcttcaagcagccttttaaatgtctggaactctccatcatccaactttgggagaggtgtgtatgcaggttccttggttctgctcttaaacagagcactgatcctaggatctacgctatacttagttgtgtcgaggaagcaagaacgtattggaacacgcttacccggcactggctggcgtatattggttctctccttctcaaaataagcaggtgaaacagcaacaatagaagagtcgggtataacctgggatcaaaacatacaagctaggtaaaatatttgtatctcagattgtgtatgtaatttattactcgcaatctagacctgagcaataggtgttactggtgaacaaggtgtttgccttggcgacccagctcgatttcccaaatccaatggttcttccatagtctttattggcttggtgtccataggcttgtcttgcgtggcggttggcactggcgaagtagggctctctcttcccatttcttgtggcttacaaaaaaaaaaaaaaagttatgcaataacaataaaccaaaagggttagctttatggttaacacacaagcagcaacatgtgctcgcgaaattaatacctctgcacatttttcattctgggctgtttctcattcttcctcatttagcccgtcttttagaaggggagatgtaaggatctctgtagctatcttctataaagtcccaacataaaagtatcatcatggagaattgcataattaaataagcaaaaatctacataaaaccatgttttgctttcgtatatgtaagtattacctctgaaatattttttgttgatccataaagttcccatggatcaacagagccttctagatttacagttcctccaccatctacacctatgtcagtgtccacagctggtccatggttcagccccgaggatgagcttccagaagataaagaagtaacctcctctcttttccttttccgtgtaacaggttgctttgtctccttcttcttcttgcttttcgatttaggggtctcaggagcccctgcagcagtttcggtggccttctccttcaaatttttcaaaagatccttacttatgttgtagcggaggtcttcaagttgttgagtaaaccatttcttcattcagccaattcaccatgagtaacaaactgagaagaggagcttgcttgatcagcgttgcatcttgctttgctgtctttttatggacagtctttccaacgggtgtagcagctttatcctgagtaggcaggggttcaacattcaatccttctttcttacttgaacgcgtgaaaggcttgcgacggatggggtagtattctttctttgcccgtttcacagctttacttggttcacatttgtcttctggcccaacagttcgtgtccctacgaactctacatcatcagtatcaagcgctacgccaacatactcggcgtctgctgctggagcatctttggaagagcattgtatgctgtgtatgggccatgtttcagccttgaagtggtgcttctgcttgatcagagagattatcaactccaccccttcatcctctttttcatccggccacgacagatcccccttcacagtttctgactgatatagtgtatattccacagacagctacatgattaaaagaaaagcacattagcttactattgatgcatcttttggatttaaggtgttctgtacaattccctaaatcaataagttcaaaacagtcgctataatgttagaataaaagccaatagtcaacattacttacattagcagtttgctcagcgtcaagaacatctgattcccgcagaagaattgtgcgaccaaggtcaacaaaaagcttttggataaaatttctgaagtcaacagtgtcttttatcctactgcatagggcaggaacggacttgagtaccaggagctggagtgcaagagggaacccataacagacactgcttttctgagacagccgggccttcagctccgcaattggatcttcttctccagcagaagggccaaaccgttccattgttgattcaaaagaaactcgcccccatgggtaagacaagaagaattctatatcatgcagcatttctacaaagtctcgtgtaacccgatgttgtttcctattgctgcatacaacaacccatcaatcagcactaccaatgcaagactcagcttcttccatgttgagaatcgcttccgagtctccgctttagcatcctcccttagcatatctatcacatccattaccgtgactatacttttcgcaccaaacagccggttccaaacagacaggtatgctgggtcgtggtaatcttctaccttagattcagatggaagcttatcacaaatcagccctgtggtcatttggaattctcgtatagagaaccggagtgggaaccctccatacactgtccacaattcatgtttgttcttcgttagaagctgtcttgtaagcatcccatgaatgagttttgcagagtgatgacacctagcaactggaagttcaaacaattttttgaattgggacgcaataagctcatcccacgcctctgaaccctctagtaattccaccagagttcccaaatactccggctttgagtgtatgttaaggcgtcccccatccgggaactccgatggatgcagcaaacggcaagggaggctcgggtttgtaaattcactatctctgcatctctcatctcctattattcatctcagaaaaaaaccaaatcaaaaaaaatgttcggtgatgatagagtcggattcatcaaattcaccggcaagggacaacaaataagagtttgtttaccttgtttagattcgtttcttaatcctccagattttgccggaattttcgccggcgctggtgaaattggagactcgtctcttaaccctcgagcactcgctggagatttagccggagattttgcatgcgtatctacaaataacccagaaacctaattatgaacccctattaacccataaattatcccgaaaattgcttgaggaaccgtcatcagtataacgacttacctctctgtgcatctgctctggagtttcgccgcttgggttcttgtttcattaccactggagggcttattgtcttcgatttactcgacttcttcttcgtcattgcagatattcttcataatacagaaaccaacttctctcaacttccttaagaaaccagaaatatgaagagtcgagaagaaacctcttttttttggtttcactggcaactctgtaattacatggaaatcgtagtgtcagaaccggggtaacaaaaaagccaacaataaccacctgtagtacatttcatattgtaaatagtaagtgtactagtttcataattatgttctgtaaacgtactagttggcaaacaaactcttaattaagcgagaagaaataagagattgaagagttgtgtttcccaaatggccaagacgacggtgccacaatgaagaatcgggaaccgttgctaccatgacttgtggaggtgatgacgatgatgatgatgataatggtggcgacgtgatggagtagagaggaccatcactgttacatcggagaagattcgtccaagtattgaaatccttaatagaaaaaccaaatggatcaaattccacagatacataattatctttagtaaattgacgtacagaaacgagatttttgattatagaaggacaaacaagcacattatgaagatggagaggtcgtattttagaaggcaaaaatgaataaccgatggctttagttggaacagaagatccattaccgacgacaaccgatggggatgagctcgaattaaaaagggaatggagggtacctggctgcgcggtgaggtgagttgtcgcgcccgtgtccatgtaccaacttgcatctgtaggatctggcatagttgtagtcccaaaagctgcagcaaggtttgcaggaatttgcgtcaattgattagtcgaaccaaccatagctgcttgtggagaagaaccaaggagccctgctgctgggttcgtggctgtcaagtatgccatcggtggtctttgcatccagttttgttgtggccagtgtggatatggggttggtgttgagagccatggttgttgtgtctgccaattgcgaggattccattgccagttttggcgtccacgacctctgccgttactgccggtaccgccacgtccacgtccacgacctctaccattgttgttgtgcccattgtagttgttgtggttgttgtcgcggtagccggtgttgttgttgtcacgataagtgttgtgattgttgtcgcgagacatggagttttgatttccattagacgttacatagagcacattgggagacgatgagttggctgagtgagaggatcctgttttgacctgcttggagagacgacgttcttcctcaatgagcatggatcgggcaacagagaaagatgggaacggttggcgatgcttgatgatgttgatgatgttgtcaaacttttcagaaagtccattgagcatatgcgtaacgacgacacgatcagagacaggagagtcaacgttggcgaggagatcggagagtgtcttgagcttctggcaataatcatgcacagacaggtcgccaagggtgagagagcgtaagtcgttgtcaaggaatctcatatttgtcggctgcatgatagctgcatccttatcactgtcccatgcctctagccgtacatcggctggttgttcttttataaccttcagtaatctatcaaagaaaatatatttgtttgtttgtgtccccatagctatatcgtataacttggttagttggttctaatgtagaaaacgaatgtagcttatacatatatagagagagcatagacggtcaaaattactctttacttttactttcgttttccaagacgtttttggaaataaaatgagacataaatcaatatacgaaaattcttaaattattatctctcttctattgataattatattaaacaaaacataagtattagcaaagtgggaaaaaaggactaattatcatgtttcatctcaaagagagtaattatctctttaggtttacataagcattgaactcgatcgtctgatttcaacaccttttaaaagactttgggtgcctattcaaatttccattaaataccactaacgataaaaagcattttactctcaaatccattgctaaattgtttaggcttttagcctttacaatagtaagagagaagagaaagaagtagagaagaccagaacaagtgtgggtggggacagttgtatgtactctcatcactgctcctgccttgagccgtacatccgcttgccattgttgtgtttcaaagagtttcctaaatccatctacgaaaacctgtttgttgctatatgtgttgccattgcaacccaaatgtttataacctaatgtgatttggggatttggtaaacgtacgaattaagtttgtactacaactccatctccatttgcttcataggttgtgatgtcttaactctttcttgaacttaaaactctatgtcactaagttcggttgcatatctcttaactcttttctgaacttaaactctatgtatgtttcaacttctcttgcattttgtaatgaacaaagtacttaatgttgtttggtttgggtttcaaatatttttgcattgtaatttttttttgcatttggtttaagttctgtctcagtttcaatatagtcgtaacaatatagttagacaataaaaaaaatagttcactaatttaacgactatgtgacgtctacaattatttacactaactttttacttagtcgcttgttagtcgttaaacattagtcgtaacttagtcattaaacatttgccgactaatacacgactgtgtttagcaaacagaatattcaatagagataattgtaaattagtcgtaaaacggtcattaaattttacccactaatgtacgactacgtttaccaaaacatatgatcaactgagtttatcgaaaattagtcgtaaaatggtcattaaatttgacgattaaataatgactattcaacgccaaactttcaacattaggcatagtcggcaattagtcgccattttatggactaagttaccgactactcattctagtgattactgatttacaactacttacattagtcgccaaatagtcataaaatccaaaataacgactataaaagcgactataattatagtcgttgacgagctgttttcttgtagcaaatgcaacttcatgttatagtcatctggtttggctttagggtaatccttcctacacttagatacaaaagcaccgtctatgaagacactaccttggaaatgacgagagagacgactaaataaaaaccccaaatccgaaccatcctcacttcctcagattccaaatctctgctatatgatcttcaatactaacaaaatcctcaatatcatttgatggagttaaattcagtttaaccaaaacatcattggtgatttcttttgtcatatttgctttactaactcaaaaaacaaaacaaatcaacaaacaaagcaagctcaaaacagaacaagtatgaataatcaaatcaagaaggaatataccaaatcgtagaatgatatccgagagtattagctacatcgatcaaagctctcctccgcagatttatctcatcctctgttctgttttgacaagtcttcttaaagatttttccaaaattgccgatttgtttcctaacatgagacggatccaagccatagaaaacaggaatcaccaccaatcgattgctatcttctttgcatctaacaatctccagcaattcatttaaacaccagcttgaagaagcgtagtttttggaaaagataacaatcgcaattctcgaatctctaatcggtcgtttaagatcgggattaagcgattggcttctctcaatctcgttatctttaaaagcaatgatcagcttccgatcaagatccttgagaaagtggctgaggaatgtttgacggatgtcttcaacgctaaagctcggaaagacatagagtacccaaaattgcaagccataatggagcgaggaatgagatttttttgagaaacgaatcagagaaagtgttagaaattgagctgcgattcgtttgaatctagatatgaagatgatcaattttttgttacgtttgatcgatctcaacacacacaagatttaagaactgttgaagaagaacgaagacacaaggtttgtttacccggttcagcaagatcggtgtgatcaagcctacgtccggagccgaatcaatccagcaaatctactaactttgatgaagagtacagctcaaaccgagcttacaacaatggtgattctctcaagttctctctctcacaatacaagaaaactcatagaaagaaacagatgaagaagataatgaatgtaacaaactctgttactctttatatataaagtagtcaaaccctccactgcagttagagtcttcaacttctcttcttcaatttccaatttaatcagtaacctccttgttagatatgacttgaatagattgggcccatgactttaggcccaatcagtttagggttaattagggtttcttttgtataagtacacttcttaacctagcctccctgtattctgaattctgtattctccagtaataaaatctgtctctttgcccgtggatgtagccaacagaaagtgttggtgaaccacgttaaatctgtgtcgtgtttatcgttcatttatgcaatctcgcttgcacctgttataacactcctaactagacacacccggtctgcttcaatcttcaattgacttaaacaaaaccaacttcagaatttgaatgagagctataaaccaacaacactccaccttgattcaaatctcttcataactagtgaacgtgcacttacttggatttcacctttggatgagatgtctttccacctcacctgagtagctttagaaactctaaagctgcctcaaacttctgcacaggaatgcctttggtaagcatgtctgcaggattccgagaagtgtgtatcttgagaacttcaacacttccttcttcaatcacatccctataaagttgtacttaatcgcaatgtgcttggttctttaatggaacgtgttgttctttgacagactgatggctgattgcgagtcacaccacaaagtaattttctcttgcttgaatcccatttctgttaacaacccctgaatccacaaagcttctttcactgcttcagttaaagcaacatactctgcttcagtggttgataatgccattatactctgcagatttgacttccaactcagtgtatttccaccaactgtgaacacataacctgtcgttgaacgcctcctgtcaagatctgctgcatagtcagagtcactgaaaccctgaactctgaaatctttttctctggtgaaaaccagattcaaatctgtagacccctttaagtatattagcagccactttactgcaatccaatgaatcttacctggcctgcccataaacctgcttagaactccaatagcttgagctacatctgttctggtgccaaccatggcatacataacgctgccaatagcacttgagtatggaacttttttgtctctaataatgtcgattcccagtattcgactagctgcacccatatccttcatttcaaaacatgtactcaacgcttctttgatcttgttaatttcagtcatggacttagctgctatcaacatatcatccacgtatatcagcagatacacaaactcctcatcactgagttgttttatgtaaacacacgaatcatgaccacttctgataaacttctgatccatgataaaggagttaaacttcttgttccactaacgtggcgcttgtttaaacccatacagtgacttctttaacaagcacacttgatctttttgttcatcagcaatatacccctcaggttgctccatgtagagtggtttatccagatcaccatgcaagaacgcagtcttaacatccatttgttccaattctagatctccctgaacaacaatggacatcaagattcttatacaaacatgcttgactataggtgcaaacactacatcatagtcaattccttttctctgtgtaaatcctcttgctactagtctggccttgtacctttcaggttccacagcggaattcctggtttcttcttgtacaaccatctacaactgatgatcttttgatccttgtgacgatctactatatcccatgtatagttcttccacagtgactgcatttcatctcccagtcctgcattccacctttctcactctttggtttctttagcttcatgataacagctaggttcctcactgatgtccatttcttcagctgccataagagcatatgcaaattgggagtggtcagagaatcttataggtgctctaatttgtcttctaatccgatctctagctaaccgataactgctccgtctttcaccgcttgctggagcttctccttcgggttcaaaatacccttactcatcatcactagatgaaacatcaactgctccacctgcagctgaactctcaccaacctgttgttggttactcacaatctcaggacatgtcttttctgcttgagtaatcttctctactctctcctcttgttcagacttctcttttaactgtaaatccttacacaccaagttctaatgaaatatcacatttcgactgataacacatttcatttcttccaagagccatatcttgtatcccttagtgccttgcggataaccgagaaacactcctttcaatgctcttgcccaagtgagcaaatggttggtgtaggtctccagacatatgcatcttcgtttaagacagacctcacaataacagctgatgcgtttggaccaagtcttatacgaccaatcttgtaagtttgttcaatagagcagaattctccttctccaacaacaacttcagtagacgcattccaatccagtagctgacacctaactactttactatcactagttgcttctgatttagagtgactatcagttggaaactgagaagaacaaagggcatcagtaaaataaagactacatcactatcataacaaaggtgagaaacatacatttttgccagctaagtcatgaacgtcattctggaagtcttcaagtttgctgatcaattcagcttgtttagcttcaagctgctgcacatgtgaatctctaacttgcatgaaggctagcttagaaaaagtaacccctctgcccatccctttgactctcccgggtttgtcctttcctaatacttgactaacagcatcttctctaatattagtattagatgtggagtccatttcactgtcaattgactttattttttcctgaaacaaaacacaaatcttgataaacaaattgatcaagaaaatgataatagaataaaggacaacttcttacaatggtctcttcaaactctggcttcacaggtctcccatcagaatgtgtgagtcctgctacccaaaccttgcttcttgtcaccttccttgggtccgaactcttttttttctacaaccaaatattaatttaaatagcagcagaactcactattgtttttaaggattacaacgtaaccaaaaactaaataaacttaccatctcttgagccaggcgaatcattccttttcgactggtggtatgtggaatttgtgccctccttaattgcctaaatttgtcactttgtacctacaaatcaaacccattgcaacattattaatatctccaaacaactttactttagaaaatcaaatatcacaattaatagaaccttaaaagtgctgctagtcctactcttcacccaattgctccaaactgcgacagatgggatgttgcttggtcttagctcaagtactctaagctttgtatttgctgctttaacctttgaaagaagcttagatttatggtacctccacaaacaacccatctgcctaaaaatagcttgtttttgtcattcttcttgcaaattaaacctccctacataagtttagatagttaactaagagtaacaaaggaaagttttggtaaactaaataaattggtatacatacctgaatttcctcccaaagtgcgtgtcttgtcagttcatcaaggtgcctccaatcatcaagtattacaggtacatgctccctgactagagagccaagaaaggacgacagtttgactgaactatttccaaagtgttcacccaattctgtaaattcaacatcgaccttatcatctagatgtttagcctagttaactaaatcgagaacccaaatcgatacaattaaaagaagcaaaattgtgacaaatcaaaaccccaaactcttaaaacttcaattgaaacaaaacaaaacaagatctaaaccccaaaatcatacaataaccctaaaaattataaccttgaagcggacaaagacgatggatgggatttgtggtcgagtacaaatttcaacgagagagtaagaatgaagaaagatgcgacaatctcagatgataaggaagatgtaatctcagattagaacctctgaatttttgagtagtgaaaaagttcaagagctaaagatagatgaaaaggggaagaacagtcaaattgatgtcgtcgaggaaaattagttttggagcttaagtctttggtcaaagactttttggagcccaaaagttttagttcccggttataattccgtagcattttaatatggatatgcaatcaaaactcttatataccaactttaataaacacgttttttttagtaaaaacctttcatagtgttttaaaatttctaaacgctatctaaaaatcagtggtaacttattaatagcaatactacataaaacgctataactcagtgctattaatactcacttttcttatagtgcacgatcagaatttaatttttaccggttctttcatatagaaaccctcaatgtcccacttgaaggatttaattttaatttttaccggttctattccatatagaaacctattcacatttgaagaatattgcaactattggaaaattaagatgcgtacgtgtatatatgaaccctaacaaaaagaatccgtttttaacatatcaatttcatatttaatcaattaaatcagacccgcaacataaacgaatcaaacaaaaaaaatacaatttcccataacgagcatgcaatgcaaccgaaaagtcttgaatcgactaatcgaccattaatgatttttctgaaccaaagaacttaaccatagaactacaagaaaacacggaaataattccgactagaatattagtcgcagagtagtcgtaaagtgataagttacgactgttttacgactaaccactgttgtcgcaaatcgatagtcgttaaatttaatagtcgtaattttagtcgccaaattagtcgtaatattaatcgtaaaatagtcgttatatgttacgactaagttacgactaaactatatgaacagcgatattgtaggatttctctgcgaccatttatatactactctgtcactaattaacgactacggtttcagacaaaataaaaagtcattttattttttttgatttatattgcctattcatgtaatgctttctccaaattcttaacaatttcaaaaccaaactaaacctcacaccaaattcatgattgaaacacacaccaaattcattaatattgtaaccaaatataagattcaaattgcaccaaattctgaaaagataacaagttttgacaagttcatgagtgttttgaaagagggagaagtaacttaagaatgagttggagatgagataggttctgtagttgattcaggtgaatgagtcgccataaagtggaggaaaagtgctccagcttgtccttctgctcagccacagccttggtttgctctgcctcacgtcttgcattataagcagcttgctcttcaattttctgttgagcttccttcacttgctcttgcaacgccacgaaagaagaagagtctcctaagagtttgcgttttccagtgactagatctggaagactatcattaaagctgcccactccataatagtttcctcgtgaatctgctttgaactatgaaaagaaagacaaacaattactaaagagcatgagaatatgcagcctataattatgaaaatgtaaactttacctctagaaagatgacagtaagttcatttgttgtgagctcccaaggtcgtgattccccgtctgaaacatttgaagtctctgcctccatttcagacaactcctgttgcaatatctgctcataattttgaacaatcttctccgccttcctatcgacataagtaccatctggtttggtatgcgtattgatgaaaacctaaccaagactcaccgtcctttcctaactcctcttcctgcaatgttaaaaataaacaaggattaagacaatatctaaacttgcaatggactatgaaaaacaaataacagagatcacaagaagttattaaccatttcttgttggatttgttaatatgactttggccctgataaatagatgtgaagactgagcccattactgtcagacatgcgagccttggaatatgtcagactctttccaattgcttcttcactatcccagtatgcacacatcgtttcccagatatgggaatcgacgatccatttaggatactctcgactagtcctcatagtgctaatcatatatttcatccgtcggccacaaatatcttcaaaatagtactaaactgtccatgttatcaaatgatcccaagtgtgtgttatctacaaataacaaagacatgatgttagtgaaaataacacagctaaacatttaagtgaagacaagagaaaaaaaaactataccacaaactcgaggaagtatctttctcgtcgatcccgaggaacacatgacaagctgtaaaaaataaagctttaaaataaaatatcttagaatttttatttgtagcatgataattacaaaactaattgtctgaatatactgctagtaacttagtataaattatatacacaaaattacactataaaaattcttttattattattacaattttaatatgcgactattatttccccgacttacgtatagtcataacgtagtcgttatttgacgactaccggaatgacaatttattatagtctctatttagggactacttaacgtcgttttcgtttaatcgtaaaacagtcgctaaatagccaattcatagtcgctaaatttgacgactacataaacagtcgccacttgtagtcgtaataaccgtggaattttcttgtagtcaggcttcattacatcatgtgtttgcctcttaacattctgaaatcattaacacgctactaatttcttctttcaaaagtttcctcgctctattttcttcgtcagcatttgttttacttgctagaaaaagaatctatttttttctaagtgtttgttgtatcgtttgttttatgttctcctatcaatgggaaactgattttaacaaaccaaagacggttcaaaaagactaatacaactttctcaaaaatttgcaagctacttgagaaaacaaaggaagtaaaatcccatgaaattttgactttattaatttaaggttttatgataatagagatgaaacaacgaaactagacggtggttcaatttttcttccaagaaccatactaccacagtaatgtcaattacgaggaaaaatagccctcgttatctcaaggggaccattcgggtgattgacgacgaaaaccttgaccttagtagagctagaaagcttaagtttgctgtttttgatagtggtgaatgccgcgacactgagggattcgtcatatggaatttgggcgagctgaagaactcgaagagcattcgacatgttaagagatgctataagctcctttctgcataagcaccataaacgcggaatttcataatctttggctgcgctatagagtgacatagcgtgttgcttagctttctctgaaagcatagagccgtcgctgtaggtgaagtcaacgaaagcctccaacacttcgtgtttcatctctgagagagtgattgtctccagcttggacgaagctttgtatttatctgattcaaacatctcctcaaacacttctgatcttgcagactatacatgttacaaggaaataattctaactaaatcagataatggtaagaagcttaaaaagtagaagaagaagaagaagaagaagtcgcaaccagaatacgcttatgagcagagatagctgcatccttctcactgtcccgtgccattagccttacatcgacttgttgttctttcagaaccttcagaaattcatcatagaaaaaccctttgtttgtttgtgtccccatagctataggctcatataacttgggtttgatctggtaaaggatctaaggttggatatatatagagagacccctggatggtcaactttcattttctaagacttttttggaaatgaaagaagacgacaatatactagaattcctaaactatttgcggtcttctacttgtaattttatttaagaaaccataatagtatgtgtaaaggaccactcatgcagtattcttggaaagaagaatttgttgggttacttcatgtttcttcccaaagagagtaattatatctaggttgactgaaacattgaactcgtctcattcgagcatctttttgcctattaattagaatttcatttgtgttgaggaaaccattgtttagcaattgtaagagacaagagaagaagtagaggaaaacagaacaaagtttaaacaatgttaagtactaattactttgtgcaacttaaataaaaagttgaagagatggactcatttttaaaccaataaaattattaagatcaggaatctatattccataaaaccataggggaagaagaagaagaattatctgtttgggtcataaaacatcaaacacaaacaagacttgagtaaaactcaaacacaaacaaacataaaccattccttgaaaactcttcttctacttccattccttaatttttcatcacgatccaataccgtgtaaataagtggaatcgatggtttcaacggtttcgccattagccttgtcttgcttctccttgtagtttttaattgctgccttgatagcgtcttctgcaagcatactgcaatgtagctttactggtggcaacgatagatgcttcgcaatttgcctgcaaaacatcaccacaaagtccataaatttatcaataattgtcaaagatttgaaggcacgtaatcacacatatagaaccaatatcatcatatcgttaagacttttattcaaataactaaaaccacaaaaagaaggcacttacgagttctttatggtcaagacttcctccacggattttcccttgacccattcagtagctaagaataataagcaaacttatatcaaacatcgcaaaacttatgaacttatgaaactaacatttgagaggagagcttctaattgatttcaccaaatcatacactaatttacaaaaaaaagctgctaaatagtcagagacctctctaatacctatatgatttataacgcgattacgtaaaccatgtaagcgaatcaattaatttaaagatttcaggattagagaaacaaatcgatcacaatatcacataagaaggtaccataccgacggaagaagctgctatggcagaaccacaaccaaaggtcttgaatttagcatcaatgatttgaccagaaccatcaaacttaacctgaagcttcataacatctccacattgaggagctccgaccaatcccgtaccaacgttaggatcattcttatcaaatgatccaacgttacggggattgtcataatggtcgatgacatttggatggtataatcgagacacgacagggaacggtgtgggattttgagaagcgagccctaaaaaggctcttttagttgtttgccttaacatgatcgatcgcttctctctatggagcttgttgtgaaattctagggctttctctctagacgattaataatgttttttttattgtgagggaaaattttaagtatttataaaaataactaaaatattgggagagtatctttagtaataatatgctgtttttttaatgcgaaactaggatcggatccgcgctacagcgcggagaaatttttaatgagtgtttatggtgtgaatttaaacttgtgattatattttaaaaatggtatgtgtctgcaaaagttactttggaaaatattactctgtgttaaaaagaaaattttcgattttaatatcagagatttttatattaaaactgtaagtactatacgaaaagtatgtaataataatattagaggtgtcaaactggtcagcccgcatccactttagccagcccgcgataggcattaatttttgtgagattgcgacggactgaccaggagtgcatgtagaaacaatatgtccaaacccgtcctgctaagcccatcagattagtagccaccctgcatgcttagtttttatatttaaaattaggttttaaaaaataaggttaatctttaaattttagttaacaattaatatttattttttgtaaatcgtataattaatacattaaattttgttacattatcatatctttcagatttattttttcagaatcatgtacaagtatttatttatcaattgttttgtattatatattgtttaggttctctattgagaattattgttgtaaatagtgagtgatttttgccaacaaaattaataattctagtatttagaataccgcaaatctttgatttttattttaatacatttcatatatatatttattaatttagttagtttctatgaattcatgtttataaaaaattatgataagccgcacaaattatgtctcaaagtctccactgtgctcaatgtttttatttggacatcttcaaaactacatcaaaattgactaaaaattagataaaaatataacctacttatgttaccaacattatttcaatatattacattgttaaaaccacgtcattcgcggttatgatttacgctctttgttgtccatcggtcaagtttggcctacatatacattataatcacatgaaaaaggagtataatcaaccaacactttctttcaaaagtatttaaatataaaaataataaagctaatgtattttaagcatatacattaatattataatcacatgatcaaaaagaaaaaaaaagtaaacctacaatttcttaaaaaaatgaaatataaacactaataaaattaattaatgtattttatgcatacggtttttgcatatagcataaactgttttttaagtgaacacaaattatatagatttagtgaagcaactgaaaaaaaaaagatggaaaacataatagcattattttatttacccaaaaaaatagtattttaaaaaatgggctgagaagatttttttttttttgcaggcaatttttcgtcttataacgaaatccataaaggacaaattacaagatacgtgatacaaagccttttgaaacccaattttaaaatgaaccaaattacacaaagaagacacgtaagagacacgtgtttgatgcaaaaacctaatggattcatgtggcacaagcgagaaaaccgcgggaacacctttggttgctcaccgccaaatttttaatttgccgtcacgtccgacgacggtcttaaccaccaggtgaaggcttcaattcacgctcttggagccatccttctacagatattaccgccacaaatcaaattgggtatgttgtttccaccttgagtaataggagattttgtagatcttcatctcaaccccaacttcaaaggaagaagctccgcccaagaccgatagagaggtccacttcgcataacgacgaagacattacggcgaagatattactctaactttggagaagagtcaagccaacagatgaacatgaaagaaaccaattgacagcaagcgggatttacactgaaatcctgtagaaagagggaaaaaaaataaaactaaaaataatccgatcttaaccggaaacgaaccaagctaaaccgaaaattattaaaatctgactaagcggaaagagagatccgtcaaaagtcagaaactatgtataaaacaaaaaaaccagttgtcgccggaattctcattctctctctgaagaataagagtgtgttaagagagagaaggctcctcaatcgatgtcttgttcaatgaatcgatgactttatatagagaagagagggtgtcaatttagggctagtaaattatctcctagcaaaatattctgttaacataaaagaacaatctaaatgatttttaacgatgaataaggaatatcgttagagtaagaccttttaattagagcaatctaaaccttatatatttttttttttctgtttttgttatatttttgaatttgtataaatcaacattattagtttccatagttaaagatcatatatcagatttgattgttaatcaaacaattataactttgtataattcattgatatattatacgcaaataatgtttaatatttattcggctttcataactaaggaagttaccatataaatcggaattgtgttaataaccataaaagacaattattagttgccatttgttgaagatatgattgaagatttggtaaataaaatatttattcgaataatttatatgttaaacaaaaaacgactaagttaccttattaataggatttgttatgtaaggtgaatatatttgatccgattttatatcagtttgttattgttattttcttatataattaatttgaaatcgaattgaaattaaaagatccaatgagccaaatttctcgtaaatccatttaaattgaagcttaatttttaatttaacccgccctattttctaaatgtacttctcttttaatagtatagggattgttcatttcttaactaatagaacggagaatgaaatcttattatttagataaataccactatagccatgattcaacgaacttagtaaaaagaaaatgataagtataactttgaacattagcgtttttaaaaaattataattttaaacattgatttattatagggtatgatcaccatatatacgcagaagattgtcaaattaagtctcttaaaatcccactgttttactttctctgttcatcttgcaaataccaatgtacccctatattataatgttgactcttttattcttattcgtttatcaaattaaattcatgacccagaaaaaaaaactggggaaaagaatcaaagtccctaaatgcttgactgtcttattcaaaatatcttcctccgtaataatattattttttattcggaaaattttgttgtcgcatcgtttctgtattcgtctgtgtttcttcgctcggagattctgaagatgatgtgtcgccatggatgatgatgaattgatgatggcaaccaaagttaatgtaaaagacaaattttcgatcgaagaagaagagagatagactattggaatttccaaataaaatttcttttttctgatcccaatcaaaagagaaagcgagggagagagctagaggatttaattaagagaaagaacattcatgggaaggtgatattgaaatgggtcacatatcgaaccggttcgtaccaaaccaaaattctggtatgattaaattactattgaactagttgtagtaacgaccaattttattcaggtatttgatatacgaggaaaaattatggttcgatcgttacagtttggattaactaatttggtaacttcaatgcgtacatgtatatttaaaatgatcagattcttgatttcttatctttattgataaatattatgtttgagttatattaatatgaacattacccaaataattatggtgtgggtttgcggtagaggaaaaaaatggttctgaaatgatggggtgagaagaatacggcggaaatgtggtggttgaagattacgacaatggtagtttttgttcagattcaaattggttaacaatcaaattacccaggtaactaaaaatttatctagaggtagtgataatattaatcttattggatgaaatttattttttgcatgttatagtaacttgttaatttttttatatgatataataagtgagttaagaaggtaaatataaatatatcacataagttataacttatcgcgatacaaaatgacttagcatgacataattataaacttattgatataaatattttgtaacctaataagtattaccgagatatttgttatcatgttatcctgataatacgttatctgctaactaatctgatgcatgtatttctttacatgattattgagtcgcaagtcaacttttttgcttttcatgctaaatattttgttaccttttaataataatgttatcgtcttcgcatatatatcagtttttgaaatctaatcattggttcaataactgagaatttgtttatatcgtcaaatatattactaacatattaagttggtttgtatcccatatcatttcatccatatagcaaactccatccatattttgctaacgatattatctcgataatgcgttatatgctagtttagcatgctaacaaaataattatacactaaaatcataaatatttaacagtattattttcagtcatacctcatttaatgcgggatatcgatatctttgttcagttgcctaaatgtatgtcagggcaatagggttaaaataggtatattagatttgcacgttttattacacctaaatatcagctttccatgtatacattcttaattatatcaccctctatgtacatatatttaactaaccctttttgttttctgtttaattaaaaacacacgtatcattttaataattaacacaaattttacaaaaaataaaaccctcgaaagaaataacataagacctaatgttggtggtcttataataacaaataaacgattttggcgttgcccgaaatatacctagatcccatctaaataatcatgtgccagtcatagatgtttttgctcacaatttcaccgtcccactgtacgtagttagtaaaacaagtgaatatttctgtccgccaatatccaacttgtgcgaagacgttgttatcgttaatgccaagacccaaccaccggtatgaattgtgtatcgttcatctttgtttattatatattaaaaacatttctatagtaaaacatgataaaatagattgggtaaccttccaaatttgaataataagttcggtttgggtgcttccgaaaatcgacgtcgaggggagatagcagtacgactggttactataaaatcagggcatgcaatgttaaaaaaccataagatgtgcggagtccaactaactcaagctagccttctgcctactcattgagcactgagcagactcctaaatcagctaacgacacttttgaaagcgataaataaattgattaaatgttagtcgattgtgttcttaagcaaaagcaagtcttttataaacacatatgatatgattaacataaaactgggcaatcatattacaaaatatttagcaaaataataaatcatgtggtttgcaatgttgaagtaaaatataatatgctacaatgcttatgattgaatataaaaaatagaaatatatccaaactagattttaacccgcggtacaccgcgagactatttgttttattaaaaataactgaaaatataattttttataaattatctatatgtaacatattgttttgtattttataaatatataatcctaatttctatatattgtacaatctcttgattttatcatggcgtacaccgtaagtcgatttttaagactttaatttaaaattatatatgttttttttgttaaaattgtttgttttgttatatattttaaattatataactgtatttaaattgttagttatagagtttcacccgttgtatactgtttcgtattactatagactcaaacccgtcttaccatctaattccgttctgtggaattaaacatatttaatggatttcatccgtggtatactgtctcatattactatcgatccaaatccgtcctaccatctaaccccgttcaataaaattaaatattattttattgtgtttgttttaatagtactttaatttaaaatatatatataattcaaatcaatttcaaattttttattttaaatggttatttaatttttataaagttcatatattataatattctaaacccgtcataccatctaatcccgttcggtgaaattaaacattattttttattttttgtttaaataatatttttattaaaagatttataactcaaatcaatttaaaaggtgactttcaaatggttatttaatttttatagatttcacatttcaaatatttatctatatgtaacatatagttatgtattttataaatattataaacgtttttccgttaaatattataaacgtttaataaacattaaataattacaatatttaccttttaataaagtataatattaataatgttgtaaataattatgtgtacctaattttaagggatttgatttaaagtttgttgtttggattaaatttgaatgataacgtgattgatatattaaatcaagaattaaaatcaaatcaaatattaaggaaaaaagatttaatgtcaatggcatgccattgtaaataagtgtcaagtagaagatttatttgctaaagtggctgcaaaaatgtatatgtagatttaaattttttttgccattctgctagtcttggatgttatgttattcattcggttttggttggtatccatttggttatcggttctttttgttttaaagtttagtatctattcggttattttgaaatttcggttctttctttttaaaaatttcgtatgtattcggttattttgctttgaatattttcgaattttttgattatttttgagtattttactattttatatatattttcaattgttttaagggaaattgcactgggtatgctcagtggatacaatatttatgtcctaattttccaaaagtttcgacgctactgttgcataaataaagacgcatgtacccctatgtccattagaaatctaaatgtagctcttatatctctctgtgtcaggcggatagtagaagatcttgctttggatattttagtgggtgaattaaatttttatattattttgatagttttcaatcaaggcgtcgtttcggtccaatctatatttacctcatgttttttcttcgtctctttcatcctaattggtttgttatcagataatttgttaccgtacacgagtttttgcggttcagaattcgtctcacgtgtggcgagtggtgaatatattaactctattatgaatatattaactctattatctgctatcttgttatctcgatatttcatattgtttcactctttgtaatatctcgacacttcattgcgcgtgttgaaatttattgcgcgtgttgaagttttaacctctaacggatttataatcagatactttattatcgacattgcgcttcagaattctacattttatttactctccctacgtgtaataagtcgacatttcattgcgagaggacctatatctatattaactctattatctgctatctcgttatctcgacatttcattgcctgttttgaagttttaactcctaattggtttgttatcagataatttattaccgtacacgagtttttgcggttcagaattcgtctcacgtgttgcgagtggtgaatatattaactctattatgaatatattaactctattatctgctatctcattatctcgacatttcatattgtttattctgtataatctctcgacattttattgctcgtgttgaagttttaacccctaacgaatttattatcggatactttttaccgtatacgaatttttgcggtactctcactacacgtgtaataactcgacattttattgcgagtggtgaagccctacaactatattaactttattatctgctatctggttatcgtctttgtgggttctgaaatccacactagagatttgtatttaagattatgagaaaggagggttagatcttcactgaaacctttagagttatattgctaagaacgaatggactttaattatgacagagcttttacaatatgaaatgagattacaagtgtaaagtgtgtgtgtgccaatgtgaactagattgaatgtgtcttccaagtcgtccttgctcccttatatagatctacgcacgtggtagctccgtccggaatctgcggcgatcctcctggatattcggcaggtcagttccgagatatcaggtccgctccgcgaatatctcctcatcaattcctaggtcattattcgcttatctccctgcatcaggtgactgggcttatctggcccaaatacccattcgcgtatgtgggctcgtcagctgcgtaggtcctctacttggtgggcttggtgggcttttgtgggctggcttggtattttcgcaggtggattcctggaggggaatacagctccaacatttgccccccagcccattgagtgagtaggcgaactcgatgagcggacatataggtcaggtaagattgcaaaaatattcttgatgagaagataaatgtgattagatcagtcggttttgaggataaactcaacaatttcgttttaatttcagattcccttaaccgaaagattttgaggagatacgcgagataagtcgctgctgatgtggacggctgagatggagcgtctcttcagcgcaccgcatctgacagtccagatcaggcgcggagaagagatctctgcaatctcgaaaatcgtggtgatgatggcgttaaataacttcccacctctccacttgacgtcacgtcaactcacacaactctcaaggtaacttctctcctcctttattatttactgcgctttgttttgtagaagtagaaaaaatctcgtctttatttttttgctatctccttcgtttctctgctactccctccttctcgatctgccttctttgcttttttctttcaactctctcgtccttctctgtcgaaaaccaaagatgagcgacttcgaagattctcagaacaaaagcaaccacagctacggcgacaattcaagttcgtcaccgccgcgagtacaaaaacgcgtcataaccctaggcggaatgggtccaattcgttcgccgtcaaccagagccgacaagccgaagaagaaaaaggctgccaagcaaggaggaggcacgccaatgacgaacagcgacctggtcgacctccggaggagatgccaggttccggtggaggtacatatgatactctcaaggccgccgctgcatcttgagaacgtgtcggtcgggtggtgctgcgcttatgccaatttcttcgagaaatgtggcctatttttcccaattccggcgtgtatcctcgagatgctctactgtctcggcctcgcctttccccagatgtgtccgaacttcgtttgccatgtgctggcgttattcacagagcattcagctgccatgacctgcttcagctctgccaggtcaagaccaatgctaggagtgaccaagggacgtactacatcagtgctcgtcccggatctctagtcctcggtggtttgaaagcttgtcgagacaccaattggcgatccaagtacttctttttcagagtagaccgtcattcaatcggcagtttcgatcctgcgaggataacaaggacctggtctaccaacctgagtcagatggagacctgagcctcttgatttttctttgttgtttgtgtcgaatccttgactgcttttgctgaacgttagtactgaaactattgtttgattttgatggtttgcagcaaggaccaaggaagttactctctcgcagacggaactcgagctgttaacccttctccgacgtggtcagactgactggtccacttttagcagagatcgcatcgtagctgctcttgctgtagctccagcagttcccgcaatcgtccctccaacagcacagctagatccgatcgaagaggtcccgcggattgaaccggttcctcaggctgatctgcctataagtacgagttccgttatattttcttgggtttaaaaaatgtacgagttatcgagacagctgcgcaactcgaattgctaactaacaaatgtcatgctctatttgttcagttcctcctgactccagctccacttcagaactcccgctcattagaagaatgagatgtccaagccttcatgttcaacgagccaacgccgaggctcatgctcgtgccgatgatctgtcggctgcggtgactgcggctcgaaacactctagctgtttccaacgcatctgcctcagcatctcatccctcccttcctgaggtcaacaccgggacctctgctgctgcagttgttcgttctgatgtgcaccgtcctctccgaagagggctcggacccagccgaaggtgaatccagcggctgagttagtcgtgagcgactagagggtcacctctcccatagagcagaggatggaacctgcggctgctactccggaggcaactgcgtccgcggataggcaatcctcgggcaggtcccatggcggaggacgaggctccagagttgggggcaggtcttcaaaccggtctcaggaagtgaggcagacgtccaactccggcggaggatccgcgggaagcaggcctttccactggtcttacactcatgaccgtgatcacccgatcgttgaggacgaggctggattggtgaacctgcttcgccatatcaaagggaggaactgccaggttcctgaagtgaagaacatggccgaggcggcggcctatgctgacatgatggcgaaggagggccaggtaattatcaataactgtctccttctaattcttttctttatgctagttgtgactttttgttttgctttcggtaggcgatagctgccacaaacaagctggtcgctctctatgagcagcgtctgagccaggttccctcggcgagtgagctcgaagaaggaaagaccctcatccgggagctgacgtcgagtgtgaaggctggtcaggatcgcgaagtctcgttccaggtacacctcggttttgacttgtttgtaaataatttgtcgatgattcgatgattttaacctgattgttatttcaggcggagatcgagaggctgaaaattgagttgtcaacttcaaaagacctcgagaaaggttatgctgagaagatcgggttcatggagatggagttcggggggttgcaagccgacaagcagacggcgaggagccagattcatcgcttggagcagaggagggaagagctctccaaaaaggtgatggacctgacttcgtctgcacaaggggcgaagaaggcggttcacgatgctaaggttgagctggctgctgcgtatttgaagctgctagctgggatcaaggagaagtgggtcaccaaaaaggagtacacggttctggaggggcaagcggccgaggtggagtcgaacctggctttgatcgaccagatcacgaaggctgctattgatcttaccttggagaaacctcggctgcaagcagagctggatgacctagaggctcggtgcaaatcgaaggaggtatcagactttactctaagcaagttggatctcccgcatgtttcagagatttcggtggtacgtccaattgacgtcgacgagcaagggacgccaattggcttggatgagttcgggagcaataaagacgcgtttccgggaggtctcgcggatggttctggtactgtctttgctatgccagccggagaatcgagggagtgatcactttcgcgccttgcttgttttaggattttgcgttttgtttcagacttaatgcctgggaaggcttttatcctttcgtttattgctttttgaacttggtgcttgggaaggcttttatcttttgttcgtttaagtacttgggtgcctgggaaggcttttatcctttgttcgtttaagtacttgggtgcctgggaaggcttttatcctttttatcaattattttttgtctttcgttcgagtgttgacacttcgttgattttggtgtatgatcacctcgctttgtcaacgttccggataataattggacttgtttcgaatccaagttatttcggatgtgatatggtatattcttcgaaggttaaaactttgagtgagtttgagttgttttgtctcgggaacctgttgaagtgaggtcacacatgggacctgccagattttgggagctgggcttgtggtatcgccaggtcgagaatgaaaccttcgtttcttccttggttactatgttatgtgttgatagcgaaagagttagatttggttgtagtaggtgagctccgatgaagccgaagtaatgtgttcttataagtttagttcaccatcgactttttggaagcgagatcacaaaatggatccgccaacgttcgggtgttggggtttaggtatcgtaagattacgaatgagtttaaatcatagtgtaaatgactgtctttgcgaaatatgataatgagtatcaaaattttcttttattcttatctccaaattgttaagtacaaaaggaggtaaagcaagcgacgatctggcgtttggtcattgagcagggacctgctcgataccgaagggaggttaaactgtcaggtgagcagctgatctttgttgatgggggatgcgatgtctgtttcccttattgaagtttcgtctttcagatggaagggttaaggtggtaattgcgtttgcggaggtgactgcctgcatacctggttaagggattaagcccttttgtgatttgattgaagtggtggctgcgctcttggggggagctgcctacgtaccctgccaagggatcaagccttatcgtttgagtacctattcgtggtatttcttgagatgcatgggattccaaggccgtaactcagggactccgttgataacttttacgtgcttatagacgccgtcacgtaccacctcggtgattcgatagagaccttcccagttagttcccagttttccagcgtttagctctctcgtgttgctgaacacttttcgtaaaacgagctctcccacttcgaatctccgaattttgatattggagttatagtagcgggcggcagcttgttgataattttaaactcggatcattgcctgatctctgcgttcatcgatgaaatccatgttttcccgtaacatttgcgtgttcaggtccgagttagcaggactggcggtccttctcacgcttggtactatggtttcgacagggattactgtttctaaaccataggcgagagagaacggtgtttcttgcgttgatttgcgaggtgtagttcggtagccccagagaactccgtggagtacgtcggaccacattgatattttggaattaagtcttttcttgatgttgctaagtatagctttgttggcggcttctgcctgtccgttaccttgtgggtaacaggggtggatatggtaagacggatcttgcacttgtcgcaaaatgctttgatttttcccgaggtgaggttagtcccgttatcggtgatgatctcataaggtatgccatgtcggcatacgatattttcccataggaagtcctcgacttgtttctcggttacctgttagaagctttagcctcaatccatttggtagagtagtcggtgaggaggactagcaggttttttagtttcttcttcccaccggaggcttccatgggacctacgacgtccatggaccacttcataaacgggtaaggagaagatatcgaggacatttccttgggaagttgatgaagagtaggtgcatgtcgttggcatttatcgcacctgagcgaatgagctatgcaattggctagcattgttggccagaagtagccttactttttaattcagagggcgagggtacgtccactacagtggctaccacattgcccctcgtgcatgcttttcatgaggtctttcgtttgttgcccgtaggtacacaccatatagggacctacgacgctgcgtttcatcaatctcccctccataatgcagtaccttgcgctctgggctttgagttttctggtctcccatttctcgggaggtgtgatccctcgttcgatgtaatcgatgattgggattctccagtcattgtacggttcaggttcatacgaggcaggttgttcgggggtcccgagctccggctcttcctccgctgcacctgcctctgcggccgctgcaagggctctagccgcggcggtggtgcttcgggttacttgcgtaaagttgcaagttgccgaggtttccgtcccaacatatttgaccgttaagtcgatgcttgggtgttctattccttcgactggaataattcttttgacgaaaggatctgacgtgtaggcgagagctgccaaggcgtccgcagaggtgttttctcctctagggatcatggtcagttcgaacgattcgaactgttgggtcaaggttttgactagttcgaggtacgcttccatgcgctcgtctttagcttcatattccccatggaactggctgatgacgagttgggagtcgctatgggcgtgtatatcgcgtatccccattccttgagctagcttaatgccagcaatgagggcttcgtactcagactcgttgtttgatgcgctgaatccgagtcggaacgattattcgatgacttccccggtgggggaggtgagttgtattcctaccccggatccttgtcggttggaggagccatcgacgtggaggagccatttcttattggagttggttccatccaggtccgctaacaggagctcgattacaaagttggctaggacttgtgctttcaagctggttctggtgcgatattctatatcgtactcacttagttctatagcccattttgcaagtcgacctgattgagttggactgtgcagaatggttttgattggttgagacgtcatcactacgatgggatgtgattgaaaatatggtctcagttttcgagctgacatgactacggccagtgccagtttttccattgctggataacgagtttcagcgtctatcaacgttttactaaagtaatagatcggtttctgtccttcgtgatcttctctcaccagaacgccgctaatcgcggttcgggagactgccgtgtacaggtacaacggttctccttcttcgggttttgctagtatgggtggttcggacaggtacgctttcaattgtttgaaggcttgctcgcagtcctcattccaatcgaactttttatcctttcggaggagctgatagaaagggacgcatttatcggtagacctggatatgaacctgttgagggcggcgatactgccggttagtcgttggacctcccgtgccgtctttggagatggcatgtcgatgaaggctgcaatctgcttaggattggcctcgatgcctcttttggttactaggtatccgaggaattctcctgagggaactccgaaagagcatttctcggggtttagcttcatttcgaatttgtttaggattttgaagcattctcttaattgcgggacgtggtctttttcgcgagctgacttgaccagcatatcgtcaatatagacctccatcgttttacctagctggtcggcggacattctattcaccaatctttggtaagtagctccaccgttttttaaaccaaagggcattactttataaaagtaggtgcctcggtcagttataaaagctgtttttcttggtcatctgggtgcataagtatttggttgtacccggagaatgcatccatgaaggacaatagttcgtgtcccgcagtggcttcaaccagtcggtcgatatgtgggagtgggaaactgtctttaggacatgccttattcaggtccgtaaagtcgatacatactctccacttcccgtttttctttttaacgacgaccgggttagcgagccagtcagggtattttacttctcttatcgatccgatcttgagcaattgatcgacctcatcgtgcacagctttagccctctcgggacctagcttgcgacgtttctgctttataggtcggtagatcggatcgacgttgagttcgtgtgaggttacttcgaggcttattcctcggaggttcgcacttgaccaggcaaagctgtctttgttttctttgagaaaggttatgagatcctcttgtatcgctaggtcgaggtcttgacctatcccatcgcatcgtttgggatctgattcgtctatgcagacctgtgttatcaatgactttcgaggtccgcgttgagaaggatcagaggatctgactgttttcatttccgcgagtttgtcttctatcattagtactacggggtcagcctttttgataagatcgtaactgcccatatagcattttcgggagctgcgttggctgccgatacgactgctattcccttgtccgaggggaatttaatgcattggtggtaggttgatgggacggctttcatggcgtgtagccatggtcttcccagaattgcgttgaaaggagctttcttgttgactacgaggaaactcgtgagtcgcctcactcctcgtgcgatggttgggagctggatggttcctagagaaaaggtcgtatctccggcgaacccggtaagtggcgttttcctgccttgcagctcggaatcgaggtgccccattcttttgaaggcgtcgtaaaagagtacgtcaactgagcttcccgtgtcgatcattatatgggagagttcgtagttgcctacatcgattcgaataacgagagcgtcatcgtgaggtttattgaggtcggtggtttcgctttcccagaatgtgatctggtggttaggtcccatcatcgggctcttgccttttgtgtaagaatctgccttcctctgatgagttttgatcgaattgattgagtcgttgcagagctgagaccctcccatgatgaaatcgatgcgtttcggggagaggtgctcggttgcgcttctgcagaatttcaagagccgtaatggaaacctcatgtttttcttatgcggggcggggggaggtgtggtgactgaccacctagatcgagttctgcaaagactaggtctatgcgttctcctctagaaggtgggggagagtcacttccctccggtgttcgttcccgtttcttttgcttgggagtttgctcctcctcctgttcgtcgggaggaggggtttcaactttggggtttgaaccttttttagtctttcccccagctgcgattaattttttaacggcgcgacactcctcggtggaatatcctcttttcttgtggtacttgcaatattttccgaggtcaagttctggactctcgttctcagctgcctcgtctattgcgaataaggtatgctacccctgcgtttggttttcctttttgaagggcttcttaattgcaaggggagcgttttgcgttttagattctttgaatcgtaaggccagcacactaagctcctcttcggctttggcgaagtggagagctttgtgaagggcatcgtctaaagagactggttgcctaacagtgagttcctcacggaacctagaggagaactaaaggccgttacgaagggctgcaatggctacctcttcgtttaggtttgcagttttcgatttgcaattttcgatttgattgctttgaattttttgacgtaagatcgcagggattcgttctgaagttgagtgagactccagaggtcggcttcagacgtcctgtgttcgataagtaccgaatattgttttaagaaagcggcggcgagctggtcgaaggtatcaatggagttcccttcgaggctagcaaaccattcgagggcgtgacctacgaggttttctgcgaagaaacggcaatgacctgcttcgttttcttcgtctgttaggtacgctcgtgttatagcgaaacggaaggatctcagatgagcctttgggtcgctcgttccgtcgtattctgggaaacggagtctctcgacatctcggaggcgaaaacaagcgatcctatccgtgaacggggtgcgcctggtttcttcgatcacgcgatctatgtcgggagcatcgctcacagctaggtgcattcgagaatgcatttgagccatgttcgcgtttgtttgagctgcgtaattgcggaatgtttccatatccacgacgttacgcggatcgaccggtgcttggggactgttaaggaagtcgcttcctggtatctgaggaacagatggcggattagcgatagaggtccgttgttgcgttgagttcccgggaatgcggaaactggatgcggttgtttggtttctagtacacgtgtacctagggggcgaacagcccatcggtaataaaggtggggccggtagccttgggaaggcaggcgttgtgcttgtttcgttttctgttgccaggttttcgacgagagcgttcgcaggtgcctgtaaaaaggcgaaatccagacgagttctcggagtaggatcggtcggggagacggtacctgtcagatctatggggacctgggcaggaatcccagtttcgcggggggaaacctccttacccgcgatatcgcgctctacctcatgtgccatgcgagtggaatcgcgtctctcctgacccacaattgcggcgaggttgcaatgcgcaatttcttggtttttggttaagttgatcaagttaatgatcattgcgcggagctcggccaattcattggcaggtcgcgggcgaacctgattagacaggttggccgggttatctccgtttggaggttgtatcgtgatgtttcgttttccgccccttgtttgcggagggggagtgattttgtcagatccagaagaattcgagttttgggagatgttctccgggtcactgttatggataacatcaacctgggctccaggagggagatccgttgggaggtgcccgtccgtaacgtcatcgtttgggatctgaactggtaagccagatcccgatgaattggatgaattgggatccatgatcgttggtcacaattgatgtgttagcttcggtgttggaatgatctatttccgtccccacagacggcgccaaatgtgggttctgaaatccacactagagatttgtatttaagattatgagaaaggagtgctagatcttcactgaaaccttgagagttatattgctaagaacgaatggactttaattatgacagagcttttacaatgtgaaatgagattacaagtgtaaagtgtgtgtgtgccaatgtgaactagattgaatgtgtcttacaagtcgtccttgctcccttatatagatctacgcacgtggtagctccgtccgggatctgcggagatcctcctggatattcggcaggtcagttccgagatatcaggtccgctccgcgaatatctcctcttcagttcctaggtcattattcgcttatctccctgcatcaggtgactgggcttatctggtccaaatacccattcgcgtatgtgggctcgtcagctgcgtaggtcctctacttggtgggcttggtgggcttttgtgggctggcttggtattttcgcaggtggattccaggaatccagctccaacagtcttctactattgggcatagtcttatttattcttatcttctatcaagtatcttctaatataacctatgataccatatcaaataacatattatcgactaacctaattatcttcatacttgtgttagaattaaatgctgcacaatcattacgtatccaacaatatctctgctcaataggagcaaatatgtcagaatttattgtcgggaggaaagagaactaaatatgaaatcatcattcatacattcctaatttcgcattcgtctgagcataaaaatttaattcacccttgttttaaattaattagtctaaaaataactaatatttttgaaaatattattatatttcggttttttggttacccgaaatatttcggttcggtattgatttggtttctaatctttcggttataaaatattgtatccatttggttatttttaaatattcggttcggtttatttcttttgcttcggttttggtttggtacattcggttcgatttatttgtccagaccttcattctgctatgaaaaatgacaatgtgtttgaacactaaatctcctgaaaatgtgtagaggtcaacaaggagaaaaatgaggtcatgaaaagtatgaaccaccaacatgagttacatgactacgttaaaatctgaactaccaacctggtttaatgtgatcaaaaggttaccatcccaaattcaactccacttcatatccacttaatgcatattgttaaaaaaataaaaaaataaatgatcaatcgacttatagacgaagagattttcaacaatggactaagtatatgattatcgaaaaattaagtttccggaaaaacatcatgtagagtgtatgaaattgcgaaactttattattaacacatgagtcatctatattcaagtgacaccacaatacaggacttacacattgatgaccacttgttggttcacttgactcacagtaactagattttacagcaaaaacgaacaacaacaaagaaagtgagtcagtgagtgaatctcacagtaccaaaattctttaggcttgagccccgagttcgagcattaatgtgtgatttctcgcatcagatcccggtcccttaaactgaattggacctggcaacaagagaaagaataagagttagcatgaaaaacactaaagaacgaaatcatttactactttatgcagagacatgtgtatgtgaactaaccaggactaatgtatcgattcttcaaagcccattcttctcgctgtgatgcaaatttcttaaacggtgcacctgaaatttatagtgttagcaagaaaagaaaccgaagaataatatatgttttgagctaaagactaattaccttcaagttcaaccatagctttcttgataacaggcttgaatttacctgcaacataaaaaaaagagaatgttggaaaagaatataatcttatcaaacacttcacgatagtatcgacttatattaccatgtcttctctcaacatccatcaacgaagtcagtgcagtaccaccaactgtccactcttcaacaggagcagccaagtttccaacctgcaaaacatcacaaaggggaatataaataatcttgaaataaagaaacagtttgtgatattatcaagaaaggaagaaaaattctaaaccgatgaaattaatccggtctttccgctctggagaagtgatccagcaccgtaacctaatgcgtagcagtaagttgcatcgaaatttgtaggtaagccgcatcttccttcatacctaaaacacaatgagaatgagaatatgattatgttgacgctaattagttattaacaaatgttttaggctaattcattacccaaagaagtgtgatttccccatgaactcgcgttcatatgtaccctctgtcttctttttctctagctcggtttcaaccatttgaatcaacattttctctgtctctattttagcaacctgaagagaaaattcatataaaggttcaaaataaacaggttttcagttcgagtttgcttgaggttttagccttttaatttgtttgaatcagttagtggtggatagaagcagacctgcacatttccatgtggatctctctcaagcattagttgttcttgaatagtttgaggaagaaactcaaaaatctctaaagtctcttttttaagattcttcttccattggccttcttcatcgacgtttccttcggctaagacttcattcagttcggaaataagctgttggacctgccaatggatcataatagatgaacgttgaagaacacaaatatagggactagactcgaattgaccattatagatttgagagtaaccatatacctcagggataaaatcaattagaccttcaggaacaagaatgacaccgtagttataaccattttctgctcgtttatagatcacatcaacaatgttatctgtaacatttttcaacgtaagcttcttctcaaaaacctgcatatatgttggtgctttctagttctcaaaccatatttgaaatatagcaaaccaaaaaccacgaatgaagaagcttgagtgactcaaaggtacctcttctccaataatggtaatgtttggatgggtttgcaaagcgcattcaagtgtaatgtgagaagcagcacgacccataagacgcacaactatagagataatcaacagatgaaatgatatagtaaatttgtatcaagaaaattcattttgctaagagaaaacaaacttacagtgatagtattttcccgtggaacgcgcatcgatcataacatttccaatcatttctgagtatatctacatgtatataatcacaaaatggaaggtcttctataaaaagacaactaagttatgcataaattttaaagttacttaccttgcaagcagtatcaaacccgaaactcgtggggacttctttgctctttaaatcaccatcgattgtcttagggcatccaataaccagagttttcatgtttttagctctgaaaaccgaataggaaaccaaacattaaaacacaaaacagagagaagtgagtctcattaatcttaaacaatttcaaaaaattacctaaagtgttcagcaaggagacaagcattagtattggagtcatctccaccaattaccacaagaccatctaaatccatctttgtaacagtctcttcagcttgcttaaactacaaaatgtaccaaactgaatataactaagtccatcgataaaagcatcaatgcgcgccatacaaaacattaagaaaaacatttctacctgctctggagtttcaatcttgtctcttccactacatatcatatcaaatccaccctgcaaagagactcacaacaaaaactactaagaataaacacaaaatgcatatctttaagtaacaaagcttttagttccaactcttcatgatgaaaatttgattactccaacaatacattcttcaattgatccaaacaagcttctatctaatccggttaaagcaatccgaaccaaaccaaaactgaagtgaaagatgaaataaaccgatttggttctttttctatatctgaaatctgaagaaaccgaaaggctaagacaataaactaggcctgggagatcggtttaatcgggttaaacggttcggtttgatcggttttctggttttttcggtttctaaaaatcctgccgaattgaaccgaataaaaattcggttcggatcggttcggtactcgggtttttcggttcggttattaagatatataattcgccgagattaaaccaaatgatggtcatttccattcactttctatctatgttttcatgaacctaaacatctaaaaccgaaaccaaaccaaaccggaacaataaaccgacaaaaatctaaaagacagaacatctcatacctggtttctataagggtacacaaactcagaagtaagctcaatatatttccccttcatgattccagctggaccgccacgaaaaccaaacagactacttcctcttgcatattcttgcaagtaatctatcaaaccaacaacaaaaatacaatcacaaatcaagtttttaaagcctgaaaatgaaaaatttgcacaaaggaacaaatgtctactaaccaaagattccacaaataacattgtgtcctccaggtgcttgaccaccagacaacacaacaccaatcttaagcttttgatccgatgaaacttcattagattggttaggaaccaataaagctgatggttgtccaaataaattagggaataatttctcaatttcctctgcaacaacatccaaaaccaaaattgacccaatcaacaaaaattttaaccggttaagtgaatccggtttagtaagattgtgattgaaccatagaaatcggacctggatgtccggcggaggagcttggaggaccatcgatgatcttgaaaggggttttaaagacggaaggaagaggaagtgtgtggtcgatacgactagcttggacttcgctgtatacagaagtcacacggctattcgtcggaggattgatcgaaattccggcgatgtagtctcctccgatcaaatctaattgtgatgccatttgtgagtattaggattattttgttcctacaaaaatctgtgaatgtcagaagtgtgtgtcagaaagtgtttggataagtcttcttcaagtggataatgaacttgcaagtttccgaatattctaatatgccaaatttggtcatttattgttttatatggttattggaatttcaataactgcaattttcgttctaatttgtaaacattgaaatttaaaacctttttttatgattattattgtattgtagtattgatgttgtatcacacaattggaataaatcgtacttcacatcaacagtcaaaatcctctttctcgtagcgagtattatagcgacaaaaccgctcttaaccattaacatcggtcaagttcttttacttaacgcagcggcagcggcaaaaaaaaagaaaaatatttaagcagagagaagaatgtacagtgatgagagaaaaactgtcgtacatgatgaacgccaatgaagattaaggtgcttctattaaatttgagcgactcatccgatgctgttgcaactcatcgtctgtcatctacgaatcatctaaatctgttattttcaattttggtgtcgttttacttaaatgttacttttcataatacgtcgttttactccgtagttgccactgccgcagcgttaactaaaaaaacatgctaatcataactaaaaataactataggtttagaaacgaacactacaatttggttggatctcaagttacaagatattttggtccactatgcgaaaagcaggatagtcaaataaatctatatctttttatgttaacgatctgattaaccgtatatccaaatagtgaaaatttgaccgctttaatattttgattgatctagtgggtatctctctgattctagtataagggcaacctaatcatatttggatgatggaaatattggaaggatacaaaattggactattattttgttagagtactggaccatgcgagatctttctcgcttaacttgcgactgtacccttttcagagaccggggatcaatctccttttgatgcaaattttgaagctgacaacaatgactaaatcatgtttgttttatttatcgataacaacaatgactaaatcatgtttgtttggtagccgttggtgataataataacgagcaaatttcaaaagcaatctagcaatgaaaattgttaggcgttgcatcaatctttgtcaaaaactgagtgaatgtaaatcgagcaaaaaaatgttaaatatatattgttaataactatgaaaagggacatcgtcaatccaaaacccctttttctctctcaacttgacgactagggtttcttcttctccttgccgccgttggtgtggcctctcgcccaccggcgagaatcttcctctttctccctcctcttcctttcttctatggctttagtgatgcttgctcgggctcctgctccacctttgctcctcccttctccgaatccgccgccgtgtgctctaccgcaagatttgaccagtttggtctctccttctgaacctcccgaccctccagacccaccagactatctcgttggagcttccaactcctttctctcgattttgctgttgaggtcttcagatctaggatcagatcttgttcaggctttgagccctctagatctgggttttgctttacgatctattactgctgtgtgcagttcgtggtaccaagtatttcctctcgcttgtttggagctttggttctctattccacacctctctcatcctctagtcactctatcaaaaggttttgtctctctgaaaggtagtaatttctttgaattttttaccttcttttggaacatgccttcgtttatacttcagttccctcaccatgaggatgtgatgatttctactagttttaggctggttttacctcagtatgaggctgttatgatcttgcttaagctcaagctgttcttacctcattatgaggatgtgttgttttcgattggacttcgaattcagcttcttttacctcagtatgaggttggtttgattctgtataagcttaggcttctcttacctcattatgaggatgttattcaaaaactttggttaagagcaattcatgttattgtttctttggtttggtttcttgaaatttcacgcaggataaaggaaaagacatatgacgtcttaacaagaaatgatcttgggtcttggactccagatttgttcatcgagaagtggtggttttcgcaaccccacacctctccgaaattgaggtttttctcacatctcgtaggctcaagaagttggtgctttgtcgcctatgctatcgtagccgtatttcatgatgcgttttatccactagaggatgttgcatctccggacagcagatcaccatgtgtgctctcttatttccgaaagctcatctcatgtttcagcactattggtatcttcaactttagttgcttaactgttatgtatgcttctatctttttctttcgtgctttccgtatgccatttgtagcagtggtttctttggcctttgtagcctctttgatgtacttgttgaaccatttctccattgttggagagtagaatcatttataaaaagctagtttgaccaaaaaaaaaaaaaaaaaactatgaaaaggaaaaacattgtgttagtgtcgttactaactgcgaaacgaacatcactttttcttgttttttttgtgttgaaggaccggagttgttagactaaaaagtgattataattttcttagttaatcgaaagaacaagtttagacctaatgataaaatggtaaggaagatgtaatagacaatcataaaccctagaaagtatggaccataatggcaacatgtggtttaactgtcagcttaacaagttgataaggtacttactgactgtatttagatcaactttaatcaattttttatttagtctttcgttttaatagttcactttttagtttaacagcttaattaaaaatccataaccaaaatgaaaagttatatggatactgtcacatgacaaaatccccaaaagacccaattctaaaatcaacaaagacataaatcaccacaaagtgattctatccagcggtgtaacatcttttggggttaatctccaattattgcatactcttttgttgaataacacaagataacttgttcgtaaagacattaagctccatttcccttagtaataactaggtagaacctttaaattgttttttatcacctcaagttctattaatgattgtattctttcttacttaattgtgttgttgtgtccgaaggaatttagatgataccatatcattgtctctcaagtgatcttatctcgaccactattttcatggtaaaagattatataccctccaataaccgatccacaaagattccaaacacaaacacaaacaatttcttatcatggttttaatttttctacatcgtataattgttatctggttcaagtccaattgtttttacttacttttttttctatctttcatgatccaactgttctcaatatatatttaccaataaaagaacaatagattataaatttttctaaaccccaaagcaaaaatgaggtatttgtacaagccagcaggataaagcatgtcttgtctccaagacacaaccatacgttatctcttaatctatcatttatatttaacgattttaaccagcttttactattgaactgcattgcatgaatgatgaaattacatcatatataggttctagcgaaatcatgtatggcacattgcaattatgatctatttaaaatttagtatgtcctttgagagaatgttaaaacaaaaatcgatatcagtggttttcatttttttctctttctattttttagttgggacagatgatgtcaactattacatattgatcactttttccacattaccaaaaactttaaagtttagatatctcatcttcaacaacaacaactaaactaaagtagacatgaagatggtctacatcacatcataatcaaattaatcacccctatatttctaaaacacgacacaaatacatgcatttagtactcctttcttcaaaaaaaaaaaaaaaaaacagttatcttcaatcagacctaatgttctctattatattcctacttttgatttgacatatatttttcagaaactacaacatcttttttttccaataagccttaattatatattagttaagtgatagtggtcgatttatcattgtttcaatgacttgaaataatgaatcaaatttcactgaacacactcttttctttgatcttgtagaaaatttatcaattcgaaaaattaaatgaaagttcaatctaaccttatatatctaagtgtacgactttgtattgcattatgaacacaaatcgtagatactagataatgattttgaagaatataaataaataaatattagtttacacaaatgaataacgttggaaacttgttgcgagactaaaatttaaaaatatatcgtttattgaggttttaattatattatgatcaagacataatcatgatgaacaagccccacattttcaatttacacataaatgttttaattagaactcttttctatttgcgtttacaaacatctaaaatcctcaaaacctgattataatgtgacttaactttcaacatgaaactcataaacagagcagaagaaaaagcagagaagcataacaaacaatcacaacaccaaacaaaagaagcaagagtctgcagagctttgtgttgcagcaacaaagcaagactcagcatttcttcttcttcctcggtggaagcagacaagagttcaagattttcagaccatcacggttcgctctctagtctagcacactacatggttcaggagaagctagagcagatgatcagagagacacaagaagccacacatcaagagaagataagacaacaaaagatgagaagaagaagaagaagaagtgagggtagtatcagtagcactaagttcattgtcatgatggcgatggagaaatgttcttttgatccaagaaaggattttagagactctatggttgagatgattgtagcaaacaagatcaaagaagcagatgaacttagaagcctcttggagtactatctatcgatgaatcctcgcgaatatcggtctgccattctcgagatcttttacgaggtttgtgctgatttgtttcgtagctaagagtgaacaaagatcagttgtttctttcaaatgtttgtgtaagatacctggtttgtaacaaaccggttttctaagtaataaatagatttaccaccattcataaaccaaaaataactgaaattaaaattacagaactagatacaaattttggtttcaatttggtatcccctttgtaaactcaaaccagaccaaaatgctgacaacctgatccaatccgagtcaaaagttcgaactgaaactaaaccggaaaaccgaatgccatacagaatgcaaaccctcctagtataccaaatttgaaccaatgctaagtgttgctgttgcaaacccataactggcctgttcaagtatgtagttatgtatatgtattgtagtacagtataccaagagtaacatccattataagtttataactctccaacaggtaaagaagctatataacagttacaacactagtaaacatagacagatgggtctatacttgtatatatgttactatggatgtgatgagagttatgatgatttaagggtttaagagagagcttccttctttgatgagcacatagacgcttccaccatcgcctctcgagatccgaaggtccttgtcgagataagttgtgagcagccacgactgcgtgttgtcactaggcagagaaaacttcaatggtggttggtttgaaatggttctagccactgaagaagcagtgtcttggactgatgtaagtaaacctttaatgggattgagatcgattttctgaccaagaacctccacggattccggtatttcaatcgaatccgttagctgaggagtccctataacaccttgctcgaacttaatctacaacaaacaaaacaaaaaaaacaattaggttatgtaacattagcatttgccatttgtggttttaggggatgattcttgatttacctggacacgtttaggacttcggatttcaaacttagcgttggtgctaaacgacgttgtggaaaacggaccagcgaaccggacagagttttgaacggtgaagctatcggaatcaatggtttgtgagatctcatccactttaaccaacggttcaattcttcgtgagagcaatgggaacaaccccacgaacgacgtgtagcttcacgagataaacacttaaaaactaagttcttgattcataacaataacggctaaaaataaacgaaggctcataactacacacagaatcataatccaaattcataattaaatcttctttgtaaccacaacttgcttttcactatcaaaatcaaatcattcataacggaactaaacagttttcaccgggaaattaaacttccaccggtaagtttaaagtatcattaacttaattggtaaagatcctagacgaagcttagagatcaccggtttgagtaatgtttgggacaaaactaatattacatgccgtgcctaggagagtatcagaactaaaagtacttacgcgaggatccatttgccgttgaggagaaacagagcttcgttaggagctggagtagggttcttagactcgagctgtgtgatgagctcgctgatctcagctctcgtatcactcgatacgcttaaacctcgatctgttccgtacaacgaatccgctagtgatctctttagcctctccgtctcctccacggattcgattgctttatctgctaccgatacggttgaagatgaggcaaatactctctccactccatcttgaccccattcgtcgtcgatgtccgtcgctcggattttgaaatctggccgatgaacagagactccaatctccgatcgccgatttattgagttaatcggtagtaggatcggagatttcgattggtgtttagtgtttgatgagcttggatttagggttttgcagggaaactgggtgaacaatggtaccgtcgccatttttgtgtttgttcttcagagaaacctcacgaattaggattttataaccgttgagctggactgtaaatgacgtatatacccttatctggtacactttcttatgaacatataagtcaagatccaagggatagaataggtatttggaatagaacaaatgaggtaagctaaggtgggattttgacacgtggatggttaaagatcattgttttaagaatcgacctggactcgtgtgaagttgccgactttatgaaaaattcataaaatttgtggaagattttattttcttcaatagggaaacaatttggtttaatttggtttttgtcccattatttgtgtgggggagaatttgtttgggttttctacgagagttaggccatgcaatgcaaatggcatgatggatctagaatcttcggacgtgtactatactttttggccggttttggtgatcttcgatcttcagttttctgaacggtgaagattctctccaatgcaaaatatctaaacggcgattaatcaacagtgtaataagtagttggactaaatgggcctggatagtatatttaatgggcctttattaacaaagaagacccattaaaaatttaaaatgaatacaatagttttgtatccaatagaccaataggtccaaaacgttcttaaagggagaaaaattagctggtaaaataatagtaccggtgtttgttcaaaaaaaataataataataatactgggcaggtgtagatattcgggtactcatatctgttcggttctttttttttttgagtatcggatctatttaggtatgaagttaaaaaccattcatgtattctaaaattttggttcggttttggtttgagtttggatcgatttagttattttagtaagaattgaaaaataatcaaaaatactcaaaatatttttgggttcaggtcgagttcgagttttttactcatctatacctaaatctaaccgagatgcctgattagtttatccaaaaatatattagttatattttaccaaaatataaccaaatgtaaccaaaatacttaaattacttagaaaactatagggtgagttaaaaatatatacatggataaacagaatattaagaatttatacataaaaatatgttatttacgtaaataggaaagagaaataaaatataaaccaaaaaatatccttccggtttagattaattacaaaaatgccattgattcaaaatactttaatatttaattgggagatttgcaaaactgcccttattctaataaccttttgtaaaaatgtcctttcctgaaggccatttttaaaactaccctttctaatatggcaaatgactgtcttacccttactgaatgattaggtttcacattcgtttcacaatacaattcgttttggcacaaacttcttcgttttggccaacgaattttcctatccgatttcactcaaaatcgccggcgaatttcctctccgatttcactcaaaattgccgacgaatttcctctccgatttcactcaaaatcgccaacgaatttcctctccgatttcactcaaaatcgccgacaaattttctctccgagaaaccccaaaatcgctgacgaatttcctctccgataaatctgttcttcgctgacggattcagatcatttctctacgacgcaaacaatccccagagatatcgatagatccgacggtaaccgtttttataatcgattttatagtcgattttatagtagatctgacgatgtttcataacatgttttgcagatggattcagagagtgaaatccttacattgcctgaacagatctacagagaaggtgaggaatctattgcactgggaaccgttcaacaatacttggattggaatttagttagtaaagtagaggaagctttaggcgagtgtttatttcagaagattagaagttcgtttcttggtcttctagttgaattgggaccaaaaatgaaggctaagaagggaatcagattttctgggaaaatctttcactatctcatgcagcagagagtgaaaacaaaaggatcaactctttggtttagagttgattctcaacctatctgtttctccttgagagagttctatctcacaacaggtaataaagttttacaatcgtttttaaagcttaattaactgtcgtagaatgatttacaaggcatttgcataactgtttgcgtagtttacaatcatttttaaaacataagtaagtgttatagataatttacaagggattttaaaagcttttaaaaggggtttacttcattaacaattatttaagaagcataagttagtggcagataatgatttacaagggattttaaaaagggtatgcatggtttacaaccgtttttaggcataagtaactaacatagaataatttacaagggattttaaaagcttaaagaagtgttaaacacgtttacatgggattttaaaagcataagtaagtgtcttaaaacgatttacaagggattttagaagtgtttgcatggtttacaatcgattttaaaacataagtaagtgggatagaataatttacaagggattttaaaatcttttctaagggttaaacatgatttacaatcgttttttaagcataagtaagttgaatagaatgatttacaagggattttaaaaccttttctaaggggttaaacatgatttacaatcgttttttaagcataagtaagttgaatagaatgatttacaagggattttaaaagcttttagaagggttaaacatgatttacaattgtttttaaagcataagtaagtgtcatagaatgatttacaagggattttaaaagtgtctgcatggtttacaatcgtttttaaagcataagtaagtgacattgaatgatttataagggattttaaaagcttttaaaagtgttaaacatgatttacaatcgtttttaaagtatttagtataaaacctgtaataatagtctctaaactgtcttttgttcttacaggaattcaatgtgaacctgttcatagggaacttcgacgaaaggggaaagatcctgtaaaagaaccatacttttgggctagtgaaggatcctatactcttggtgatctcgaagatcgattgtttttaaaacctaaggaaggtgaacctgctgttgaagatgaagaaaagttgtgtcttgctgcagtagtgttgactgaaggaattcttttgacaccatatggaaaagagaagatacgtttgccaagattgcagcatgcttctgattttgagatgtacacagcccaaccgttgggtaaagaagcattcagtgttctatcaaattcaattctgagaatggacgagaaaacttgggcaaaagagaaatatgatttgagaggatttggactcgcgctaacaagatgggtgttgagcgcagttccagcatttggtgcagcatatggagttagagataaggaattccaatctgaatatccattgatattgaagtggaaaagcactactactccagagtttttcaaggtcgtaaaccttgtaaatgatgtttctgaggtaagcttttgtctatttacaaaattcttaaaatggttttgagatttgaagttttgctttctcaagatttgtaatgttattgtatcttcgcagatggaggtgaatacaattattggaaacccagaagaattcaagtctttagttcctgattccacacagacgacacagaattccaacatattttgggacttgttaatatgggctacagattgaagaaaactgaatggaatacaagatgcgttgatgtttgtgctgcccttgaagaagtaggtcaaaacaaaatcaataacaaaatatctgatagcgagaaacttgacaggattttgacaatccttgaagatcttaacaagagagtcgagctgattgagaggattttggacattagaatggaggaaaagaataatcagagatctgaagaagatgaagaaagaaaacaagaagatgaaggactagaaagacaaccagaggtaattgtaaatgtttctttaaaagctatttgaaaggaaaggttttacaatgtattttaaaggttaaatacgtagtaaacctttacagtgtactctttttttcgcaggctgaagaagaaggaggactagaaagaaaagcaaaggtaattgaaaatctttacaagctattttaaaggtctactaattatattaatgattgacttattgtttttattttgttgcagaatgacaatgaatcatttgaagattcaatccgagagccaaacacacagtatgggagctatctgggtgatgatgaaaacacccaacgttatgttggtgatgaagtagctgaagaatcatcaaaagtacagtaatcttatatctctaaaagtcttacaaaaatgattagtatcctttttataattttacattctgttatcttttcaaggataagtctcctactccacgatcctctacaccaaatttcaatattttgtttgaagaaagtctggatgttcaaaaggataagaagagagttagcagaggaagaaatgaggttagcatttaaaaaaatttgtattatctaaccaagtgtttataatatttttttcaaatctttaaaaatttatctttcatgcaacttcagaacaagagagttaaaccaagtgttcatgctgaggataatcttaaaacaagaaaacaggttagtatttgcaacagtactgtttttaaaatttgtcaattgtcttgttatgatatttacaagggattttaaaagtatttttaattggtgttttttactattctaggtgccgagaaagaggcagaaacaagttgatagtgctgatgttgatgttcaaacaaggaaagaggttagtatctaatttattatgattttgaaaattttgtttacaaggtattttaaacatctgttttttttattctttttgataggcacagagtaagaaaaggaaaattattggcaatgatggtgataacgctgataatgatggcgacaatgatgattttcagcccgctccgcaaagaaacagtaagcggggtacggttccttccattcatacccaagcacctttcacagctgagaagaagaagcatccaattttgcatccatttgcgaaagttgatgccacaagacttgagaaattggctgaatggaagaagtcaaggaaaaacaagtgagttttgttagtaagatagtgagttttttttaataatggaagaagcatcattgttgactgttttgttgttgtaggccactatcaatcgcgggaaatattgtagatacaaagtggtttacaaccctagagacgccagggaaagcaataacagcaacggtatgtctaaaaatccttgtaaaattggtaacccatgaattacatatagtttttaaagcatcattaagttatttacaaagggattttaaaaagggttacatggtttataaacaatttttaaagattagaaagtggtaaagaatgatttacaaggtattttaaaaaggatttacatgacttgcaatcgtttttaacggattagaaagtggtaaggattgatttacaagggattttaaaagctattaaaagggtttaattgattaacaatcgttttagaagcagaactttatggcatagaatgatttacaagggattttaaaagcttttaaaagtgtttaacttgatttacaatcgttaaaaagcataagtatgtggcgtagaatgatttacaaggtattttaaaaagggtttgcattttttacaatcgtttttaaaggggttttctaatatgataatttttatttttgttgtgtttagcatgttgatgcagctttggagttgatgaaaacgaggaaggaaagcaatccagaattattcaaaaacaaatcagttgtatttgttggatcgtctttcttaaatgtgattgatgagtcagacatggagtttttggataacaaagagggatttcagtctgaagaaatcagtaaactgataatagaggaagaaaccaagtgcatattggctcctttctgtatcaaaggaaaatgctgggttgccttgctcatccacttggaacagaagacagtttgtatatgggaatgtgcagcttcttatttaacagaagaagtcaagaaaaaatatgttgatgcctactctatagttatgccatacattgttcggaacatcctcaaaaaagaaaacatggatgtctctccatttagcatcaaagtcctgaccacttttcctcaggtaacttctttaaatatatcatagtcttagaaatgaatattccgtaagtcctgacttctataacttctttgcttaagtaattcttttggtttttggttgtaggctcctagaaatgaagagtccggtatctatatgctgaagtttatggaatgctactcaatgtataccagccattcaaaccttgaagggaacataattcaaaacgttaggaataaattggctgctgacatcttcaccgaattagggtcagtcactttgtagaagtagcagacttctaatcaaaaagtagtggagtataagatagatttatcagcttttgtttcttatttcataaaactttgtcatttgaatattttatgaacatatgtatggaacatgatttatgaagtttatttagttcaactcctgttttacaaaattactgtataatggttgtttgggttaacaggtgctttgatttgaatggaaaaggactttaaacatgcttttaaacagggtttttaaacgatttacaagctgctttataaggattttaaaagtgttgaaaaagctgcagtagcggttattatgaaaaaaatttacaatcgtttttaaaatgatttacaaccgtttttaaaagagatttataaacgatttataagctgttttaaaagcgttttaaaagtgttaaaaaagctgcaatagctgttattatgaaaagatttacaactgtttttaaaatgatttacaaccgttttgaaaagagaatatcaaccgttgaaaaagttacagtaatgttaaacactgtttctgttactaattaggcctaggcctgttatttagaaaaacaaactgttttaataaaaaaacacttttttttttttgttttttttttttttgggcaaataaactgactttacttcataatttagggttccatacaacagacgagagctctcttcgccaaagcgtcagcttggtgattaaactcacgattgataaaggtaaaggtacatgcatcaaaagaagaagataaagaaaggatatcatggagaatcccgtgaagctccttgacttggagtttctgattgagagctttgacaatgatctgagagtcagaagcgaaagagatagctttgatgtccgattcacacgcaactctaacatcagcgagagttacaagggtttcggcaattagcggggagccaacgtcagatgcactagagttgcctgcgaacagctgaaagtcttgggcagatttgaagatccagccaaaaccagctctacagtcaggaagccaggcaacatcagtgtagcagatctgatcaccggtaacaaggcggtgatgcagagggttccgggggagaccggcggtgaagatcttggggggtttgggcctcttgccattcctttgccctcaggatagccatgtgaatggcttcttcttccagaacttggcgtttattgaagatcaactggcagtccagatagtccacaacaaccaagggaagagaggaccagagccgatgcctgtgggtggaaggcagattaaggtattcgctaggacaagtccctctttaaatgacctgattccatcgaaattgggtctgattgagaagggagccaaatcccagatcctgcgtgcaaaggagcagtgaaagaacagatggagagtcgattctgcttgctcacatcgtgggcactttgccgtgtcagagatatgcctaaggagaaggttggaacccacaggtaaagcttagttttcggtgaagtttgaagtccccaaatgttagatctccaattgaaatttttcactaaatcatggttaggagggttttccaaggaggcagtctccttgagggcttcaaaatacccagaattagctgcataaaggccagagcttgtaggcaaccaagcccagcgatctgctgcaccaagaaggcttggtttgaggagcaggatatccttctcataaactggcaaaagttgacggatgagttctttattccagtttgtggtccctgcgattaagaggtcagagacaactaaaagatgagacgcttcagttggaggacccataggcgcttaagatttggtaagagacagccaaggagctcgccaaataggtgtggttagaccattgccaataagacgtccaagctgtaaactgaggacatctctgcctagacagatgcttctccaaccatgggaagctgaatttgaaaccttacagtccaaaagggttgagtgtttgcagtacttccctagtaggagcttagctagcaggcatgaagggttctgtagcagtcgccaagagagctttgcaaggagagctttattgaaggtttgaacatctctaaaccccaatcctccacttttaaaagataatgtcattttctgccaagagatccaactcatttttctttgatcaggttttgaatcccaccagaagcgagtcaatgtagactggatgcgcttgcacagagatagtgggagttggaaacacgacattgtgtaagtaggcatagtcgagaggactgatttgagcatagtgagttttcctgcagaagataaaaaccttgaggaccaactgagagctctttgtttaatacgatccactatggctgtgaacaggtctttcttctttctgccaaacaactcagggagacccaggtacttgccctgtccgccttctttttggatcaacagaatctgtttgactctttccctaacagcaggtggtgttttggcagagaaggtgatggaatatttagcctggttaattttctgtcctgaggccagttcatacttgtggagaattgatttgagttttaagcagctcttggggtccacgcggcagaagaacatggtgtcatcagcaaacaagaggtggttcacacggggacatcccatagcaactcgaataccaggtaagctaccattctcttgagctttgagacacattctggagagaacttcactgcagataatgaaaatgtagggagatagtggatcaccttgccgtattcccctttctggaactaccaagcctttagcttgaccattgagtaggaatgagtaggaaatagtagaaatacactacataatccatcccacaaagtgatgatggaaccccatttcttctagggcagctttgacaaaatcccactctaacctgtcataggctttactcatgtcagttttaactgccatgtagcaattaactagagcccctgagttttttaagtagtggagagcctcatgtgtaataagtacattgtcagatattgctctctgggggacaaaagcagattgattctcagaaatacaagaatgtagaataggctgaagtctctttgctaatagcttagctatgatcttgtagtacacagagcagagagcaattggtcgataatcagatactttttgaggggcagggattttgggaatgagcctgacatgtgtgtgatttattttctgtggcaggatttcggagatgaaaaaggcctgaacctcagcagtgatttcctcgctaactgtagaccaattagattggaaaaaacttgcagagaagccatcacgtcccggggctttgtcagggtgaattgataggcacgcctgtttaatctcagcaacagttggcaaagagatgagtgtgttgttcatatcagtagtaatgcaaggagaaagcgcctcagctaccacagaagttctatctccctcttgagaggtaaaaatatcctggaagtaatctgatatggtctcaatgatttcagaatcttcatagacactagtgcctgcagagttttcaattacagagatagtattgattgctcgacgactgtttgttgcagcatgaaagaaacaagaattcttatccccgagagccagccagagatttctgcttcgttgcttccagaaagtctcttcttttctataagccaacaagagattttggttcaggagatccacagaatcctgggttgcagcatcatctgtcagagcttcttccagttggacccggagagataggatctctttttggctgttcaaatgatgttctttactccagtttaagagagcagccctacacaggtgtagtcgataatccactttagcactaggattagatttccaggtctcattcatcagctttgaaatttcaggattatctttcagggtccggtcatatctgaaaatattcttggtttttttctggacatggtcaaaggaagtaaccagcggacggtgatcagagccttcaaatctgaggtattcactgcgtcctgaagggtaggctattatccagtcactattggccattgccctgtctaatctgcaccttacaagatgggaatgtcttctgcctcgccaagataagaaattccctgtatgtttcaggtcatagagatcacaagaagacataaaggatctcaggtctgtgaaagagccttctgggcgatcaggacctccagatttttcagcactattgacaatatcattgaaatctccagtaatgaaccaagggccttctctagaggaactcaactcttgaagggcattccagatttggagtcttttggttctatccggttcaccatagagaaaagttgagtagaaagttcttccttttgccttgattttagtgtcaatataatgcagagaagagtgaataatttccacttctacacttgatttccagaagagaccaagacctcctgcagctggagattctggcggtacaagatgatgagaagggtaatcaagccattggagagattggaggaccgtttcagatgaattttttgtctccatgaggaatagtaagtcagggaaaatctttttacggatttccttgattctctggactgtcatgggattccccagcccacaacagttccagcttactacccttaaggaagagggtgagatggattctgaaaatccacctttgtcttctttgttgcaggtattagagaaagctttggagccttaccttaggaactgccagagggtaacttccactagtggaccgcgcctctctctctgcgtgcgccctctatcagcagagaagtgattggagagcactggactagaagggtgggaatttcgctgtctgttggagacttcctgagaataatgagttctttcacaatcgtggtgactcagtctgggagcagtgaagttatctttaggggtgtaatagtttctggaaccacctcgagaatcttgcgagacagctggttgaacagatacagagtcttttcctcttgactctgttaagccaggacagagtttagtttcatgagacagccggaagcaatggtggcagtgatttttgaggtttttgtagaccaagaagactgtagtttcactaccatcacgaaaatccacaatagtttcctttgtgaggggttggagtccatccacaaggactctgagtttggctgcagaagaggttatttccatgtctaagatttcacctagttcctctccaatggtctttagcatttcaggttgccaaaagtgtttgggaagtccttgaagctctatccagaaggggatcttacaagggaatgactcagagataataggttcccaacgctgcaaaataaccatccactggtcataatggtaaggtctgttatccaagactttcagtagatcctcttcatagtcgaacttgaactggaaacagccttttcccaagtctgagcctaaggctttgcctcttagattacatctgtttgataaaaagggaaacatagaccagaggcgttggacggaggggttagttagtcttcccataagagtgagggagttctctttgattagctcagatgtatccagatccggggctctgattcttttacgaggtgggggggggggagtaacctctagctacttctttgcctttaaggtgataggggattctcttctctattacttcaggtgggtgagtaatagctgtggggttaagttggaagagatttctttgagaaacaataaatgcgctgagacttgtttagggtttgaaacaggtttaccagggttacaaaggtttaacagggttacaaagttttcttcagggttttcagttggaagcaagatgggggagagcagaaggctacctgggaggggtcttcattaagggagacgtgagtgagtatgtccagcagcgagaggtgtaaagcttctgagcaggggaaaaccaccggagaaccaggaaacttgccggaacataccgaaccagtctattaaccgttggaagttactacttttagaggccaaaagtgggtgagttctggttaaaagaaaggaacattcttcttttgtcctcctcggaagtcgtgcctgggagcgaaatctctctctggtgtatactctaaatatgtatcatggacaaagaggtaataaaaaaacactaaaagcccaaaaaacactaaagcccaaaaattcactataatctaaaaacaaattaaacagggattggctgctgacatcttcaccgaattagggttagttactttgtagaagtagcagacttctaatcaaaaagtagtggagtacaagatagatttataaactttgtcatttgaatattttatgaacatctgtatggaacaagatttatgaagtttatttagttcaactcctgttttacaaaattactgtataatggttgtttgggttaacaggtgctttgatttgaatggaaaagaactttaaacatgcttttaaacaggggttttaaacgatttataagctgttttaaaagcgttttaaatgtgttgaaaaagctgcagtagctgctattatgaaaagatttacaaccgtttttaaaatgatttacaaccgtttttaaaagagaatatcaaccgttgaaaaagttacagtaatggtaaacactgtatctgttactaattgggcctagacctgttatttagaaaaacaaattgttttagtaaaaaaacagtaaaagcccaaaaacactaaagcccaaaaattcactataacctaaaaacaaattaaacagggattgactgctgacatttttaccgaattagggtcagtcactttgaaaagatttacaaccgtttttaaaatgatttacaaccgtttttaaaagagaatatcaaccgttgaaaaagttacagtaatgttaaacactgtatctgttactaattgggcctacgcctgttatttagaaaaacaaactgttttagtaaaaaaacactaaaagcccaaaaaacactaaagcccaaaaattcactataacccaaaaacaaaaacggaagggaaccgtgaaaagacaacaaaagaaaaagaagaatagaaactgtcgtcttcgtcttcttcctttcaacaatctgaagaaaatccgattatccagcaaaaaggaagcaattgaaggtaattaatttacgaaactgaagtttaacatttgggtttgttcgatttttaccgaatctcttttttgttctagcatttctaggtttttcggttgaaaacgaaacaagtaaaatagattgatatttgagattttgaaggagtgttggaaattgttatataattttgatagatttatgttttaaagtttgatatttgggttccaaaaaccttcaaagaagatttcgaatgccgattaacttctctgttgtagcaatttcaaagttttttcgttttgaaactttaacagtaaatagattgatgtttgggtttgtgttttaatttatagatcctcacttaatttatgggttaccagttgattggagttggtttggaaaagggttttttgtttctattttcagcggctgtgttctttgaaaaggattaaaattttgtttttggaattgtttcaaaacggtctttaaaaaggattatggagtaatgactgtgttttacaagggttattaaagtcttaaaacgacttgtaatgactttgaaaaatggttttacaagggtttttaaagttctttaaacgacttgtaatgactatgtttatgtttcgaaaactacaaatgcataatagatttacaaaaatggtttttaaaaccatttcaaaactatgttaatttaatgactgtgttaatgtatttaatcaggttttgagaaatatgagtacaaaaaaactgttcttccctaaaagactgttccaaccaggcagcgaagtagataatattacaagggtatcaaagcattcatccttcaaaattgtctcgactgtcaggaaagctttagagccgatagagttcaacacattaatggacacattcttgggtcctatagtggaattcgctgaaatggacttagcattttcaagccatatcgttcatcatttactccagagaagaatactaaccaacaatgacgaattgtggtttgtatttgctgatcaacctatgcgattctccctgagagagtttatcataacaacaggacttccaatggatgatgcatcaggaagcagtccaaatgtgaagagaaagaagaaagaaaagtggtggataaaagataatcagactttgaagggaaagcagaaaaaagatgtgtggattgacaaggaaatgaattttttagatcttgcatatgttttggaaaagcgttccaaaaaaatgcagccagaggagagactgagattggcggctttgttactagtggagggcatattgctagctcgaaatccgactaccaggctgccaattgagaatctgaagagagctactgatttcgaaaagttctgtaagtatctatgggcgcagattgtgtactcatatttggtaactgaagtgaagagaatcgataatgactatttgttaaggaaacaatatggtctatttggatttgttcaatcaatttagatatgggcattatcatcggttcagaagttgggagaaaagtttggcactagagatgaatcatctagtggaaatattccattaattctccaatggagatcaacatcgtctccaagtgcaaaagctataacaatgatagcagatggtgacaaggtacattttcttagctatggctttttttatgttttaaacactgtttataaataaagagtatgttttacaatagtttttacaatcaagttttaaggatttataaagggttaaaggcaatttaaactatttacaacggattttaaaaggttaattaagaattgtgcattatttttacacagtttggaattttatttatctttgcaggttgaagtgacaccaatagttggtgttcatactcatgaatacgaccacttggtttcacagaagaatcctgaagacaaggatctgttggatgtttttgatcttgtgatcaaaggatatagaatgagcaagaaggattggtgtcagggatggattcaagtggaacaaggacatcaaggaagaattgatcatgtcttgaaacctgcaattgaaacagttgtgcatcaaagcagaaaaaaggaaatcaatgtcctttggtgagaaggtaaaactggtatatgaaaattgtgaagttcttaagaagaaagttggaaggctatttaggcatcgaaagagttcctgccagttatactagagaagaacaaaaagaagaggacgaaaaaaaggagcaggaagaagaaaagcaagaggaagaaggaaaaaaagaggaattagaaaaggtatgtgtttttacaagggattttaaaagcttataaatcgtgttttaaagttttttagcccatttttaaaagataggcagtgttagatatgtatttacaagggattttaaagacttcttaatggagttttaaaagatttaaattcgtttttaaaggataggcagtgttcgataagattttacaacggattttaaaagctttttaaaagtgatttacatgagtaacttgtagttataaaacttgtaattttatatacaggttgaatacagaggcgatgaagggacagaaaaacaagaaatccccaaacaaggcgatgaagaaatggaaggggaagaagaaaagcaagaggaagaaggaaaagaagaggaagaagaaaaggtatgtgtttttacaagggatttaaaaagcttataaatcgtattttaaagatttttagccgtttttaaaagataggcagtgttagatatgtatttacaagggattttaaagacttcttaatggggttttaaagatttaaattcgttttaaaggataggcagtgttcgataagtatttacaacggattttaaaagctttttaaaagtgatttacatgactaataactgtgtctggcttgtatttgggaacttgtaattatttatacaggttgaatacagagatcatcattctacttgcaatgttgaagaaacagaaaaacaagagaatcccaaacaaggcgatgaagaaatggaaagagaagaaggaaaagaagaaaaagtagaagaacatgatgaacataatgatgctgcagatcaagaagcgtaataaatttgtcagatgatgaagataatgatattgcacccacagagaaagaatctcaacaaaaaaaaaaaagaaacaaaggtctcctttccttaactttttaaaaagacatgataaaattgtcaaaaaataaatttttgttttgatgttttggtttacaggttccaaaagaagaaaacgtagaagaacatgatgaacatgatgagactgaagatcaagaagctaatgggactgcacccacagagaaagaatcacaacctcaaaaagaagaaacaatagaggtctgcattccttaattgtttaaaaagacatgataaaattgtcaaaaaataaaaatttgttttgatgtttttgtttacaggttccaagagagaccaagaaagatgatgaagatgttagtcaaacaccactctctacgcaagaagaagaaatcatccagggacagagcactcgtaagttgtttttacattcacagatgatttgccttgataaacaacttctaaacattttttttttattttgtatcagttcaaactcttttgacgccggtcatgttgagtcaggaagtaatggaagaaattaacctaaaagttaaaaaatgggcgaaaaacaaattaatgagagatctactatcgtcacttgaagaagtaagttaaattacgtcattgttttgctgcaaaagattttaattctaatcttttggaatttttacatttcagattctttggcccgacagtaaatgacaaaaagtcgaaatttggaaaatgtgggacgagaagaaatacaaattagcattaaagaaagcaacgttactcattcatcctgacaaactgcctcgagctcatccagaagtgaaatacctagctgaacaaatctgcaagataataatggttagtgttaaactcttcttttgtataacgatatatctttaaaaacttgaatattattgttatgcaaaaaataacttacagtttgaattttatttgcaggtagagaaggatagagctactaaggcaaaaatggatttaattctttagactgacttatttcaaacatgtttattttacttttgttattttgaatctatgattgtacttgtattttggttatatatatttaattatgactgtcaaatctaatcaaaatgctttactattgtcaactgtttatggttttataagaattgtcatgatttacaagtgattttaaaggcataaacagcttatatgcataacgaaagatttataagacattttaaaggatttgtaaagccttgcaaagccttgcaaacgaattaacaagggtttacatagtttgctatcggtttttaaggataataaagtggtaaaacatgatttacaagggattttaaaagcttttaaaaggggtttacttgattaacaatcgtttaagaagaataagttaatgtcagaaaatgatttataagggattttaaaagcttgtaaaagtgtttaacttgattcacaattgttaaaagtatatgtaagtggcataacgaaatatttacaaggtattttaaaaggattttcaaagacgttttaaacaggcttttacaaaatattttaaaaaggtaaattattagaattactattaaaattacttgtaaagtttgatagtaattttagtaaacgacttacaagaaatttaaaagattcaagttaaaagctt

SEQ ID NO: 526 - DNA, 80446 bp, Arabidopsis thaliana
aagcttgtttagcaagtaaagcatcattaaatttagcaaggtctttgaacccgagtcctccttcatttttttagtacttaagtcgtttccacgcaatccatgggatgcctctattttgattgcctttctcccaccaaaatctcatgagtagtgattcaatttcagaaactatgccaattgggagcttacaacaagacattgaataaacaggcatagatagagctactgatttaacaaaacctcttttcctgcagttgataaatattttgcattccaagtttgtgttctctgttttactctatctataatgtaggtgaacatttctttttttttcccaaattgtttttgataaccccaagtactttccaccacctccatggttcggtatttcaagtatttgttttagtcggttttggagattcccattgattctggacccaaatgtaatgagagatttgcttgtattgattttatgtcccgaataatattcatagacctcgaatgcttcttttattgcactacaattgcgattattagcttgacaaaagaaaagggaatcatccgcaaattgtaggtgagtaatcgctgggactccattgcctattctgaccccccaaattttctagtagaagcttttgttcttatcaaatgattcatgatatccgcacagagtataaaaagatatggtgaaagtgggtctccttgtttaattatactttcgtgtaaaccatttacaagtatttagtatcgtattgatcgtacagatcccataatctactctatccatttttccaaaaaaccaaatagtttctttgttacttccaaaaaattccattctactctattgtatgccttagtaacatatgttttgattgccatatagttctgggatactcttttctgtatttttaaagagtgcattacttcatgtgcaatcattatattacaagtgattagtctcccaagtatgaaggcagcttaggaatccgaaataatcgaatccaaatgaggtttgagtctattaactaagcatttggaaataattttatagagaacactacataaggcaatgggtctataatctgagagagtcattgcgttattggtttttggtatcatacaaatatttgtgtggttaatatttggtttcatgtaggaggtagaaaagaacgcacgtatagaatggggtacccccagtggactgttatcatccagtcgttgaaagcccaaggtccacgttggagaacaagtttcagtgattcctccgtgttgaaaatgaaaagaactttgttgttgcccattatcctgccacgacattcattacaaatccccaaatcctaggcatctatcccgcaaccgccaggaggttctgctttctagggttaaccaccgtgacaatcaaggagaaacagttgatggtggccgctcttccacacaattccggcggtaatgcaactggcgtatcattaatccctaaattgatatcttgtagtgacttacgaacgttatcactcattgttgtgatatcagagatcaatgggtttttggaatagaagtagggatagattgaagaacaggaaatggataaaattccgacagatatataagagtcaatccatggcggtttctctatacggttatccctcgaaaaacatggaaaaggtaaaatgccaccgagtaaatgtgacagagagaaaccgtgggaatcaactgtcctaataacggggttttccgtcggaaacacactccgatttggagaaaaaaggaagaaatagagaaagattcgaagatcgctccaaaagtctctctcagagagaaaagtcgcaatctgcttttgacataataattgataaaaaaatttaaaaatttcaaattcataaataggcacaacacaatattattgaattaagtgtttaacaaaaaaaatactaaatctaacaagtgtatttcatattttaaaattatattaaaattatttgacatatatattgaattaagagagtcaatcctcaacaaagccatcgtcttctctctcagttacaactatcgaggcagctccccttcaacctttttccgacgccagtgtagcttgttctcaccggcgtcgggatcctattctcttcttctttcttcgacaaatcttctcatctttagttttctgttttaattttccccttttgaagtttttcccctcttttgttccttaatctaacccatctcgaacacttttactcaatctgtttcttcccaccttggatctgggccgctctctcccattaatcgaagaaggaaagaggagggatttgacaaagcccttctattacctctgcatctcagcttctttgacagatctatatgcccagaaacctccgattttaatcgaagattatttcctaaatccatcagtttggacttcaattatttggaaattcattacaaccttgaagaatcctcacaccagcttgaaccgtcagttgcaccttgcttgaaggaggcgtcgacggcgcacggtgaccattcatttgggtatatgaagtttcgcaccggaaaggcttgtcatctatggagctttgccttatatttggactacggtcatcgtttgtttccgctgtttctactctcatcggagatgatctattcaccgcatatctcttcgccagcatcggacaaccgccgcacccctctcccgtcttggctctccaaaatgaaactagggttttccccattggacctagtttcaattttgggccttatctctcaaagaaagcccaagcccattaccttgtccaaaacttctaaggctaatatctccaggtcagtttttaaaaccattatgttaagcccaattcaatgcttgagtcgtcttcctttactccatggtcgtggactccatgagagagaggtaacatctctggtgaattggcattgcatatattctctacgaatcctggtattagctagtcttagggtcttgtggtttgcttccaaaatcttgaagaactttgatctacttatctcaaaccggctttgtcggagtatgaactgtggtattgggctacgtttggtcaatgtcgacacttcatcatgcagctcttctggcgttctcaagtatcttaacctcaccaccatctccctcattcagatcctagggttcaaagatcatgatgggatttaccgaagagatcaaaaccttttgctttgggtttcaaagctatccttattcgactatagaaccatagtctcccaaatcattgttattgcactgtcttgggtaactcatctcactccactgagaagcatagcattgattccttcttcaacttcaaaaatgtctatcgactatgactactttaacgtcctccgattctgtcgaggatgagctctcgattcaccgtgatctcacttgtctcaatgtgcctccaagcccttgtcgcatagctctcatggtttcaaaatcgatgaacctctcttttctttttatggcattggggaatgcttgttgttctattgttctaaactttggtttgtttaaacctttctatgtgtatttgttcttctttgaatgaatgaaaacatggtgtttgaccaaaaaaaaaaatattgaattaagtgttaaaaaaaaattattatatcaaaatgagaaatgagaacttagagatattaaacgtcgtatgaaggttacaaaccctggtgtatcagaatattaaatctgtgtttaaccactagactaaggtaacatatttacaaaatatagaaaatagattgtatatatatttgtaattaccatgagttaaattttaactatagttagaacgtccgttaaaaggttaacatccgttaagtcggatgtctgattttgccaaattaaaaaaatgaaggtttttaaagagaaaaacaattaacctaaatattgtttgggcaaattatataatgcaggtattaaacaggcaaataaaaaataaatgaaaatttttttgggttttttctccaagaaaaaatggagaggatgatttattttctttagttttgctcgtaatataacatataatatatatttaacattaaaaaatcagattttggaaaaaaaaattacttgttgcgtttttcgacaaattcgctctgtgttctcatttctcatttctcatttttatgtaataatattaatatatgaaatacactttttagatttagtttttttgttaaacacttaatttattactagttttttattgtgttgtgtttttttatgaatttgaaaatgttaatttttttaccaataattatgtctagagaaattgttattttatatcaatttagatatttaagaattataaacatatgaaaattttctttattaccctaagaaacattattcataattcaaacattttattgtatagtacaaatagtattttcaccaatcaaactttattttataccgattattgtgtactaaccgcacttgtctcgcaaatacgtttttcccgcatgtatcgcagttgaaccataccgcattacaaaaccgcttttctcacacaacaaaatatgatgttactattcggacccaaaaagttcatcactattgaatattatatattataatattttagaagtaataaaaataaagaataaaagtgacaagagagtaatgaaatggacttcttattataaacaactcatgtacattggttcacaaatttaacaccctactttttcatttttatccctccacatcatattctctcacttccacataataattcaatactcattttaatttaaacttttacattaaatttgtttaataagtttacatcttacccaccatttttttacttcttattttttttcttttataattttgtaactatatattaataacattcatgatgaatgattcatccattgagtttaaattaaaatgattaaaaactacataatttgaaggccataactacaatattgttgggatctattaagatttttttaaaagatataaacaaaatgttattagaaaatgacttttaatacttttaagaaaatgaacttttaatatcttcaaattaaataaatcaaatctctatttatagaaaactaaaaattatgaattttgacataaaaatataaacaaaaaaattgtttggtataaaataattgatttttaaataaataggagagagataaaaaaatctaaaaatgcatataattttttactagctcacaaacatctcatgatctccactttaggtttttttcatgttgaacaaattcaactaaattttaatccacctcatctttttgtttttttcaacaagtccattgtaggtattcaactgttgaaaaaaagattcaatatctccattggaaatgtaatgagagaagaaaaaagacatatgtaactatgtgcaatggagatgttgaataatttatttaactgttgaactcttacaatgagggtgttgaaaaagcaaaaaatcatacgtggattcaacgcagtagaaaacaaaaagatggggaccagatgcgacaagctctaagatattcttgctcgtacaattgtatgattccattacagaatctacgcaagcactctaatgttgtagaacctcctattttgatgtattcatccaccgtgtctgacgccataccatatgctaacatccgcatggccgtgatacattttgctagtggagatataccttctttatttgtttcgtcaacacgttgggtgaagtagtcgtcatttcttgataaggctccaacgattcgaagaaaaacatgttttcgcatccggaatcaccgtcgaaacattgcatcatcatacgtaggttgaatagcaaagtagttgtcaatcaacctttagtttggtgctacatgatccctcttgatatatgttcttttattgcgacgtggataatcttcttcaatttttttgtgacgctctctaaaccggttgatgatatacctctctttgatatgaaattgtcttttgtaagcttcgatatcgaagggaaattctgatggatccattggatttttattttagtaagatgatatttgtgatagtaattcatcaatgtaagaatgagttcctatttataaaaaatcgaatggctgaaagaaaagaataagaggcggatttgattagaagatcatgtggttgaaatccaatagatagggataagataaggattatgcgaaaaactaaaagataaggattagattctcgtatgaaaagccaaaagtgatcgatatgttacattgttggaaaataatggaatacagacaaacaaatattattgcacgaaatgacaaacaaccataattgcacatagtgataaaatactgaaacatacatgacaaacataaacattaaattagaaagtgacaaagtgtagacatacactaaacaaccactaattttcaaatagttcatggctcaacttctcaaacagctctttgctccgatcatctagatgctcattttcagctagcttcaaaaacatcttcatcttcatcaattggttggcctccttatgttttttggctatttttccaattgttccaactcctgctccttaaattgcttgaattcattccacttttcattaacgacttccaagcttgaacccttccctttttctttagctgcatcccttcctatgggatgaacactaaatcctacagagtttgagtcacttgcatcattatagtgtactctcttagatccattgcttccagacccaatatttccccttacctgactaccataacgtggttgatcacggacaacaagccattctgacataaaattgaaatgcccatttttaccacttgaatatattttatgtgcttttgccgataaatcattctccgccacccgttttgttgcatacgcttaacattgtcgtaagtgccaatctatttgcctaatattttgttcacatagttgaaatgatttctacacgaaactccatcacgtggaggatcaaatgagcaatgctcattacaatactcaacaattttatcccagtatgattcactcttttgtttctgccaacaatgatgtctattccatatttaatccatccacctaataacaccaaattttgctcagttatctatttggggtttttccgagcgtagaagttaaatcatcattatttggagtgtcttcattagtatcgctcatccttccaaaagtcatttgtgtagaaaatccaagaaattcaggaggtggttgagatgaatatggcatcatcgatccatatgatagtttggagcaaatgattgcatagaaaaatttggtagaaaactataatttgagatattttaagattggttgaaagatgaattttaaatttggtaattattaggatttggataaggaaaatgataattggtagaattttggatagaattattggttgtatttggatagaaaaatggaaaatttgtacaattttgtgaaatattattattggaatctatttcacaaaaatcaaatttagaagaaaaacaagagtttattagaggataataaaaaattaggatagatttggtgtttttttgtatgtgtgcgaatgaaattaaccaagttttttttatagagcttaaaaagttatgaattttcatataaatgtttttaagaaatatatatatatttgctacataataattgattgtaaatagatagggtgagataaaaatctctaaaatctcaattactaataataatataaaaagtgtcagcttcacaatattctctttgtttttatcagaaaataataatataaaacgctttacttgccttttgggtgtgtttttacacaccttctaataaaatggtgacatgtgcatgcgcggacctaaaaaaaaattatccaacatgttgaatagattcaacaatcaaaaatccacgtttatttttttagttttcaacacccccattaaacagttgaataatttatttaacacctccattgcaagtagtctaaatgactatgtacaatgcaaaaacatattcaacaccctcgaccttaacttttaacactccacatcattttctctttcttccatatcataatgtgtagaagatgatatgtacaatgtaaaatcatattcaacaccctccacctcagctttcaacactttacatcattttctctttcttccacatcacaattcaacatccacttaattttctatcactccaatatttttgtttaataaaattcaacactctaccccactacttttattttggttttcttattttcttatacattatatttttgtgatgtataataataattgttgaacaaaaattaaagttaaaatatcgattagaactaaattaaataaattaaaagtgacatgatatttttaataactgttttttatttttttatttttaactaaatttatcagattataaaaataaaaacattttattaaaacttcaaatacattacgatacaagcacacaacacaattaatattaaacacacatgcgattcaactcacaaacaataaaaatcatcaatcacaccacacacatatataaaatctccttaatctcggacattccaaattttgcgtaggattattgttggaatttggtagggaaaaggaaagttaatagaattttgcctaggattattattagaatttatttcaaacaaaattaaggatataaccaagagtttatgagggaagaataagaaaattatagtagaaatgacagttttttatttgtttgaatgaaatgaacaatttgtctatttatatagtttaaaaagttataaattttcatataaatatatatttttaaaaactttgttttgtatgtaataagtgattataaatagataagatgaagtcaaaatctcaatatctaatgaaaatatagcaagtgtcagcatctcaataatctcttcatttaaaaaaaaaaaaaaagtttgggacagtacactcttctttccacaccaccaccaccaagtctcaaaacgtatcaggagaccaaaccgacgacttaaaatcatatgctactccttgccgaagtcgaactccaggatgagtggaaagaatcggcctcactactacttaagtctctgcttctgcctcggtgtcgagctccatctctgcgacgaccattaccaccaccaccaccaccagcgccgccaccaccaccaccaacgtcaccaccaccacctccagcgccaccaccaccacctcagtgttgaactagaagtccaattgtagcagcttcggagcaacgtcggcagtaagaggtgaacaaaatattctttaccaatatcacagcccaacataggaagatcccaagtattttaaaatagtaggcttcacaatagtgggtgaaaatagataaggttacataagctatcccatttacgaaccctaaatcattcccctcatggcaaagtttcataagactaacaccgttgagataaccacacacacaaagcatgaagcaacattcattttagctaccgatttatctgcaacatggttactaatataaacaattgaccttaaaattgatatttctccggtactcttacctagacaataaaagttaaccccaatctatcctataaaaaatgttacttactgaaacgtgatatggacaggccgaattttatttttttcaatctgttgaatacttttagggagatttgcaaaactacccttttttactacccttttgcaacaatatccttttgtgttgtttatttttaaaaataccccttcccttgaacagaatgaccaaattaccctcatctaatgggaacatggaattggaaattgaaattttctaccaaatttttggcgccaaaaaaaaatttcctccaaacttttatcccgaaaaaaaaaaagtttcccgccaaaataaaaaaatttccgccaattttttttgtgtaacaaattttttcttaggcaagaaaatacttttaaaaatccttgtaaatgtttttttggcgagaaatagatttacaagagattttaaaagggttttaaaagatttacaagggattttaaaatatttacagggattgaaaaccctttaaaaatctttagaattcctttgtaaatctcttaaagtcctttaaaatcccttgtaaatattttaaaaccctttcaaaatctattgtaaattttttaaaaccttttaaaatcacttataaatattttaaaacccttttaaaacaattttaaaccctttaaaaacctataaaaaacctttgtaaatcttttacagccctttaaaatcccttataagtattttaaaacccttttaaaatccattgtaaatattttaaaacccttttaaaatcacttgtaaatcttttaaaacccttttaaaatctctgtaaaactatttcccgccaaaaaaaaaaatttgcgggaaaaatatatttggaaaaaaactttggcggaaaattttgtttttcgaaaaacttttggcgggaatattttttcgaagtttttttggcgggaaaattttggcggaaaaattattttgaaaaattttaggcgaaaaatattaatatttcattttgtttacctaaaacaatttccaaataggggtaaaatagtcattaaaaatttaaagagggtagaaatgaaaatagctataaaaaaaggtaaagttgaaaaggggcatcatgaaaagggcattagaaataatttttcataccttttatcaagctgaatccacttaaggtttttaaatattcaatatgtgcaatgtggagattcaacaattgaataaataattcaacacatgcattgtggataatcttattgacttatgtttcttacaatgaagtgaagagaaccaacatatatatactagagtttcttggggagaaagctagatttagttaactgcggaacaaggtacttagggagtaagtgataagaagatgatagggaatttctattaactagccatgaatttaaaaaaagataagaaacaaaccatgagctaaagtaccttgtcggaaacatgttgtagaacacacgtaattacgtaaatatcctttgtagcatgtttttttccgaaatatatgcgataacataatatcctcttttatcttgttaattttctcatattacatagtacttaaaaaaagcatatgtttttttggaaaaatattatattcagtttaatatctttctttatcaagatattttgtagtaatacatatttttttattaagatcacatgtgatttctttaaaattatattcttattttttagtcatacacggttttttattaaaatcacacacacatatatatatatatatatattagagggttatgatttgttctgccgcttttgatatagccttctttgatttgagcaacacacgcatcattatcttcatataatcttgttgctcctttttgatgatgaatctacttgctttttgaatatggttagtcatggatctaagccaaacagattctctacacgcttcatgaagagcaataatttatgggtggtttgatgaagtggcgactaaaatctgcttttgagaacgccacaagttgcagttcctccaatggtaaaaacatatctggtatgtgatctagacttatgagggttcgataaatacactgcatctgcaaaaccaactttccaaaactcaaagtttctaagataatataatcctaaatcaatagtactttgaagataattgaagatgtgttttattgtaagaatatggagctttaggttgcaagaatgggactcttgattaagagggttgagagtgagaaatgaacataaggaagagatagtattgcggaaatagaagagagattgtgagaaaagagattttctctatttctttattaaaaacatacataagatacaagctatatatggacattaggtaagtaaagatctcctaagaatatgctaaacacgtcgcactctatacaagtccacatcgtgtagacaagtcactatcgtactaagaaagagacatgacctaacgttcagtttgctttaaacacatgcgatcttcttttgacttgggcgcttaagcttcaacggctacatgaggagtcttctaggtcttctagaagagcttaaggtgaagaagagtttatatgggcttctctcattgtgatgttgtacggatgggcttctcttcctccgtatggtcgtctagtttaacttgcggaaggggtttccttcattaggttcaatactccccctcaagcttaaccggagatgagtcgagattaagcttggaaccaaattcaaccacctcattaaaaaccttggtgtagaaaaacctctttggataaaactacacacaagggaaaaagagtatgggatatttgataagaggatcatggcctggttagatcaactacgccaagtttgttgtgaatatattcacacaccttggtgctcgctcctttggtgaagacgtcgactaattgttcctcactctcagtgtaatgtggtaggatcactccgagttgtacttgttctcgtactttgtggcagtctacttcaatatgctttgttctctcgtgaaacaccgagttagaggcaatgtgaattgcagcttgattgtcgcaatgcattggaatggggtttggtgtatcaatgccaaagtctttaaggagagctttcaaccacatgagttcagtagtgagctttctcatggctctatattcggcttcagcacttgagagagacactactttttgtttcttgcttctccatgttactaggtttcctccaatgaaggtgcaatagcccgttgtagaacgcctatcttgttgatctccggcataatccgcatcacaatatccaacaatctccgtgtttctattcatcccatccaaatgccttgacccggagctcctttgagatatttgagaatgtgattcaccatgttccaatgatgtattgtgggagcttgcatgtgttaacttactacattaacagcaaacaaatgtcaggtcaggttatggttaagtagataagtttaccaacaagtcttctatatctcgtagcatcttcaaatggtttgttatcatgctccccctttcgtttggccttgtaatcgtcctctagtggagtcttggccggttttaccccgagtttacctacttgggcaagaagatcaagtgtatatttcctttgggataagaagagaccttcctttgatctacaaacttctatcccaaggaaatattttaactcaccaaggtctttaatatcaaaaacacttttaagaaaagtttttgtatcttgaatacctaccttgtcattcccggagatgataatatcatctacatatacgagaatgactactatacctttttggcttggtaaagtgaagagagtgttatcggcttcagacgttttgaaccctcttcccatcaatgtggtgctgagtttgtggtaccacgctctcggagattgctttaaaccgtagatggctttcttaagcttaaagactttattgggagcattaatgacttctagacccggtggtggcttcatgtacacttcttcttcgagttctccttgaagaaacgcattcttaacatccatttgccaaagatcccactcgagattggtcgccaaggagagtactactcggaatgtatgtaactttgcgaccggagcaaacgtatctagatagtcctccccatacgtttgagtaaatcctcttgccacaagtcttgccttgtatctttcaatctccccatcactcttatatttaatggtgaagacccacttcgaggtgacagttttcttacctctaggaagctcatctcggctgcaatagcgtccctccatacttgatgagttatagcttcttcataagtgtgagggatccaatgttggtctacttttccaagaaagacttgatgttcttcgggtagatgagctagggtgcacacagcttgaattgggtgttccacggcattgtcaacgtagaattgggtctacttttccaagaaagacttgatgttcttcttcttcttcttcttcttcttcttcttcttcttcttcttcaagctctttgagcagattcttcttctttgtgttagtggattaccggatcgaatctggtcccagacgtaggcttaatcatatcgattagctgaactgggtaacaaatttacgtttttcgtttattgcttttgattttgttcttgagttgagattcaacgagtttaaagagagaattgaatcagagtgattgtgagcacgaaccgtaacaaagtggtatcggaacgttggttcgaaagattcgctcgatggtaatgacgatgaaggtcgagattaaaaccttcaatggcgatcgagacttctcgttttggaagataagaatagaagctcagctcggcgtactaggcttgaagaacagccttacggattttaaattgaccaagacagttcctgtggcaaagaaagaggaaaaagaatcagaatatgaagatgatgcatctgatataaagcaagctactgaagaaccagatccgattaagtttgagcagtctgaacaagcaaagaacttcatcattaatcacatcactgatacagttcttttaaaggttcaacactgtaagaccgctgcagagatctgggcaacattgaacaaattgttcatggaaacttctttgcttaatcgaatatacacacaattgaagttgtattcattcaagatggttgatactttgagcattgatcagaatgttgatgagtttttgaggattctggctgagttaggaagtttatcaatctatgttggaaaagaggttcaagctgtcttgatcaaaatttactgccatctagttacatccaacttaaacatactcttaagtatgggaacaagactctctcagtacagatgtggtatcatccgccaagtcacttgagagaaagttatcagagactcaagaaagcaacaaaaatgtgtccatggctctctacacaacagatagaggcagacctcaagtgaggaatcaggataagcaaggtcaaggaaagaatagaggtaggtctaactctaaaacgcgagtgacttgttggttttgtaaaaaggaagctcatgttaagagagattgttttgcgagaaagaagaagctggaaaatgagaatagagcaacaatgatacttttgggtgatgatcacacagtagaatcaagaggatgtggtaccatcaaattgaacactcatggaggtttaatcagaatgctgaaaaatgtcagatatgttcctaacctaagaagaaacttgatctctactgggacacttcactctcttggttacaaacatgaaggtggagaaggaaaactgagattctacaagaatggcaaaactgctttatgtggatacttgatgaacggtctctatattctggatggacacacagtagctactgaaacctgcaatgcagaaagtgctaagaacagcacaaagctgtggcatagcagacttggtcacatgagcataaataatatgaagatcctataaggcaaacagactgattgagaaaaaggaattcaaggacttggacttctgtgaacactatgttatgggaaaatcgaagaaactcagttttaatgttggtaaacatgttacagaagacatacttggatatgttcatgctgacttgtggggatcaccaaatgttactccatctatctcgggtaaacaatacttcttatccattatagatgacaaatctagaaaagtttggttaatgtttctgaaatcgaaagatgagacatttgataagttctgtgaatggaaggaaatagtagagaatcatgtgggaaagaaggtcaaaactctaagaactgacaatggattggagttttgtaataacagatttaatgactattgtgccaagactggcattgaaagacaccggacgtgtacctatactcctcagcagaatggagtgactaaaaggatgaatagaacaataatggaaaaggtgaggtgcatgcttgatgaatcaggtcttgaagaaacgttttgagctgagactgcagcaacagatgcatacttgattaacaggtcacctgcttcagcagttgatcacaatgtgccagagcagttgtggctcaacagagaacctggatataagcacctgagaagattcagttctatagcctatgttcatcaagaacaaggcaagttaaaaccgagagtattgaaaggagtgtttctcggatatcctcaaggcactaaaggttacaaggtgtggttaattgatgaagaaaaatgtgttatcagcagaaatgtggtgtttaatgaagattcagtgttcaaggacttacagtcaggaagcaaagatgaagatgaaacagtaacacaggaatctcagattgagattgaaacgccgccaaaatcagaacttgaaacacagaatcaggttcaaggtggagctactcaagtccagctcaatgattctgaagatgaatataatgatgttgaaggagtagttacatgaagcaatctgaagacttatcagttggctagagatagggtcagaagaacaattagaccacctgcaaaacttactgactatactcagtttgcttttgctctagtcatggcagaagaagttgaatcagaggaaccagtatgttttcatgatgttaaggaagacaaagactgggaaaaatggcatggaggcatgatagaagaaatggattctctgttgaaaaatgcaacctgggatatagtcgacaaacctaagaatcaaaaagtgataagctgtcattggttgtacaagaagaagcttggaattcctggtgttgagctaccaagatataaggcaaggttggtagcaagaggattctctcatagagaaggaattgactaccaagaagtgttctcacctgttgtgaaacacacatcaatcagaatcttactatccctaatggttaaagaggacatggaattagaacagatggatgtaaaaacagcatttttgcatggagaacttgatcaaacattgttcatggaacaacctgaaggctttgaggtaaatcctgaactagatcaagtatgtttgctaaagaaatctctttatggcctgaaacaggcacctagacagtggaataagcggttcaatgcattcatgatggatcagaagttcagtagaagtgtgagtgattcatgcgtctatgttaaagaggtaagcaatggtgaatgtgtctacttgctgctctatgttgatgatatgttgttagcagctaagagtatgacagagattaaaaagcttaagaaagttttgagtagagaatttgaaatgaaggatatgggagctgcaagtaggaaattgggaatagatatcataaggaataggagtgaaggaactctatgcttgtcccagactagttacttggaaagagtaattcagaagttcagaatggatggggctaaggttgtgaatactccaattggtgctcatttcaaattgtcatcagttcataacgatgatgaaagagtaggttctgagaaagttccctactctagtgttgtcggcagtctcatgtatgctatgattggaactagaccggatatagcttatgctattggactagttagcaggtttatgagcaagcaaggagaagtacattggacagcagtcaagtggttgttgaggtatcttaaatggtcaataggattaaacttgatgtatactaaaggatttgattttaaagtgcagggttattgcgattcagatcatgctgcagaccttgataagaacatgtctattagcggatatgttttcacagtgggaggcaacattgtgagctggaagtcatgtctgcaaccagttgttgcgctgtcaaccactgaagcagaatacatagctcttactaaggctgtaaaggaggctatgtggataagaaacttgttggatgatatgatgcttggaactgagactgctgaagtgtgaagtgactcacagtctgcattatgtttatcaaagaacaatgcttttcatgaaagaacaaagcacattggtaagaagtatcatttcatcagagacattattgaagctggtgaagtcgaagttcataagattcacacgactaggaatccagctgatatgctcacaaaaggtataccagtttcgaagtttgaagcagcattggagttcctgaagctgctcaggtaaacaggcgagaattcgccaaaaccagaggttacatccaagtaatgcaattcacttgaaggagaaagaaacttgaatcaaggtggagtgttgtgatgttggtttctgattcagttttaaggtttggtttaacctagaaattgattggagattgaagtcggtttagttcggtttgtctcggttatcaattgaagaagaaaagtaggaagtcaaagcctctagtcgcgatagagtttttgttgtttcaagtataaaacataaattgttattttcttctttattcattctgttatctctgctattgagagagagaagtaagagagagagagagagagagagagagagagagagcttgagagactccattgttgtaaagctctttgagcagattcttcttctttgtgttagtggattgccggatcgaatctggccccagacgtaggcttaatcatatcgattagctgaactgggtaacaaatttgtgttcttcgtttattgcttttaattttgttcttgagttgagattcaacgagtttaaagagagaattgaatcagagtgactgtgagcatgaatcgtaacacttaaacatatcttcagtgacaccattgatcttggtgaggccacagagcttatcaaagctgtcaagatggtccacgggatcttccatagtcaaaccatgaaatttgtttccttggatcatgaagatgagaccactcttgatttcaaagttgttgttcttaactggtggtggcactatcccttgtctttggtgatgatttcttggggcatcaccagcaccaatgtttcttggttgatcaactataggtgggtcttgaacatcaactggtctgtcctgttgatccatagaagcttggctttgttgatcacagtctgcctttgctttggtttcttgtaactcacgagctattctgtcaattatgtctttgaaaggtagtaggtgtgcagaacctttggaccgagtttgcatgcacaaagattagtacctataccacaaaaacaagcagacaaaaagatgagttagtaacttagagtattgttaaagaacttgatcttaactttttctgatatcttgaatgtaacaatgcaacaatgaattggcaacgacgccaaattgataagtaggttttttaggcctacttatgtgttgaagtttggtgtgttcagttcaattctccttaaacactaacatgtcgatgcagctatagggggtatcaatccggtccactgttattgctagaaatcaagatgtgcaaagaagcaactaagtcaagccagattataatgatggtttgtttctagtaacaatcctatgtcaggattcaaacaacaaatatgagaacttaagagccctactcgatcattgggtcgagtagaaccaacaggtgataaatttaagaattaaaaatgcaatcaacaggtgaatgaaataacaagtaaataaaagtacaatcagggggtgaatacaaataattatttgtattcaccccgtgattgcacttttatttaagaataatagaagtcataaggatggattcattaataagggcaactttagggttcattaggtggctaacaagcgaaaggcagataccatagacgatagattcaaacaccgggtcaatccactctcgtgatagagacccccataactctaccacttcctaatctcaactctcgttgatgaaacatagaagagcagggtttaagcaacaatctaccaaagtcaataagcagtctaaacatccaatctcttgggctataatctacaaatctctggaattcgtagatcagacatccatatgaatgtcttttggacgctggatacctatggtcgaattcccacattagccagcaaaaaccgcataggggccaacaaatccagaagggatctaacctaatcttaaccacctgactaacctagagattaccataatctaatccatcctcaagaaccctaatcactactcaagcaacatactcaagagcacaaacccaaaaattactcaaatcatatcaaaatgtagagctaaacaagataaacaactttgctcaaagaactaaatgcaaaaacgaaatatattaagagtaattaaggttttaagattcaagaacacaaagaaaaactaagagataaaaacttggtcctttggacaaatcccaaagtgacctatttatactaaagtctcaaaaaccctagattcactagaagacaagagacttgaggcggtttggatggatgctcgatcttggggatcgagtaaagagggtggagcaaagtctgcgccttttgcctccatgctccgagtgatcaattggtcgagtagatgcttcttcctctcctatctgtatgctaagatgtctggtccagtggagaatgaggaagatccgaagacgctttgaacgatcaacaagtcttgtagactaggtcgcccttgatcgagtaaagaggtcgagtagaggatcgagtaggagggtcgaggggtgtctgctgcctcctttgtggctgcctggatcgagtaaaggaatcgagtgaattgctttgctgcttccctcttggtttgatagagtagagggtcgagtagattccttgtaagctccttctgcacctgaaaacacaccaaaacatgcaatatgtatgcaagatgatcctaaatgcctaagtgtgcaaaataagctaaatgtgatgcaaaatgatatgatacaatgagtggtcactaagctaaatgatgataaatacatgtctaaaatgagtaaaatacagtgttatcaagaaggagatgaatttcactgtaatgaatcaacatccaaggatgaagataaagaagaagaagatgaagaatctgaataattagaatagatataatttttttgtgtatttgtaaaatttatataaataaaacttttattttaatgtaattttcagtgtctttttaagtaattatcttcacaattgttaatcaaatttgtaaccagctcagttgctaacatactagccaaccaacttacacgctcgcgattcgattccatttgaatccttttttatttgtaaaaatttcctaaacgtcacaaaacagtcgatctttgcaacttatttgcgacgaaactagaaaacagtcgcatatttgcaactaattacctacgtaactaccaccactcgatttttgcacaaagcaatcgatcttcgcaacttatttgcgacgatattagaaaacagtcgctttttgcaaccaattacctacgtattaccaactctggatttttccattttgaaattttaaagttttggtctgtttatatattttcttatacgttgatactttaatttaatcgatattagatataaaaacataaccaaacaattcaaatctgaactttacaaactaaacattcacaaaaacctaatatatatgataagttctatgttctttcattgtcatgattgatattttcaaacaagttctaaaataagttatgaaaccaatcatttatatgtctaaagttctgtatgtactgtatatcactaaaatgggtgctttcagtaatttttagaactagatcggatcaaactatgtggatttaaaaagtttgtcttgtgacgttttgtaaatgtcacaaaatagtcgctctttgcaacttatttgcgacgaaaatagaaaacagtcgcactttacaaccaattacctacgtattaccaacgatcaatttttgcatttcgaaattttaaaattttggtctatttatatgttttcttatacgttgatactttaatttgatagatattagatatacaaacataaccaaacacttcaagtctgaattttacaaactatacatccaaaaaaacataatctatatgataagtttcatgagttttcattgtcatgattgatattttcaaacaagttctaaaataagttatgaaaccaatcatttatatacctaaagttctgtacgtaataaaatgagtgcttttcagtaatatttatcaatagattggatcaaactatgtggattttttttttcttgtgacgttttactaatagttacaaaatagtcacactttgcgacgtttgcgtaaccgagttgcgactgatttgcgacgattgtgcaacgtttttaaaattttgtaaaatatattaagtgattctcgcataattatagttcgaccgaagagggaccaaagagcgactctttatttattttaagtggaaataaacttgtcgacttctctcattttatcgtttccttttctcaatctagggttttcaattctcattctctctagaatactctccaaaatacctttcaatcctcttaatttctcttctctaaaccctcttgttctctagtcaaattctagatctagggtttggaattcttttctttgtaaactcgaatttgaactatggctggtggtggtaaaggaaaatcgtcaggaagtcgaggtcgaggtagggaatctacgccgaaggcaaaggttttttacggtaaaaatcctctcggccgtgggagtgaagtcggaggttcttctctgtcctcaaaccctaatggcgacgctctccgttacacattcaaatagaagtcttccttcccaaaatctgccggcgacacgaccccagaaatcaccaccccaaacgacacaaaccccgactcctgctcgttctcactcgcaatttggctctcaacaaccgcttcttattcgtcgaaagcaaccacacctcctgctcgtcaacatcagattcctcatcttcaagaacagcttgctcaggatccaccggagacacagttcataccaaaacttcaaaatcatgaagaggaagatgaggaggacgatggggaaacagatagggaggaagtcggggaagaagatggagaggaagtcgacaaagaagaacaaaaccctaatgtcgactaccaagagctgttggatcgcttacttgccctgcctggccgacaacaactttcggttctgtctcaggagcctattccagaagtcgagactctctggtaagctctatctttctctccttctagaaacagatgaagattatgaatggtgattaagctaagtatggtctggagtctttgtattggtctgcactctttgttttgtgttggctctagacaaatttttatttggctttagtgttggctctagtgcaatgatttggtctacagtctttctttggtctgaacttctttgttttatgttggctcacacattcatcgatttggtctgcagtctgtgtttggtctgcttgtatttgttaagtgttggctcacctaaagtcgatttggtctacagtcaaaagttttggtctccttgtctttgttttgtgttggctcacataaagtcgatttggtctgcaatctttgtttggtctgttggtaatgttaagtgttagctcacctaaagtcgttttaaaatagttttggttttggtctgcagtctttgttttaatctgcagtctttgttttggtccgtgagtttttgttttctgttattgtttcaaaaccatttcatttttgctaattctctgttggttgcatcaactaaagtcgattatgtttatatttggaatgtcttggtggtttaatcaaaagtaacataggcaggtttaactagcacaaaggaaagttgtctaaagtgatttcaaccatatttaggacgaagtgatgggccttacttcagttggaacgttactccaatagccactcaagagagatacttcagaaattttgcggtaatgtcacaaatacctttcattctgttattgtttggctttagtgttgctcttactatctttgctaacttagctgtttgttatgtagcggaagtattattgggatgaaggcattactgaactcgttaaagaaagtttcttggttatagccaagaaaaggatgaaagggattgtcagtcaagcaaagaagagtggtgaacaaccaccatggattcgtgatacactttggaaacaaatgtgggtgcattggaacactgaagatgctcagctgaaaagtgagacaacttcaaactgtagaaactcagatcgtggaggtcttggagtgcacaaacacttagccggtcagaaatcttttgtgcaagttcatcaagaaatggtaagagttttctttccatccaaacagttcacttaacagctttctataattacctccacataggcttgtctaagcttgtctttgtctatttgattttctttggcaagaggaacgtttgaagcgtcatgtatcatatggggaagtgtttatgcaaacacatacaagggttgatggatcttttgtagatcagaaatctcagcatgttggtgaggcttatgtgaagatactggaagagaggatgtctgaaatggatgaggatggtcctcaagtgtctgataattcctcgcaacattcaactcatcgtacgctcatcattgatgaaaagaataagatttttcttaaggtaattcatttccgtttttattttgcttacaatctgcttgtctttgtttgcttggaatatgattgattatgagcaatggatacttagagtaattatgattgtctttggtgattgtatttgtcttcttgtttcagtgtactcatatagatgacaaagggaacccttttggccttggatcgcttctagagacactgaacaaaagaaaaaggaaagagagttatgcaagctcttctacttcaactgttgcgcaacttcaagagcagctgcagctcaagatatctgaacaagaggagcaaaatgcaaaacttgatgaggagcatcgccaatctcaatctcggatagccagcttggagaagctcgtcctcttcatgaaagaaaaaagatcctgagttggctgcttatttgtcaactgattctactcaacatgaaccagacacacatccaaccaacacaactccatccacacttccaaccaccacaacccccgcaccagccatcacagttgcatgcaccacacccttagtctccactttagctactatttctaacacttcttctaaccattaaacttgatcttttgtagcttttgttgtttttgttgaaacttgtttaggatttctatgactatgattttctgaatgtaaacataattagtgtcttaatgttaacatgattagggattattggcttttgaatcgatattaatcatgtttatcattccaaacataagaccaatttgtgactaaaccaaaacaatacatgtgactactttgtgaccaaaccaaaacaatacatgtgactaatttgtgaccaaaccaattatataactatgaccactttgtgaccaaacttattcaaaatatgtgacaataatgtgaccgacccattacaaaactgtgaccaatttgtgactaaatcaaattacacaaaattgttacatagtggcacaatcgttgctaaaacgatactattttgcgattacattacaaggcgtcgtaacttagtcgcaaaagggaaagactattttgcgactatattgtaacgtatgtacctaaatgtacgttgttgcagtttagtcgcatatctgccacttctttatacccatcacaaatcagtcgcttatttacgactaaccttatgtgtccgaaattcgtcgctgataagcgaccgatttgggactgcaatattttgcgacagtttttaagcgaccgtttattatcgtcgttaagtagtcgtaaacacctagtttgcgatcattttgggaccaatatgagaattgcaaatggcaggttttcttgtagtttacatctgaacggtggttccgtgccggtggagatggcggtgatctgtcgtcatgcgactccatcccaacttgtgcaacacatgtttatccacgtgtccttttcttaccctatgtttcaattgtcatctttgttttgggtctaagattgggctttagttagatatatgttgttgggctccaattcacctttatgtaaaaaaaactagttgacgacaaaaaaaaaaagtgatgagaaagtaatgaaatggacttcttattactgacttctatttcttacactgaagtaaagagaactaacgtatatatattagagttgcttgggaagaaaggtagatttgtataataggataggctatagttaattggagaacaaggtattagagagtaagtgataagaagataataatagtggtaattatccaatctcaacaatcacataatttgtatcatgtgttaaaaatgtaactaatcaagtagattgacaaatgacgcatcaaaacgcttccagtcacaaattcaacaaataacttactcaataattccgtactttctaaatttaaaagtgaaattttcagtaataaatcttgtattccaactctgacttaggtttaggtgtggcttatctcttaatcaccaagaaaccgaccaaattatcacactcccgcattcgtatgacaaaactcaacctgattatcagactctgaggagtggggatctgatatttacttattatgttggccacaagcccagaggcaatatgtgttcatcagctcatgtcttgaatctctctctctatcttttcttttttgtgtgtgcaaagaatctctctctcaaaacaatcaatccacagtaaaacaatctcaggtgcttgaaacttttatatgttatccccacgaaattatcggctatactgctctttgcacattctctggttcttctttctctcttttttctcttttcacatcatcaaacgacgagaacacaaaatcctaattatcttaaatttgctcccaaagagcttgaagtaaactatactatccactcataactcataagaggctcttacatcgatcatcttttcggcgcttggcttccacctgaacacacaagttttttgttaacacaagaacatgttgtttcaggtaaaacagtaaaaacaatcggatttgatcaggataagagaagagattaacaatgtacgagtcacatatcttatttttttagccacaaacatcaagccaatgaaatttgctttttgtgactttactaagtacttaaaaagtagagccaatgatggtggcagaggttattgctatgacagtatcaaagtaataacaaaagttgaataaaaagaagaagacaaaacatataccttaagatcattggttgttgatgaagcaaacccgttctgaaatcttttgactccatcttcgtcagagctgcattcaacacatacaaagtgttccagcttcttggcttcttcaatcgtcacgcctacacacgctaggtgaaccctataatgacatagtagtaactcctacaatttaataaaaagaacatattatgcaataactatttcgattagacctcaaacagagaggagaccatttctatccaaaatttacacaagcaagttgttccggattaggaataacaaatatctaagagtttataatcatcagaattcagcattagatatcttactagttaagcaacaatacttgaaataaaaagaagatgaaaatagaatgatgaaaattagcatttacgagtccttacacccttcacattaattgcaccatcagttcatctgagttatacggcatttcacatttgtagtacctttatcaaaatccaaaagaagataaatcaaaactctatgtaaactacaggagaaaaaggcatgtttcattactatgtatccactcacacagcaactcgatcaggagtaaacgcgccagtagcagctttatagtcaaatatacagtaataatcttccactccaacattttcaagcctcgtgtagtttttaaaggtgtgaactatacattttccttcaatggtgtgtgcactttgaacatcgaagtgatcagacaagaaaagctctttagctccatggagctgtctccttcccccatgtgattcttcaggacaatagtaccatcgacaatgcaccttcacattgttccttgcatctgcttcaatcttctcaacacgcgccacgtaaggagctttaccagcatctgatggacgcattaacacacaatctcccactgtaaaaaaacccacctcaactatcacatttccaagtaaaatttctcttcctaactccaaaaaaacgtaaaatctaccaaagatcacatttaccaaagtgtacttattaagcaatgacataactcaacttcattgaatcaacatcaagcataagtttttataaaagaagagattttttttcgtttcagattgaaatgagtctatagaaatctaattgcagcttaataactcaaaagaagcaatcaaaaaagtgattagttatatacaaaatgcacatagaacttgcatctaacaattttgatatctttcttgcccagcttaatctttgaagaaaaagcgacaccaggtcgagttttcgccattaaaataaggttttttttttccaccgagtgacgagcttgattaagctgggttttgtttggttttcactcgttttttgttttttactcgaaatgtgtaaagattgaaaatttctagaagatcggaagctggagatcaatgggaagaagaagaagaagaagaagaaatcccaaaaaaagcgaagagataaatctagaacctaatataggtcaaattaatcctaagaccactttctcaaataaagaggccagttgtagtatttagggatcgaattcataaagttctctgacaacgcaatagataatggctatcgaattaagctaagtaaaatagtaaagaaaataaagagaaacaaaaagtgagcaatagaagattggttggttgtgaaacaagatattaaaagcgtcaggcttaaggtattctcagaaaatagatgatagtagatctagaaatagctaggttgttatcgcaccgttctcgaactcaaactatgattttagagtaaccggtggtgttccgcaaaactctctatacttagagctaagataaccggagaagccgagaaatcctatactaaagcatgcattattattaagtttgattagttcacctagtatctaaaccagagcccttctatgagcctacatgttctttcttaaatgcataggctcatctatgatagttcaataacaagtacctatggtgggtatacctattatctaatatcaagtgctgtttagctactctagaactagcattaagaacaatcaagaagaagaatcctacagataacctagcaagggggcaatctactaaatcatctaaatccctaatgagaaaccctaaacctaaccaaaaagctactcaaacatgatgaatgaagcaaacaacatgattgaataagaaatcaatgaataaaacaagaagagattaaggtttagaaggatcttctctaaagggagtctccacagggtttttctcccaaagtacaaaagagataaggagataagcctctccaagcttaggtctaaacaatgacctaaaagctatatatatgtcttaaaaacgtgatgggccttcattaaacataggagaaagttctgagccgaatttggaaatcttcaaaacatcaataagttgcatcatcgaattgccatcaggtattggtgtcgctcgacacctccgcgctttttagtcttcggatttcttatgcagcataaattctctgtttttctctagaatgctccattatctccaaatgaatctcaaacatgtaaagacctgaaaaaaaactaaaaaaaactctagaaataacaaatagactctaaaacctatacctaaatcatagctaaaagcagtaaaaatagggttatatcagaaccctagattttgattctagaagaagatgaagtttcactgtacagaacggagattacaagttttttcttttttcatttttttttgggctcaaacagtcaaacctttgaataggagccaattaattataataaagttaaaagaaacatttgtctatcaaatattatatggagtccatttttatttatcaattatagtattatttgtttatttttgtgttatatatttaggtcctgtttgtttcatcatttagcatttacatccaaatgattcatttacatgatccatttggatgatgcatctgaatgatgtttgtttcatcattttttttattatctaaatgatgcatttaaattgatatttctttgtttgatcattttgtagttcatctttattctcgtctagaaaaaaatgattaaaatcccatgttctcattttgaaaaatatacaacgtcattatcaaatatcaataccaaacatattaactttttaatctttaatcttagctatattaattgaattattgcggaaaatgtgattttgcggtttttagcataatatttttttttatggttttgggtggcaaatataatttgaagttttgacgagaaacatgaatttggattttgttggaaaaaatgattatacggttttggcgggaaaacataattttacggtttgccgggaaaataattttacgattttggtgggaaaaataattttacagttttggtggaaaacatgattttgtggttttggtggaaaaaatgattttacggttttgatgggaaaacgtgattttaatttacggttttggcggaaaaacattattttacagttttggcgggaaaaatgattttacgattctagttgaaaaacatgatttttcagtttttgtgagaagttttggcagaaaacgtgattttacggttttggcgggaaaatgattttacgattttagcggagaaaacatgattttactgttttcgtggaaaaacatgattttgtggtttgggcggaaaaatgattttacgattttggtggaaaaacatgattttgcggttttggtggaaaaacatgattttactgttttggcggaaaacatgattttacggttttagcgagaaaaatgattttatggttttggcgggaaaaacatgatgttgcggtttaggcgggaataatgaatttacattttttacgttaaataatagtccgtagtttcatgatttttggaatgcaatatgtaatttaaaaaaatgttaaataaaaaatctataataaattaacattattaaaagagggtatatttgtcatttgttctttttggcttaaccatctccatccaaatggtttaatcaagtccatccaaatgagtttcacaaatttgcctaaatttacaaacctattcagatgtattattcaacttcttcatttaaatgccaaaacaaacattatttttcatctctatctagatggtccatctagatggagaaataaacatgaccttactcttccatttagttgtaaagatactcatctgaatataaaagaaaattagtgtaaagttttttctattattactcttcttttatgcttgctttctttctcatatttctttctcttacaatatgtctattatttttctttaaaacttgaaaagaagataaattgatagatgacttacggtacaaaattctattaaaatacaacatgttatcagtatgatcactccaccatgttaagctatattattatcagagcgctgttctgccgccctttataaatataatacttttatatggttatttaatgcaccatcttatttattgcttttaactttttaatgtggatgattttagtcacaataatttacttcttgtttctatggatgattttaatcaccatattacatttaatactctaattcacagttttaacaagaatgattttaatcaccatattttatttaatattttaatttactgctttaacttggatgattttagtcaccatattttatttaatattttaatttattgctttaacatggatgatctaaatcaccatatgttttatttgctgcttttaatttttttttcatatggatgatttagccaacatatcattatcatattatcatttatattatcattattataaaaggaggctcaaacacctatataatcttatgtataaattaatatatattttcctgattatttatttttagactaaaattttattttttaaatcttaacggtcataaataaataaatgaaattaattacccaaactcttaaatttttttttccttttcaaccggctacttaactgctagtgaacagtttattttatctatatatactcttatttctcattcattcatctcactcaaagatttcatcttctcctaaaatcatctctttaagcatgagtcatctgtttttagtttttgtaattggttttataattgttgcaatttacggtttactctttggagaattttctcccgaagaaattttgatggttattattttacctttttagttaattgtatttcttttaaattgcattgcttattcaagtacctctcatactatgaaatgaaataaattaaatttctaataaagttctttatgattttatttaagaaacgaaatggcaaatatcgaaaagctccaatttcctgccttagacataccggggctaactaaatatcttggactaccaatgttgaactatatttggggtcctttgggataacgaaaactagaaaggagaataattcttcgacggtccaagaaaagacaaaatcggtgatcttctttagaagacaccgagatgaaagtgctatatatgactatgcacacatgagagatcctaaagaactttgaaatctttgaaagattgttttgatcataaaaggggcatcactctcccacttgtccgggaggaatggcaaagtctaaggttccaagactttgataaggtaataaactacaattctgccatgttgggaatcgtggccaaactgagatattgtggtgaaactatcactgaatcccagatgcttgagaaaacgtataccacgtttcacaaaaaccagattactttgcaacaacaatataggttgcgtggatataccaaattctcagatttgattgtggagctcttaatagccgaaaagaatagtgagctcctaatcaagaatcacatgtcccgacctaccggatcaaagacattccctgaggtgaatgcattggatgttaaaaatccagtaagagaaaacaaaacgttttgggaacgtggttgccgaagctatcgcggacatggaagagggtttaatcaacaaaccaggaagtcatatcaatggattcgtcttgagcatgattcgaaaggaaaagaaatccaagcaaatacttcccaaaaatatgagagtgcttgtttcagatgtggcacttgtggatgtcggaatccgcaattaggaagttgtggatgttacgaggaccttaaaccttgttagtcgagccaagattaaatcggacaatatttcagttaatcggaattcttttgtatagtaattttttctttcccccttacaaatgatgatcgagttctatttatacaatcaaatggaatatttacgaagtaaatgaacgcgtgaattacaccgcgaatcatgcctcattaatgtttacgttttgaactgccacttcgcgtattaacacatcctcatttactccagtgattttttgttacgtaaagcccagatactcttacgcggactgggcctcgaatgggccctcgaatcccacttcgtcacgggtggtttcaggcccaccgtttcgagcccactgattgatgatgatggatctcgggtcggggcaaactgatgagatccgacatccacattttaccccccaagtctttgaaagagagaaatcaattcggagacttaaatcgatttcagcccgtgatcctagcaattacggcgccagctcgggatttctttccttaactgcataggctcgaggtaaaacaggaaataaaattccgcgagttttgagattttatcgggaagagtgtgacatttcgtgatcctagggtttcctttttcccgctcgttcgtcctctatttaatcaaatcaatccctcgtcctcttcactttcatttataagaaccagcaactcatcttcaagtctttccaggtaaattctctcgctcctttctctgtttctgcttctgttctttagacgctatgaatcttgccggaaattctttagtttaggctcgcttagggtttaaacggggtgttcctcgatcgaaaatccttatcgattcatagattttcagcgctgattccgacggtttcgctatttgccactgttattcttctctctccgctgcggttctcgttaaaatcaccgtcggcacaaccgcttatttcccagatctcggcgaaaatcgtttcggtgttcttgaagcactgaagaagatcttcatcgtgttcttgaattttactgaaccgaatagcctccagatcgtctttcacagaatccccgaagtctttggtctttgtcatgcctccgaagaaaataagccgcgaggtgtactcgatcgagggtcagttcgggaaatataaaacctcactttcaacctcgagaagactcgccttacttagaggggcccatcagatctcgacacaaatcagtttaatatctcccgaaccgacagactctcccgaatctccccctgctggacatacttgcgcattcgaaattttcttctcggaatgcggcctttacttccctcttcctgacatcctcatcgagtttatgcatgagttcggaatagcgttgcctcagctatgtccgaacattattcgcaccatcctaagtcttctcactctggcagaagaagatggatttcttctttcactacccgacctccttcaactataagctgtgaaaaaaggtcgcacttcggggacagggaccttcttcttatctcctcgaaaaggtttccgtgtgtttgaggatttcgcagagaaagatgaaaactggagaaaatcttttttctttttcctcgtaaacgagctcacctttgggaataagaccgatctctttgtttatgaatgggctgctcgagctggtagatggcgaccttaggatgatttattttgaacttgtaaaaattttgttttcacaagctgatcaacgttttattttgttttcgcagctcgagttgagaaatcccctatctcgaaaaccttcgctgctcacttctccagtttctgtcgtcaagacttagtttgggaagctctgacaaacgacaaaattcgagcatgagggcgaagacttcgctctaggactgctacctcttcacctccttttcaaccccgaatattctccgaagcagagatggcatcctcctcgtactgtgctgagaagaagatggaaagagaaagggcgaggaaagaaaaggagcggcttcagtcagacaaggtggtaatggctggaactcttgaggacagcaaacttcgtgctctcgacaaagccaagcagcctcaaaatgaggacgactccggaactcgtcagaagtcttccgctttgtccggaaagggtcccaagatctccacctcggaggcaaggacgtcgaacaagaatactccggataaggagcccacaaagcgggatgctgacaagaagaggaagcattcagagaccgatgctcgctctccttcccgctcttcacgcgccggaaatgaggcaaaagagactggtcaaaaccagcagaaggggaaaaacaaaaagggagattcgcaagatctcgttgttctctcctccagggtgtctgagtcccgctactcgcagcgtcgcaccacatctcctttgcctggtaagctcgtgttctaagtcgttgcctttgaaggttttatcaatccgtcaatcacttatacgtattttttgaattgtctcagctcctccgatgcccttcgctgacacgcttaggacactcgttcaccccagagcgatcatgccacccctagcggaacttaaggcaaccaaccgggagaaacttggcgaggtaaataaactttatcagaaaacaagttcacttctcactggtttgtattccctaaccacttttattattaggctgtccaggagtttaactatgccttcctcagtcacgaggaccagctcttcgagaaggataaggagattgagagttataagcaaaacgaggaggagaacgctcgtatggtggatcgggctaatagtgtacttagccgtatgagagccgcagaagctaaggttcaaactcttgagatttctaacaccgatctctccgcaaaactcgaatcgggcaagaacgcctatccgacgaccattgaaaatgaaaaccgatcaagggccgaacttcttgcgtgcgaggagaggatgaaaaaactcgaggaaggtcagtctgtaatgctccacgctgcgaggcaagaggagaaaaggaaggtccgagctcaattgacagacttctcctcgaaatatgggactttctatgtccaatctgatgaagttgaggctgctaatattcgagctgcagaagtcaaggtgaacagggagctcctcgaagagatcgagaagggggaaatacccagcatagctgaagaacttgaatcggttcgtgcagacgaaattaagttcgcacaaaaggctgccgaaccaaagaccccacgtccaaaccctgttgagcccacctcgcttctggcagataccccacccgaagtgattgcagattccaacgcttcagatgaagtgttaatcatagacaagcatggaaccaacaaggacacagccgccgaagcaggaatcgccgccatgttccctgttgacgttgagaagaactccgaagctgcagagtaaaaaagtttatgtttgagtcggggttgtgttggtccgcagtgaccccccgttttgtttcaaaacttatttttcttttttgaacctggccagagaggccttaactctattgttttttttaacttatttaagatcgtggagaccgttttatgtttacttggtttaattttccgaattacgagatagactcggttttagtgttagccggaaaataactaagtggaggcttggtcgccggaactttggttgtcgctggtgctcatggtgatttaaccgaagctatgaagtaaaagatttaatctctcctccttttagcactaaattgtggatgtcagaatccgcaattaggaatttgtggatgttacgaggacctttaaccttgttagccgagctaagattaaatcggacaatatttcagttaattggaattctattgtatagtaattttttctgtcccccttataaatgatgatcgagttctatttatacaatcaaatcgaatatctacgaagtaactgaacgcttgaattacgccacaaatcatgcctcattaatgtttacgtttcaaactgccacttcccatattaacgcatcctcatttagtccggtgattttctgttacgtaacacgcagatactcttacgcgtactgggcctcaaatgggccctcgatgcccacttcgtcacgggtggtttcaggcccaccgttttgagcccactgattgatgatgatggatcttgggtcggggcaaactgacgagatccgacatccacaacactaaggaacattggtcttaggtatgccgaactccagcacatctgtgtgctctatacaaagaatccgccaagggaaaaggaaaggaagtgaacctcgcagaacatattgaggaaatggatcacattacaaatggaacaatatccaaggcaaaccttggagatatttgcataccagatagtagaacaacgcacactattctaaaacataaaaaatatttctctgatttgaaatcaacaaaagttggagttaacatatcaggtcccacagacttaattgaagggacgagtaaagcaaattttggattacctgttaagacaaagttctcgataaataatgcattattttctccaaattcaaaaaaacttttgttgagtttcaaaaatatataccttcatggatatccttcgtggatatgacactcagtctgcaactgagaatggaagaagtacatgtgtatcacttctgaaaaatttggggaaaaaaacacattttggagaaattaacaagactcccatcaggattgcatcatacatagaatcacatcatgttatcaaaagagatcatgacgatttcacattgtggcacgatcagcttggtcacccaggcaccacgatgatgcaaacaattatagagagctcatatggacattcaatgaaatcccaagagatttatcaagggaataaaagaacatgtgttgtgtgttctctaggaaaattgattataaggctatcgccaagtaaaattactaaacaattaccagaattccttgaacgagcccaagacgacatttgtggacctatacacccaccatgtggaccattctattatttcatggttgatgcggacatcaaccttacttcacaaaccgttgaactacatcctgtaccacatcttatactacatcctgtaccagaagtcccggagggtatcatgacacgttcaaaggctaaacaattgaagaaaaggttcaacttagttgtgcaagatattttgagctccctagagctaggagtaaactggttcgtagcaccccataccggatatgatctaataggcgaacaagagcttgttgaagcattcacccaaatgagtcttgaacgaactactcccccaagtatgaaatatcatttgacaggttcaaggacctctagaaaccaagagaagactttggagcttcaagagacgaacgattcaagtgtcacatctgcaagtgatcgagagagtcaagatcaagaacaagacataaaggacatggaagagctcgaagacgttgattaagctactcaagaggaactccagaaagacccctacttcaaggaaccaaccaacaaacgagcacaagacttgactccagaagtacctcaagaagtactacaggaagtgactcaggcgacatgggcctaaaacgcatctaggtaaggtttattcagtttatattatctttgcaggtccacacagcccagacaacggctagaatcgttctcaatcgtgctcctcaagagaacttaattagtttccttattttagcttatttctttcttaaaacaatggtttttgtgttttgatttaaatttgtttccttttgcgtttttacatttaattttggccttagggatagctgatagactcttataaagtccccctgcaacagttgaacgatttttcacctttgattatcaataaagaaccgcattttctcacttcttctctttaaatgttcttaagagaataagcttgttctttgtcttgtgtgtgcaattcaccaaggccaagttcgtgtactgtatcagagacttatcacatctctgtggtgtacttcaatccgccagcacttcccctctaatagatcccacacaagagaaccgatcgccatcatgttagatctccatcttcgaccatctttccttcacaagagagaagcgaccgccagcttgtgaagccaccatctctatcagatacaagctcaccaccgagtcttgtatcatcttggtatcagagcgcagttgcacttcctttgccaggtttcatcgtttcttatagcctggcttactttctgaatcagtttctacattagtctagtttctgttttatttaaattaaaaaaacaaaaaacaagtatttcagtttcattttatttcgtgttaagtatttgtttttgagtttcgtaatattaatcaaaaaaaaatatatatatatatattgttaactttgtactacatcagcaagtgtgtcagaaagtgattcaacaagttttaggtttcttggttttgatctttcttttctattgttgtggtacgttgatttctttgttgtttttgtctaagcacatgtcagttttaggtaatactatgggagaggcagcagaaattccccaaaacaccgtaatgcaaatgatggctactttgacggaggagttaaggggattaaggaaacggctaggccgcttagaacagccctatcccagggttgaattggggcaagaccaggctcgtaggaatgcccgcgaggaggcggaggagtttcctgacttggatgatgaagatgatccacctcccgaccctttgagacgccaacaccaacggagagaagatccattgatgagaaaccgtgcacgaggagtagagcctcgtgaatagaaccaagatatcaaactaacagctcctacttttgcaggaaaatctaatccagaggtgtacatggattgggagcgacggatggagtacatcttcgaatgttatggtatggagaatctcggaaggtgtccttagcagccgctcagctcaccgaaaatgctttatctgggtgggataggacagtagctgataggaggagaaaaagatttggtcccataaacacttggggagacatgaagtacctcttaaggttgaggtatgtccctgaccattatcataaagacttacaaaaatattttagaatgttgtctcaaggaacaaggaccgtcgatgagtactttgaggagtttgagaagctcatgaacgccttggagttagaggaatctgacgaagctctcatggctcaattcatagatggattacaagagaggattcagcgaaaggtggagagagcccaatataatggactccatgagttgctacacctagcggtacaagtcgaacagcaaatcaggcgtaaggcatccttaagcaaccgatccagaaacaacacgccttggaatgcaagcaacaaccgagccatggacaaaagcaaggtcgtagagagtgatcataggttcaagaacaagtctaatgaggcacctaaaacctctaggcccaaacttggtaagttccctagtactaatcaatctcgttctcgttacattacttgtttcaaatgtcaaggtagaggacacatggcgagagaatgtctgaaccaaagggtgatgatcctcactcctagtggtgactatgagtcacaagatgagcaagaggattctgatgagcatgaggacattgagtatcccgatgtaggagaactccttgtgattcgcaggacattgagtgtgttcgttaacctcgaatgattattgatggaggttcatgtactaatgttgctagcaagtacatggtagacaggttaggacttcagaaaacaaagcacccgaggccatacaagcttaggtggctcaatgacgatactgaactgaaactcgcttaacaagtgaccgtatcattcagcgtgggaaagtaccacgatcaagtcgtttgtgacgtagtgccaatgagagttggacatcttctccttggacgaccatggcagtttgatcgagctacatgtcacaatagacgcaccaaccattactctttcacctataatgaccgtaagtacaaccttgcccctcttagtcccttagaagttcatgacttacaaattcacatgaacaaggagcacgaggtaagaagttctagtctttatttaagctctaaagatgtttgtaaaaccatgagtgccaagggcaccgtgctactaatggttttcaaagaatgtcttagtacagggataggtgatcctgagctatccgctgaagtacaagttgtactacattggtacaaagacttattcccggaggagattccacccggactaccacctattcgtggcatagaacagcagattgatcttgtaccaggctctgctttacctaacaagcccgcctacaggatgaatccggaggagtctaaggagcttgaaaagcaagtgagtgacctatagacaaagggtacatcagagagagtctcagcccgtgtgcagtacctgtcctattggtcccaaagaaggatggcacgtggagaatgtgtctagactgccgtgcaatcaacaatatcaccatcaagtaccgacacccaattccgagactatacgacatgttggatgagcttagtggtgccatcatattttccaaagttgacttgaggagtggctatcaccaggtccgaatgagagaaggagacgagtggaagacagccttcaagaccaagcaaggtctctacgagtgccttgtaatgccgttcgggctaaccaacgcaccaagcaccttcatgcgcctaatgaaccaggttctaaggtcttttattggtaaatttgttgttgtttactttgacgacatacttatttacaataagagttattctgatcacattcaacccttagagttaattctcaaaacgcttcggaaggaaggtctttatgctaacctgaagaagtgcacattttgttctgacaagtttttttttcctatatgtgtatatgatttttatgtgaatattttacttattataaattagtatttttattgctatgcaaaatgttgatataaatatttgttataaatcggatttatgcatattttgtggagtaaaattcacgattttttttttaaaagatatatggaaagattgtgtacagatttttagaaacaaattaggccagatatcgtttggttaatatctttttaaaattttttaaaactaaataataaatgccagtagcagccattgtaaataagtcccatctccaggatttatttcacaaaatggctgcaaaaatgtatatatagattacgttttaatatttgagtatatgtacaaaatagccatgaaaccaaaaagaatagagtaaatgaccatgggcaacagtactttatcggagaggcaaataaaattactaacatatcattttctcatcttctctcactttttttctctttctctcactctcttttactggattatttccatcgccggatttatgtcatcaacttctcttccctttatggatattctctaccaccacttactccgtaataatatcacggtgaccatgaccaaatgctaaattgtttttcattattttttatttgattcatgtcacttcttaaaatttcatggttttcctgaattttatgtaatattttatgatgtactggtatctttccgtttaacatactatatttctgttttacatatgatcttttaatatgtcatactgttgtttattttgacatgctattgttcaaaaatacataagattttgtacaaatactgatgagaacatgaccaatgcaaccaaacaacttgaaccacaagaagatgaggagcagtttgaagccgaggagcagcttgtaccggaagaagcattaatcgttccgacgggttctctaacaagatcaaaatccaagaagttcaaccaagccatcaatggactactcaaggagctaaagaagaatcaagaagacgtggctcaatcctccttcataatgatcacggctcgagagactcggtaaagggttaagtgttgcttatgcactctttttctcttgttaagttttgtcccaatgggttttcttgacaaggtttttaatgaggcctaagtaacactttcaaacctccctttatcagcccaattcatggtccaaggcccactcacaatgccttggcccattttctcttttctattcaaactttgcattcattgcttttgttatttccaaaactctttgcatgagcttgcatgagtgtggacttgtgcatgctcttgcatgtctttcttctctcacctcttccctttcttcctcctctccaatataaactcattgtagttttcatttgcaatcatcaaacattttaatcaaaaaatttctctttcccttgtttgatccgaaaagtgtgtaatatcttttcaacttgttttcttcttagtgtgtaatatctaagttggatccaagctcgtagtctaagagtctttcatcactcttggaagtacaatttgttcccctttcatttcgctgcatccactcgatctcgtcgtcatccccattcatcgtctttccgccgctttgattaagatcaatccattattcaccatcaactaaatcatttccaattcaaaaccaacaaagtgagtccttggagtatagatccacgttagtagtatcaaataccaagttatttctttcgttatttttatttgattcctgttatttttaataagtacatgatttctttattttcttctttaattttttgccattagatgactccttttctggactacttactctttaataatatcacgatgattataatttcgctaattttatttgattcatgttatttttaaaaaacacatgatttctttctttttttctttaatttttttgctatcagatgactctctttctactctgtaataatatcacgatgattatgacttctacctatgagtctcttttctttttcttactgaagcttcagagtctcttttcttttttcacagaaccttataaagtctccatcaccattaataaaaatatcattgtaaaaactataagtttacaaggttaattagttttttcttaatccataccgtaccacaaaaagaattatttacccaatatttctgacatatggttagttttttaattatgatgtcaaatttggttatccactaatattactcttaatattttgtgggaaggcccatggtgtctcttcttttgttagcggcttagagcatccccattggggagtcctaattaagaactccttacaatgttttaatagtaaattttaagtaaatgagagtttaaagtttttggttgaatctttataatttttagtgtccaatggtggaatccttaagtggaatccttaagtgagaaatttttattagtttgtgaaaaagagtgttaattgggtaaaaggaagagtgtgtattaagttaaagaagagtgtttatttggtgaaagaagaatgtttattgggtttgttgtagagaacaagaagagtggatacttaaaacaataacagtggataaaagaagagtgttttggtatgcatatacagagacttcaaaatttagaacaatgaaaacaaaattattgtttagcatacaagtgatgtcatagaatacacaataagaactagtgttttcggaatattattttgtggtgtacaagcattcaaaccaaagtacaaacttgtggtgacttaaaacatgtggtctcttttatacaagtaatgtcggcactggagtgatttagagaaggtggaagcattatttaagtctgtaacaaaacaagaaaccaacattaagaagagacatacaagaacattaacattaagacaaccatatggaacttaaactgaacacaagcttgtttgctacttaaactaaacacaagctttattcgaactaaaactgaagacaagtcatatggaacttaaactgaacacaagtcacattggaactaaaactgaagacaagtcatatggaacttcttacgaacacaagtcatattgaaacacaacacactaacactgaagactaaacattcacaaataagaaaacatagaatacttaaactaaagattaagacaacatatcacattaagacaagttttattaaaactgaacacattaagctgaacactcatttagtccgttaacacaagaataagcaacaatatcattaaagccgaagtgatacaagtcatattgaacttaaagtaaagaaaacagacatacaagttatctaagctaaaaccacttagagaacatggaccataacatgacatacaagtgaataagcagcaaaagagtcacatttttatcttaaaaaccaaaagatcaaacacaaatttgaacataaagcaaagcccagaatctgtatacgaatccatatactgaattcgaaatcaattgttacagatcaacttgtaagaagcaattaccagatcaaaagcaccagactttaacttgccatcaaattcaacctaaacccagataaacaattaagcatcaaaaagagcaaaaaaatcaaaacttcaatcacatataagaaccttaccagcagacgaacccacaagcaggatcctatgagcatcaacattctaaccaatccaccgaaaaacagcgccacatcgttgacctcagcaaagccggtaagagtagctcttccggtggattttctgacacctcttcgatcacgaatcttgtggatcgtatgagaagagagacatgataagaaaagagacgatgaagaatttgatccgtcgaagtcgaaattcggagaaaacaggagaggagagaggagagaaagaaaaaaatagtttgggaatgggaaagaaaaaaaacacgggaaaagttgtcatccaataatatacagtcacgtcagcgcacctaatacatccaaaaataccttaaacaaggttcgcaccttggtttattacaccattctgatttaattttttgctattattcataaggattttcttaaaaaacttgtaaggtccctcaatggacatgctcttagagctcgccatctacttgtcgtgtcgagagacaaggtcggtggtgcttcaaatcgacggtttttcccggatcaaggtatgagatttctcctcctgtggcttatccttgtttttctcactagaggacggtgatttaatttagtgtggatttcacggtggtgttgtagcagattcatgtccttcgcaatggctctcgtctcccttgttactggctttctttagtcttcatcttagttaagacggaatattactagtttcattgtagattgtgccttgtgtgcgcttcgtttcgattgcgggtggttccattagagagtgatgatctgtttagttttcaattggtaatgaaatgatgaacttagaggaaaattttattttgaattgttttatgagtacatttttgggttgttacttccataactcattgtaagacatgaacacaactgctataaggaatccacaagagcaacctatggctgctgcattccatgaaaaaattgtttcttcttcttctttgtcttcttcttctttttcctcagctggctgcttggtctgtgtaggaaagcatggtacttggatttgcattccacagattccgctgttgttcgcgtaaatgtttggattgttcaatctgtctagctgaggactttcagggattctacctttaagcttgttgttacgcaaatccaatgtattcagctcgcttagcttggataacgttttcgggatttcgccagtgaggttgttgtgtgaaaggtctaagctctctaccttctcaagatctccaaaactttgtgggatcaatccagagaactcgttgttggaaagatttaaaacctttaggcttttgagattgcctaaagaagttgggatttctccgtgtagcttgttcttggagagatctaagagagtgtagaggtagaagtttctgtcgaaaagaacttgttttgaattcttccagttcactacaagactaaatatatcttctgattcgatctcgattaatctttctatgttgggtatgtcggtataggagctgaaatagggacggatagtcatagctgagggctcaggagattttatcatgcatgtaagattcccaagagatgaagggagatatccatcaagattgttctcagagagatccaagaccttaaggcttgtgagatttgatatgccttctgggattgaacctttgagggaattgtttctcaggctaagaacctctacagaagaagataactgggagattaaactcgcgactgttccagagattttgttgtcatggagatcaagacggatcagatatgaaagatttctgaagttctgaggaaattcgccgctgaaattgttctgactcattaagagcatactggtggatcctccaaagtaagctggaacatccccagagaactcgttcgaagatatatcgagccactcaaggtatgactcggggcggaacctcgggaattcacctgataatcgattctttgacaagtccaacaacttgagaaaggggatctttgtaatagactttggtactgatcctgagaagttgttttcagacaacatgagtaccatgacctgtgattcgccaatcgtatcagggatctgaccagaaaagttgttccttgatagtacaagatagtataagctcggacgctgaaacaaatttggaggcagtgagcctgtgagtctgttgtctgacaaagttatgtttctgattttcagatcagctagccattttgggaatcttccttcgagtctgttaatgctcaaatccaagtaaacaagagctgtttgattcttgagccaatccggaatattcccttctaagccacaagatctaagtgacagatgtgttaacttaaactgtggaaagacataaccattattgttccattggagtttgttgtttccttcaagccgtagtaccttcagcttctgaagaccaaacaaccaagctgcgggaatctcacctgacaagccattgttattctcaagctgaagggtttcaagatttttcagattatgaatcgacgatggaattccacccgacaacttgttcatgctcaaggacagagttgatagattgaccaagtttccaatatcatctggaatcttagaagacaagaaattgttctgaagatctatcgttttgagcttcgttaaccgtgatacagacgacggtatggaactattgaacatgttctgcctcaaggtcagcgtcagtagttcgacaagactaccttgcaacattttaaaaggtaggacattttaacacccacatgaatataaaatttaaatatttgagaatttattttctagtttacctatttctgaaggaatcgctcctccaatgagattctcatctaagatcagttcctgcagattcttgagctctttgatgtcaccactcaacgtaccgccaataacattcctgcttaaatcaagacgctgaagatttgtcaaggagaacaattcatgaggaattgagccgttaaatctattacaacacatgtcaagagaaatcaagctggtcaagttcacaaacgcatatccaggaatctctccttgtatgttgttaaatgagacatcaagcccaacaagagagtttatacgcagaatcggtctcaaaatgcttgaactaactaagccaggggggatgagcaagaatagattcaggtctatcacttctttggaaggcgaactagcgttacatgtcacgcgtagccatttgcagcaatctgagtttggcctccatgtccctaattcttcaaaggctgtgtagttgtccttgatgttgtgaatcagcaagttcttgaactcgagaagggattgtctttgatcttgtggacaagagaaagatagttgtggtatgaagaagcagaagaagaggaagcaggagagaagacattgcttcgacattttgctttttgccccttactgttcttcttttgtcatccaagtttttggttaaaaaccaaatccgaacaaatcaacaaagttgactctggtagggtctctcactctcgtagcgtttaagtaaattgttgaaatttcatcattgttgacttgaaaccattgactccaactactttacaagtccggaagtatttaatactagctaaaaaaatcggagtattaattttgtattagattttcgtaaatttgaaagtgttcgaactctaagagcacgtccaacgtgggtctctttatacaggctcatccacttaaaaataacaaaaatatttaaaaagtaaaagagggatgaaagagagtctctgaaagtcctcatttaaaggacgttcccacaaacatatttgcaagtgtaatcttatcaatgtccaatttatattaaaaaactaaaatataattaaaataataaaatattattactttttacttttttagggactttgacagtcccaaccattgtacatgctttaagtgcaatgatttagaaaccttgttattttgaacctagccttattgtaaaaaataaacttgttgtaaatagttgcaagaatgctcattcttcatttcaacaaacttaaatgttgtcctttaacaaagttagtcatattgaattgttgaaacaacacatgtctacatgtctccattctcgaataaattgttgaaatttcatcatgttgacttgaaaattgaaagcattgattacacatttgtgttatgtatcttaattactttgtaattttcttataaaaatattttaacgaagaattaatctttcttttagattttaataaatttgaaagtgttttttttttcttaattgaaaatatacataagaagtttgaacctttttattttgaacataacatcattgtaagaagtaaagttatagaccctaccaaaaaaaaaggaagaagtaaagttattaaaaataggaaaaatgtcataaaaatgatcactttacgaaaaatggtgaaacaaagcacaaactttgcttctagtgaattaaatcactaatttcaattgatttttcaattaaatcattaacttgtattaactttgccaaaaaaagcatatcgtgatgtcaactaattgaaaaaattaacggtgttaagtcaacattcccatctttcgttaaactgcaaaacgacgtcgttttatgtttttaaaaaaatcacaaataaaagataaaaatgggtcttgacccgttcaccataagcaaagttggtgctttgtttaactgatgacttttatgacattttccctactgaaaataatatgaaaagattctagttcttcctttcacaaacattagtttcaaaatgttgtaatttcatgaaaactagtcatatacatttcaaattctcaataagcttattaatactcttcccagtaactattggttgatgaataacacaacaatgatatacatgcatatatgacacttgattatactcttaccaaactaataatatataactatatatagttgttcttgaaacactgtatttaacccataaacgcataatgaaactataaaatttcaataaattaagaaaaactataccacaagtccccgccggcttatgctgagtatacagagtgaagaagtaacttacattttaaagacctggttactacaacagttatgaaaatctcattataatgcatatagatagacaaaaagaaccacaccttgtagaattttctagaatttctgaagaacaacagagttggcgagaccagcttcttcaatggtctgagtgagatcagtcaaaggcttaggtgggaaccccattgtctgaagctggtagttcaacgaggctccaggtcgagatgagtcaatgaaaccgcgaatgtcgttgaccgtgtgatggtgattgaacttagccaccagacgtgtcccatccgctagtctaagctgtatcgatgtggttggaacggtttcatctattacaagactttgagatggtgctggttcggtttggatgggaatgggagcggagtctggagccacaggtgagctacttccgctaccttcattgctaccacctagagttcttccaacaccctgaaatgaaaccctacgtttctgtctttcctacaataacaaacaagaccggtaagtcgattaaataagaccggttatcgcatataaaatctaccaagatttttgtaatgtatgaccaaaatgctagttttgctaacacaactttgagagactagtaacccaatatggataaagcagagaggggactcacagggcatttctcttcctttcgcatcaagttgacatgaaccggagctcttctatcggcaggctcaagctctttcgggcactcagactttcgaatgctctataagaacacaataactaaatcaataaccaaaaacaaaagatcaaaacagtttcacatgaaagtcattcacctcgagaaacgatgcattctcaggatcatccaatttcctcaaaggaccatcatcaatagtgaaaccattagaccagaaaacaatgttgtgaacaacaggctcaggctgttgattaccagtaggcacattttcaccagaaagcaatctaccagttccagtgaaactcctggaactcggaggtggctcaagaggtccttctacagctcctagttgtctagcttgattaaatatctcatcaacatcatcttttttcgatggatcttgaactaacataccactgcaacacaagaccaataaaaacattatttagacatgaaaccctaaacctcacaattaatatctagatccaatcatagcaaaagacgatccacatcaccattagtatcacttgcgaaatagaaacaagactgaccttttctcaccacctgtgtagtattcttgtggaccatcggaatcactgtcggagtcaggaccagacctacggttaagatcggaaagagttcggattccaccacgactactcgatggcttcgacggtttcttgtctttcgaagacattgtgttttttcagagatcagagaagaagaatcaaatctaaagaagtggagaagtcgagaagatatcaaaacgaacaacgctagagagacgttcatttgttatacgcgctgattaagcgcgtggaggttataactaatgtgtgtggtttgtggtgtctggttaattcacgtgggcgcgtgatatggtggaggaattggggaattatgtaacttaaaaaggaggaatacaaaacttagatttgttggtacttgtggttttgtcaattttagtaactttccttgtggagtgacgttttgttcttgttctattttaatattcctaagcttataatatcttcatattccacccccattaataccttactgtagtattattttttcattaaattttagaatcaacttcacaaatgagagggggaaaaaatctcatggtttcatggtttaacaccggtttatctacgctttaatgagagaatttaggcatcactaaggttacggttattacggttacgatttattaactaataattatagttacaaattttttgtaaacataactttaattattatatatacggttaaaacggttacgattatataaaattacgaatgaatacaattatggttaaatatgcttatggttatttgatggttacgatacatttaatactgaaggcaaaatcttacgtatcatccgacttttttttaattgcttttaagaaaatgaaaagtatgttgtagatttttttataagcaactttagttactttttgaaaatctttattcgaacatttgatatttatctttgcattataaatagttaaaattgtatttttaaggttttaactatgcggttaaccgtacggttaactatggttttaatacgattatggttaattgacagttacaattaatatatattttaacggtaattattctattttttacggttaacgattatggtttttaaccattttacgattacgattgacaggttacgattcggttttaatcataattgacaggttacgattcggttccagtttaaaaacaatacaattatggttcaaaatatgtttatggttaaattttggtcatacctagttagagtagaagtgttactctggttaaaagctaatgtcggacagacacaaattcagttcagatcggattttttgaaaactaatattttaagttgtttattactgattgggttggaccagaccagcccaacataacattttcttaagtgatcaataacaacaaaataactgaattaggccagacaagaccgaacaagtctagcttacggcaacatttccaaataagagaacatgataagatcgatggttgtaaaaatctcggaatgatttgaaaatttggttccaatttataagaatgaatcttctgttaggaggcaaaaactctgtcgtcttttaaaccaagtcaccatcgattttagtcataaaaaaaatgtaacatttagaactaataaggagcaacatacttttcccattatagatgatcatctcttcttctttggttctcctgcttctgtgtactctttgactagggcttcaacatctttccagaataaaccctcgacaagaactccatcttttgtgagcctagaatacacatacaaaaacaaaatcaacagcttacgcaatgcaaaggatatggtgtgagcacgtgtatgaaaaatgcagaaagaaagagaccattgagtgacacttttggtgaactgaaccgacttcccagctgagattgattgcggatcagcactgtcgatggttagagtgtactgatcagagaatctaggtaacttggaagataccaccaaaccagtgctggtgaatgatccctgcatattattaaccatccgaatttcaagtcagcaaaacaaccaaatatacatgtcctaacagtagcaaaatatatgaataatctgcaaaccaaattatcatagaaactgaaatggcaaaacaaatggagttctctagctttgttgcctattctgaccttaaccataatgagaactaatcaaatgttttgaaagatcgcattttttcgtatacaaattaattgagatgggaaactttttccagctgatgagacaaataacaaaagccacaaacaccaacattaaattccagaatcattttgaacaagtgtgtctcatataacaagacatcgccagaatcacaaataccaagagttacacgaacttccacaccccgaataatcaagatatcgacgaatcaagtaacacattgagaaaaagttggtttagaatgagtggagtgaaagggagatgtagcacctgctatagctcaaatgccaaacaccaagatcacctaagatatgagaactctacaacacatgtgaagctagcagaagaacaattctaagtggttacaaaacagaaggacatcaaaatatagttctagttatgaagagaaaatatgcaccgaatcacagaaacaacagtccctggttatgatacaagcaaaaacaagaatgtagcccaaaagcacacaacctaaccacattttctaagcagtcaagagaacaaacctcaagaggataggtgaacaagatagcgttcttctccttaatgtacagaatcagctgcattaccgcagtcaacaccacatacttgccaaagtcaagaagcaaacaaatcccacatcttattcaaaaattatatccaaaagataaagactttgagaaatttctctgattatacataacattcatacctaatagacattatagtatctcaaaatctaatgcacacaacacaaaccaatcaagccatacacaaggaaacaattatcaaattcaattcaatttcatcttaaccctagcaaatcaaatgggaatcaaaaggatataatccgatgcagcagatcaaaaagtctctgttctcaggaaacttcttgttgtagaattgagcaacaagagcaaccacgattataatccctcctaacagaaatttgacgttgcttaatctcacatcctccttgtaccctctgctcgtaacgatctacacagcgataaaggacaaaactttgatatcgagaacgaaattgtggggattgattgatgtgtttatgacttacatcggagacggattcatcaaggaggtgtttgattgcgatgtggtctaacaagttaacctttttaacgttcttagtcgcggattctgtcttcttctcttccatggcggatcgttacaatatcaaaatcttcgaagtttctcttgcagagtgctagatactgtcagatatagcagacgttttcggtaagaacgatgtcgtttcgtagagggagatattgggcctcaaatgggcttcagaaaaaacaagaaattattaagttcggttcggcatttctgtttaatttctggtcccgtttgtgttcgattcggttcgatttatttgggttttgtaaaattctaatcaaactcaaccgaggttagtatggtttggtttgggtttggatcaatctatgttcgggtttggttccgtttggcttcttcggtttggttttaattcggttttaaaaaactaatcattgtaaccgtacattattgtttgaactttgaatttgataatagttaacttaagcaaaagttttaataattcaaaaaaaccatgaaaagaaattaaaagtgcaaactatttcatatttagtaatatacaatattattaattaattaattaaataaatatattgggttgtcaattcggtttgtttaataccaaaccgaaccgaaccatttgggttgagaagaaacataaccgaatggtttgaatctaaacttgggtttggtttggatcggtttggtttagttaaaatgcacatccctattattaccgaaagaaattgattactcaatttgacatttgtaaagactaagagcgaatttaatggagaagataaaactttttagatttttaatgttacttttaatagctaaaagtggttacattgctgcaccataagtgtaatgattatgaaccttttatgatccaaaacatgattcaatatggaaatcaccaaaagaaccatctttttggagcagaaggttttggggactgatcatggtgttggttatgttcatgttcaaccttgttcctgttctccattccctgcttcagtgactccagtctttttctgtgacatccacacacaataaaaacaattagctttaagctaagaaacaaaccaaagtaatacagactgtagcacaaagggtttataggcttcactttcgataatgctaaaaatcagatttatgtacgcagcatttgggaaggactatgatgggttcatctactatcatgcagcatattaattccatgatattatattatgagcattggttgttttataaggttaggttttgttacagtacttggtatccgtcatccgaccgtgtaaactccatctccggcgaaatccttctattccttcagctccacttgctagaatcaagtgcctgattataaaacaaatgaactgttttagtgaacatttggatttaagaacatagtttcgatttgtgaacatctgtagatatacatgattacatggtagcacaaactcttcatgtaaagaaaatccaaaacaaaatataactgcattgttaagaaagagtacctctcaaaagatgtggcttcagcttcaagctgcgtaatcctttccttagcgagttcaatgggcatagacaatcctaacttgtgttcgctctcttgaagtctaactctcaatattttgtcctacaaaaaggatagaagaacaagaaaagtcaaggaaatggatgtggatatgatatgagaatgaaaagctttatataactataatccgagccgatggctaaacaacaattaccctcttttcagcacattgtcgatacaatgcaagctcatcttggcaaaatggttcaatatcattgatttgcaaacctaaaacaagaaaaaaaaaaaaaacaattctactcactgacagaagtaagggtagaattataaaccaaaccgaggatacatagacatacacaggaatagattcctcaaaatcccatcgcacaaatcaacaccttcaagcacatgtgaagcaatttcaggagggataacaggagatggaggacccgtcattaggtcatcaccgaccagtatagtctcctccatcattggttgtgaatcaactgaatattttgaaatcaccaatgttacagttctcaaaaaatggtcttaggattcaaaaaccatgcaacctcaatttaaattttccaagcaatttctacgcattgatggtaatgcagattgggattttaacaagttatactaagaagttttacatcatacaaaacaatagcaaagaacaaagctttatagcattttcctaagtttctacatctaattcaccaattcccaaagataagtgaagaaagggccttccttgaagcaaaaacaaaatcacaattgcacaagaatcattcactcaccatccatgactgctccgtatcaaatcacttcaagaactgaagaacaaaccaaacttgtaaaccctgaacattcatttataaaaaaagatacatcaaacagagagaaattgtaaaaacattctcagttaggcatttcatcgaacagtttctaggcataacaagtacatacccgttcgagaaatctgaattccgcaaagtacgaggagattcaacgcgtgaacaagcagaaagcaactagcgaatacggattagaaaaatttgataacaacaggaaatgatccgacgcagccgattaaaaacacagtccctcttctcagtgttactactagatcatggatcacggtattagctttgaaattacacgaaatctcgaccgcaggatagacgacaatatctaaaagcatctgacggtagtaacacgagtattgtctctagtaggtcccaccatgttccagttgggtttcttacatatagtgttgtttaaaagaggtatattttgtttcttcgctttcaagtctaaatcttcaaacacgacgtcgtttagggctggccataatattcgaatccgagctcccgatcggaatttgaatctgaaattttaaaatatccgaacaggtttatacttcaaaaccctaaaatctgaaaccgaatcagatccaaaccgatatccgaacgggtatccaaacatatctatagtttaaatgcatagtaataatatctataaatatttatatttgtaataatctaagtgtcaaaatatgtgaatttttgaatatttaaaatatttttaggtttttaatatactttttaagtaaatttgggtaaaaaatgttcaacgtttttagatattttgtttattttcaagtagtttggatcgatttggttataaaaatttaatttttgagaacttcaagtaatccgaatccgaacccgaaatatctgatccgaatccgatctgaacccgaaatcaagaattacccgaatgggttctacctctaaatccgaaaaccccaaaatccgaaatacccgatccaaacccgaatgggtacccaaacgcctagtactttcatatattatgaactgtaatttttacaacatcttcaggctttgatattgacaagtcaaattcacagaacagaagaaacttcctactgtctgtgtaagtaagttaatcctccgtaagtattgtttgctagatgaatattgtcactcaaaatcaagcagaggtttcttggagcgagcagcaaatttctgttccttctgctccgtgacactacgaagagatttgcgccgagcttcagcgctttccaagtactcttgtattggaggaagagtgatcttttgttcttctccaccggcttttgctcgacgaatcaactgtccaacaatataaaggttaatgatctgcagttggtgtaacatttagccatgtgtagaagacgaaattccgttttaacctttgaagcccatgttcgttctgctccttgacatacatctcgaatatctctgcctgacattctgcgtaaccatcaaaagtcaatatggattcatcacaaattaatcaggaatagaaagatcgggtggccttgaagttgatcaaataaaaagtttcgaactttagtttgatatggtaaaggaaagttggaaactttacgcttctgtggcttgagcaagctggactagttcaggctttgagagttgttttgcgtattgagcgatgatttcttgacgagtttgtaaatccggtaagtcaaacatgatcatggaatcgaaccggctaaagatacacagatgaaaaacataggacactgatcaggatactgcagccacgaattgaactgggtttgaaatgtttaattgcttacctgatcaaagcgggatcaagatcttgttttctattggttgcagcaatcacaaccacttttttttcttgttcaaatccatcaatctgcaaaaacatagaagcagattcatcagactggtaataactagtctctcatctcgtggatatgtgatattggcaattttgaatgtgttacctgccttagtagtaccgacaaaactctacgcgttgcttcatgcatctcactatcacgagagatagcaaatgcatcaatctggattgtgagttagacaagtagaaattttgaacatagtcaaattttgaaaggaaaagtcagacaacaatataaaaggagtaatattttcttcacctcatcaagaaatataatcgcaccatcagggagctcatttgcttgagaaaacacagccccaagaagacgctcgctttcaccatagtacttagacattacagcttcaagcggcacatacaacaatggtatgccctgacaaatatcgcaaaacgttagagctccagattccaaaaaaattgaaaggtcaaaaagggtttgcaagttatcgactactcaccgcctgattagcaataacacgcgcacaagatgtcttcccagttcctatggttagagtttatggacatcagattcaaatttgtttctacagagaacgacgaaattgtaaatgcactcttcttgtgctaacctggtggaccctcaaatagaacagcccgaggtctgttggattcaaatttggaccgtgtaccacgtacaatatcatcatacacttcaggactatgaagagccatcaatattgtatcttctatctctctgcatcatgatagaaactaatatattatatgccatattaatggaatacaaggcaaagatgtaacaaaagcttaccgcttttgctgatcatatccagcaatattgtcccatgatatctcatccatagaatcatccccaagaggtttattaactccatagattctgactcccatagactccaactgggagatagatttgtctgtagacgaatcacgagtgcttcctctactgccgcttcccttattttgtccagcttttgttccagctactcccaaagctgaaacaaaagcctcaagttcttcagtagtcaaacttcccttctttataaactcaacttcctaacacattttgaagcatcgttaagatgttatcaaacaaaagaccatttaaaggttgagtgaatattcgaaagagaactaaaacttaccactttatccgaggtaagtaaggaaccaaagataagaatgcacaagtcatcatctgaatcatcttcactctctccaagtttcttcttgttttccacactgcgaagtgttatttgccaagcgactggactgaggtaacaagaatggagtagagattaattttaactatagatcagtcttcaaatattggatcttggagaaaattgagtagagaaagaaaattacttgtcccaagcacgcaatagcatatctgaaccaccagtacgatctgagactttcacacctagttgggatccaatgtttgatattaattgtgcgacttcacaagtagaaggaacttggaacttcaacgtaatctaaaacatagaacaaacatttgtctcatcacaaatatgcatcaaggaacactcagaagttagtcatatacccaaattcttgaaactagagaaacaaaaaaagagggatcattgcggaaaccttttgacctcttacagcaacattgaaccgtgggtaagaaccatattgagttcctttactttgtataagttcttcaactcgagctcgttctttcttggcaatgtctacatagtttggtggaggatctattggggcagatgacgtttcgtcattaggatctattggggcagaagacttgtcattattagcctgcaagagtcagtaaaactaactgtgttacataaaaggacatctatcaacagttcaacaccaatgattcaattttgttgtttttgtgttgtgttacaaaacctcatcagattcagcataagctactccaattactccaacgctaaagagagcacccaaaactgcaggtgccatggaaaagtatggagaatcgtttagggtgctgcaagatctcaagacttgatttacttttgaattactctgctcaaagtttcctgcaatatcaaagacccaaacttttaactaagagacaaagattctacttggacagagaagtagtatcatttcttcatcataagtacatgaccaaaaatcaaaattaagggatcataagacaaaacagcttcttgtgttctcaattccccgaaagttccaatttttaaactaattagcaattcttacaatcaaatggattcactcgaaatcaagggatcaccaaaaattatctacaaattgaattcgctagagtaccgtggtggaaacagcgacgaagctctcgtgcccgtggtgattgcgaaggaaccatggatttagaatgagagagtgatccgcgccatgctcgagatgctcgaaacaatttgtccagaatcgccattggagtggttttacacaattcctcgagcttcaagggtttatgaggttttttaaggatccgacagtataaaactggttagtaattcacagaaaaaaccaaccggttctgtcaaggagaaccggcttaagtgggcctaatctgattacgtttttttttttttttttctctagtcgtattaatacagtggtgacatccatcacatgaaaattgataatccctgttaaacttcaacatattagactaaaatttagacttaaacccgattgaaaggactaaactctgtctttgtcaacattcttaatcctgcaagatgacaatgcatgagccaaaaaattccttcctttgttcctgttaaacataccaaaaacatcttgacagactatgtagagtgagttatcgcttctttgaaggcaactgaaaacctacctctttctcctttgtagcttgttctcgtttagaacattctccgatttcaaacttctttaggaaatgtgttcatgaatcttaacactctcattcgcaaaaagttgagcaagccattgaggatgtcctcttgcaacatatgattgcaggcgaaaccctgttaagacactgtttgctatctcaaaagcacctttattagcacttggttgttccatgataacaaaccaatttggcttgttctttgtaaaactcaacaattcagctatgtgattgataatagctagccattctattggtttgtttagagcttgaatgacttcaaaacaagaagccctctccaagttgtgccaattcataccatctgagtccattcccaacttttaagttttgctttcaaacaaaaagtgtacctagagtataggcttttcaactatggagtaaactgaaccgtatgaatccctaaccacccaggcagctccagatagaggttttttccgaaaccatgcaaaacctatgttacattttagctctccaaattgaggtgcaatacatctttgttccagagaatcttgagctccagtcaaaggaaatccatttctctgagccatccaccattgatgtccttcttcaaaagcttttgttcctgtttttccataatatccataaaatccaagaattaacatatccgatgtcttgaggaactgtctaggcctgtgaaatctgcaccaagtgattcatattggaataaattgaatctctaaaaccatgcactagatatggtacattcaataatgcccatacttgtcttgctaatggacactgaaatagtatatgactaattgttccagtgtcctcttcacagaacaagcaaccatcttttggattcacacctcaattttttagcatgtcttctacatcaagagctcctttcaaagctttccaaataaacatcttgatttttggccccgttttaatattccatactttttcaaataaaggacttagagatggtcttgattcagcttccgtgaagagttgtttatgcgttttcctgctacacaaatcataaccagatttcacagtatataatccatttcttgtgtgatacaagaaaacaagtcttttgcgagggaagatcccatatctaatccctcgcaaatcgctattaccgagggaattgcgacgaatgtcaatttctcgcaaaacgcttgttgcaaatgagaatcggtagtaattccctcgcaaattttgcaaaggaataaatgtctcgctattcactcgcaatttgcgagtaataataaatgtagcaaattcattgcaaactttgtgagggagttgcgattcatttatctgtagcaaacctgcgatagagttgtgagttcatgtattcgtagtagcaaatccctagcaaattttttgatggatttgctaggtttatgcgacgctcttaattattttgtaaacgtaattactgttgtgtttagcttaattaatgatcttcttaattggtttcttaatttaatctaatcttaactttttatttaaggtaagaaactaatttggaaacttatttgaaagcttaaactcataatttaaagactgaaagtagtttgacattcaaatacaattttgaatctaacaaaataattatacaatttttaaattgtctagggtttgtgatgagtgaaattaaaacagagtgtagcaagtgccttagaaagtgtgagatggagaggatccagtgtttgcctcagctccaactgtttcagcttcgacagtcacatgtgcgatcccagcagatgtagcagttgtggcatttggcacctcaggtctcaggttggatctgacaggttcagtcctagaggatctggctcgaaagagggcagtgaattgaagtctggatctttctaggcaaggtagtcgaagtacacatcaaagctagtgatcttctccgcttggtttgcaattagagcttctgcggcagccagcttttgagagagttcaatcgaatcttctcgaggaacagaagaaccaatgtgagctgatgaggcttctagctgcaatgaaccagccccatatatcctccctttcttctttggagccacctaagagaaactcaaaaccaaaaacaaatgccaagtcactataacataatgcaaccaaaacacacaaaaacaaatcaagacaatgccgagaaactattacataatgcaaccatgataagctaagtcacaatgctacaatgctaagacaattgcaaccaaaacacacaagaaccaagtcatgacaaaacactgaacacaatgccacgttacaatgccacaatgccaagttacaatgccacgttacaatgccacaatgcgaagtcactattagtaaatgcgttgacaacacacaaatacaaagtcagacaaaatctaacaacacaaagccaagtcacaatgccacaatgccaagtcactattacttaatgcattggcaacacacaaaaacaaagtcagacaaaaactaacaacaaaaagccaagtcacaatgccacaataccaagtcactattacttaatggaaccgcaacacacaaaaaaaaatcaagacaaaacacttaacacaatcccaagtcgcaattcagaaactatatagaagagagagagagagagagaatttacagcagcataaatcttgttcttggcctgaacagataaaccccctgaagctgcgctctccgtcgtgttgtcggaacacagctgaaactcctcctcttgaatcctagatgacacttcattgtagatctcctcggatttttttatcattgaaactaccatcaaattttctatgtgtctcatctaagagcaaaagaaaatcttgagtagtttcaccggtcatctcacactaaaacagaacaaatcaggttagttgtttgtgtaaaaaagttgactaagtaagggtgtaaaataacttacacgttttttggcacgggctttgtaagatgtctcgccagaccggtgtttatgaatcccgaggccatcaggatcatgatatcttgcattcctactatcgatactcttcagttctgacttaggatctcgccaaaaactaacaagaacaacccacactaatggatcaaaccaacgagggatcgccgcatctcccttttctctccactttcccttccaccgagaaacttgatcagacatcctatccttcaacttagcttcaaactcaatcctaactctcttgtttattgcacggtcccagttatacacttgctacagaacagagaaaagacacataaaaaattagttggacttacagcaactaaaaagctttacacaacaaaacatgacaatttagttgcacttacagcaaaggtttcataccagcgatcaatcactggtaagggtgtctgtgtccaattagcatgaggttccttgaaatctctttcaaagatgctccagacaatggatgcaactgcatggtcatcgtcaaacctacaaacacaaggctccatcagccagacaaaagtgaactgagactagtcctaaatattcttaaggtgacagacaaaattggcttaccagagagttgcggaggacggttagtgtaatacctctgactatgactaggaatccgtcggacggtcgcgaacgtagaattgcgatcgtaacttagaaaaatttttgataagaaaatttagacggagttgtggataaatcaaacattacccgaatgatcattgatcaaagaaaggttacataaggaactcaagatcagtttagaagagagtagagattttatcggctaatgctacatatcaagaagattaggatcgactattatcggcaaaggcagttaaggctatcacagaagttattaggactatcaagattcttgtcaatagacctttttgggcaatttggttgatggaaagatcaatttgccgaggaaaataaaggaagtgcggaagactagtttttatcggagaaatctagttttatcgagaaatagtaattttaggccgagacaagcaagcggtgatcgaatgggattggatgcggacacaacaaggtttagtggagtatttaagtgacttagtcattttttagaagaatatataatgatcattgtccgcgtacgatggtcggagagttctcggtacgggcgtataccgtgagtaagcggaacgagtgctcgtggaggggccatgtcgtaagctgcttgtgcagctacttgtgtaaggataaggatgggcgttttgatgaggataagtattagtttggataaggataaacatggtttttgataaggataagcatgagaatggataaggttatggataagccctatccattactttgcttgcactccaaggaacgtgacttggtctccaagtttcccacacctataaatacccacgagatttcacttgtagttcattaccatccacaccaaaacctttagcttaaaccgttagatagctagttagtccgtcgagtccgagtcgggtagaagttggtcgagtcgggagtcgtagtcgggtattaaggtaagtagttccgtcctcagtcttttattctttttagaatatttttcttaattttgtttttggtccgacgcttagatccatcgttagtacgcgttggagatagctcggtcggatcaaaattattaggcggtcaagggtagaattctactctctcgacattaaggctaaggtgagtaccgtagcgtgtgtagtagcacatgactaggttttaatttgggttatgattgttaggcatgaggttgaatttttatacttagtataattcatgcatttattgttgatagtcggatctacgtttttacgtatgatcggattggttgtttgattagatcttgcattcatgcttcatttattttgggatgaagtatttggtgtgcttaggctagacattagtttagccattatgtttgattgtggtaggatttactatcgtatttatttgcggtaattgttgtttgtttgtttgtttgttcgtaatttttattacgaattaaattgttagcaagcatgttaggttgtttgattgttgattgattgattgttgttggttaatcttgtttcggcttgattaatctttgtgtgttagttgcttgctattaggttttattacgagtagtattaggttacattaggctcgtagtaagtaatgtggttagtcatttttatgactaaggtgtgacgatgtcgtgattgtcccaatatctcggaatggttcgctaccacttgggactacccgacggggtagtaaaagttttaccgtaagggagttggtcccttgtacacggtttgaattggggaagggatgcgatcgttttagactttgtgtctagcggtcggagacattgccttgtgggaaatcagcatcgtatagtatagggcccgtaggatgaagagtcgttagcgtgctagttttagctttagtagtttccgctgcatatactctgtaaagagtattcattgcttgtttgtttgtgttgtgtgatttcttgtcgagtatactcaattgagtatactcgtactgattgtttgattggggattgggattgggatttttgttaattgttagaaacccggactcactgtgtaatcttagattactcaagattctgcttttgtcttacaggtaaccttagttggggagacctaaagggagcacggacgttggggaaccggtgtagagtttgttgtctttgtaaaattagatttgtaaattgactcgatttgagcattaggctcgggatcgcaatacattgtaagtattttaatgttttattgaataaagaaggtttttcttaaaatcgttgtgtacttctgatattagtcttgtccggactaacataacttacaaacatggtacgggttgaaaagccttaggccgtgttcgtgaggaacgatgttcgaggatggcctgaccttggtgccggatgtgttctaggaactcggtcggatcgtctacgggcatcaaaagtaacgcttccggattcgtttttagtcctagaatggttcgggggtgttacagttagggtccaatctcggtaaacttgcacgaccaggactttcaagtaactcatccagagtcatgtcgataggccgagaagctaaaggagtaccatgattgacagaaccgttgggggactaatttgcctgttgaggagacgcaccgcctgcttgggggttgacattgataagcggctgaggtccgccggtttggccattaccctgaatcgcagaagagttcccttcactgagaggcgtgcttggacgctgttgagaccggaaccttgaataatcgtttacaatgaaaaagaaatcattagtagtcaaaaaataatcaaaccctaattagatctaaaccgaaatccatcgaaaacacgaaaccctaattagatctacaagaaaaacctagaaaattaagaaaccctaaatagatctaaagaactcgtgacagatttgcatgtttgattgaaaccctaattagattagagacatagtaactcgtttgattgaaaacctaactagatcaagtgaaaatcgatgtaagaactgagagattagagacagagaaactcgtttgagtgaaaccctagttagaacaagtgaaaatcaaatgaagaactgagagattggagacattaccttgttcgtgggacagtagaggcggggaagaagacacaacggagatcgggaacaagttggagaagaagaaatcggctgggtctgagcgacgatcctgaactagccggagaacacggtgacacagaggcgaggtggaacggggccgaagacgaagaaaggttcaagagagaagaaaaaatttagggtttgtttgggaagcggctgggtttgagattcgctcaaactcagttcgctgtgtatatataaaaataaaacgcctcataaatccctcgcaaatttgctagggcttcgcgaagaaccgagaaaccaaccaatcaaattgctccaattttgcgtgggatccgtagcaaatccctcgcaaaattttagggttacacggtgactcgattagggttttcagtttactcttcgagggagttgcaaggcaatgtagtaaatctttcgcaaattgctagggttttgcgagggatgaatttaaaaataaaaaaagtttataaaaataatgataaaaagaacaacaaaatgcaaaattataattatataaactttaaaattagataattataactttaaaattattaaaatcattttctgaatttatttattatatacttgttaattaaaacatctggaacgttacaatagataacatctgaatcattacaatcattttctgactcaacgtcttcatctgaatcgccaaattcgtctgattgttcttcttcttcggaaccgtcagtgatgatgtcttataattctctgttttgtaggtcaatgtggataacatcttctgtggttatgtctcgtatgaaaacttctctaacactttcttgttgcatcacaacatcatcaactagaccgactatacggcctctgggattaactttaataaccgataacgacacttcacgtttaggcctcacacgcggataagatagaaatcttacttgccctgcttgtgatgttaggatatatggttcaaactttgaataagtcttgtttgcattgacatcgaccacgcctaagttatttacccgtacccctcgaccacacctaagttatttacccgtacccctcgtccgataacaagatcaaaccaatcacacttgaaaaggacgcatttctaattcaaaagtctcggatattcgacttcaagaatttgttgcagaatctcattaaactctgtttcaccttcgacatggattccataatctgcagttgcccttcgactttcatttggatatgtatgaaaggtatagccgcgagtgaagtacatcggtgtggttgtgatcttagatcttggtttttgaacgatctcatgcaaccaaagtggtaaagcttcacttccacatccgttagtaacctacataaagtaaatattatgtaagtttatcatttcaacataagtaattaagatatcaaattttcgaaatattacttacatagaattttaaccatctggcaaaatcatgatctttgtaaatttcatattctttatcttctaatccaggatatgcttcacggatttgtgaatcaaacaacctacaaattaaaatgtagatgcttagcttctttaattagtccttaattagtatcacactaattattaaatataaaaaattatgaataaaatttgtctggctttgtacctctcaaattttttaatgtaatcaacatttcggagtatgtaattgtgagctgctctagaaatcgcatggtcatcccaccaaacttctttcgacttctctgcaagtctacctatttgggcaaagctatctggaacatcaggaacgttatatgtaggtgcaacacctccatcgtcatatcgtcgaggatgagtctttttggttctaacgtttggactaaagtaatacgatgtgaagtgagacgtttcctcggttaaacttcctgcgactatcgacccctcaactctcgcaagattttttgccttttctttaagagatttcatgaatctttcaaaaggatacatccatcggaattgcattggcccaccaagagcagtttcatgtagaagatgaatcggcaaatgttctatcacgtcaaaaaaggcaggagggaataatttctccaagttacagagtaacactgggatattcttgtctaattgttctatgacatcagttgtcaatgttcttgtacataggtccctgaaaaatgatctgatgcctatcatatatcgaattaatgtaagttaatagtcgtctattaataactgagttaaagaatagaaatagaatctatatatatatttattacctgcaattgcttcatgaatatttgcaggtagcaactctattaacacaaatggcaataatcgttgcatgaatacatgacaatcatgactcttcatacaagaaaacgtttgaccttgctctacgcattgtgagagtcgaaactcgcacaagagaaattgtattaagggtttcttcaaagaacggatctttttgagtttctcaaagaacaacagaattgttgattaccgcggacggtgttcttggttatattattgaaataatgaggattcgatcgtacaagtgtttagaaatatgaaaataagtgttttgccttcaaaatcagagcgtttttgatatcctgaaattaagagcgtttttgtgcgtgtctttttctttgtcctcagaagttctttatatagggctttatcagatcgcttctcgcgatattctcggaagatttctccttatcttagagctagcgaaggagatttgtctttatcttccgaagattctggaaactcctatatttggtgatatcgtcggagattctctaatatctcttccgggtttttcggaaatggtatgttcgatctcatattggttaagtcatttcttgaaggttctgtcccgacctgatgttcctccgagccgggttgagttgaccctcaggttgtggttgagcggctcggaccttgttagtcaaatgatgcgctcccgaggcgtcttaagacccacctcgggatgactttccgggttgccatccgaggcgcttcaagaccgggtcggggaatcctttgtggtgatgctctgaggcgttcttgatgtcgcctcgagatggttccttgacatgatccccgaggtgttttgagtcccggctcaggatggttcttcgacaagatctccgaggcgttaatcagggtcggctcggttacctaggtggaatccgaccccaacagtttgccccccagctcattgtcttgacggaaagccgatgagtttcacggatgggttcccgagccgactgttcatcttcttagatctaactttgtcgcttcatcttcccggacggtcaaacttccgttgcgtgccgacgactatttttgagaagtggaaaacgtttctcgcttattcccgaggatcacgcgggtgtttccttctgtcgagcccacgcgcttaaacgcgttttaattgtttgttgcggacccgacgcgcctccaaaaactctatatatacgacgagccattccttcgggagttcatttgaagttttcgaagaaaataaacgaggtttgcttccttctctctgatcttgatatttctatcgttctttcttttccggtgaagctccgccgttcttttgttatttttgattttttcggtttagaaattcttgttttctggtcgtttctcatctcatcgatcgtccctgagccaaaaatgagttccagtcagtctctttcgatcccgagcgcttctctcgttgattccagcgactcaaatcatccagacgaccttcccccatctacaaacggagagcggtttggacgtcttttgaagatgatgatgtatcttcttcgagtgcctccgagcagatgagaagcgcctcgcagaggcgggattgatttcgccgcgggcggcctctcccgatgcgactcatgaccgggacgttgctcccgatgttgtggccccgattgacccgacgcctgctgaggctcatgaggtcgatcctactgctgttgcgcctttgcccgaggcgattgtcgcgctacctgcgagtaagcgcgttcggacggatgattcatcgtccaagaagaagagcaagaagaaggcctcgagtaccaaggcgggaaaagagcaccccatttttgaagatcgggtagtctctggaaacctcctcggggtgtgtgctggtcctttgctttctcctccggatactcttttggagtcgcggaagtatgctgaaacggtgtcccatttcctgcgggtaagtgcctattcaactttttcatttttcatcagtctggagctccgatccgtaattttctttctctgttctctaggttgtcgcctcgatgaaccgaatggtgcattcggacgattcggccatgaggaataacatggaggcggccaacaggttggccgatgcagatgctcggatccaagctgtcgagcgagaaagagatgaggcgctctcctaagctgccgcggcaaagatggcgaaggaggaggccgaaaaggaggccttcgtgaacaaggcgaatgccattaagatggccgagctgaatttgagggcggactccgaggtcgttcgtctcaaacgcatgctagccgaggcgagggggctccgcgatagcgaagtggctcgggcttctcaaacggctaggcgcgagaccttaaggccgctgagcagaaggtgtcgctccttgacgggatcaacggtcagtttatgtacttatcccaggcgcgggctaatgcgcaactgatcaagacacttgaggaaggtggagtgttggcgaccgagaaggaccaggttgaggaatggctgaaagacttcgccaatgccgaggtcgatttcaccaattttatcgccgagctgaaagaggaactcaagactccttctctcgaccccactcctttaagtccgggtggccacaggtcggtcgagactcttgccgacgaggcgggggtcaccgatcagtctgggtcacttctgcctgccgaggatattcgcccgtctgaagagctcgactaagtagacgacacgagagccgttttttgtcatcgtttttttttttttttttgttaatctgttcggtttgttgtacttgtgcctggatggctttatccaacgatttgtagaacctatgcctggacggctttatccattttgcaatctgaaatacttggttggattctaaaaacaaaacccgaaccgttttattgcctgatatgattcagtttaagtattttgcgtgaaacttctcggttgtgacccgatccgattcaccctttcaccatcgtttagaaacgagctggggtaccggtgtttgtgtaagaccgggtttctgaagatagaaatttcttcttaaaattaatctgaaagaatttatctcatatttatatagcgcgctgtagccgagcaggcgtaaaagatactacgagccatcgctcatcgtatttagccgaagcgttcaaaagttgtgaatcgaatttattttttatgccgaagttagtacttatacaaaataataaatgggagtatggatatacggacccactcccccccttattaatgggggggggggtagctgaactcgtccgaagatgagctgcctacgtacccttttcaaggatcaagccacctcgttgttcaagtttagtcaccttggatttagttgtagtatttccttaggtgcattgcgttcctggatcttagaacggctttgccgcttaagttggcgagctcatatactctgggtcggatgaccttagagattaagtatggcccttcccagttcgtcccgagcttcctggcgtttggctcggcggtattttgaaaaactttccggagaattcgatctccttcatggaatctttgttgtcggacgtgtgagttgtaatgccgagccgtttcattctgatagttttgtatgcgaaccaaggctgaatctcttcgttcatcgatcagatcgagttcgtcgaggagcctgtgagtattatcggggttgttctcgggagatagactccgacgtaggctcggtactatcatttcggctggaattacgcattccgttccgtagactaagacgaaaggggtttctcttgtggctcggcgaggagttgtccgatgcgaccataaaacaccctcgagttcgtcggaccacgagccctttttagcatcgagccattttttcaagccatcgaggatcgttttgttagcggcctcggcttggccgtttccttgggaatatcgcggtgttgacttgctaagtcgaattccccatttatcacataagccttggaagcgggttgatataaattgcgagccgttatccgtaacgatctcgtaaggtatcctgtggcgacataggatatgtttccacacgaagttctcgatttgagtgtcctttatgctggcgtaagattcggcctctatctacttggagaaataattggtcaagacgagaactaactttttctgcttcgagggatgcataggtccaattatatccattgaccaccgcatgaatggatacggcgaggcgattgatgacaagagctcggctggttgatggattgttggcgcgtgcctttgacatttttcgcatcgttttgaaaacttttcgcagtctttgatcattgtcggccagaagaatccgtggcgttttattttgatggctaaggctcttcccctggaatgatttccgcacgagccaccgtgaatttctttcatgatcttgcaaaccgcttctccttcaacgcatgtcattaagggtccggataatcgccacttgtagagtttttcatctactagaacgaaacgtgcagcctgagctttgagtttccgagggcaattttccttcggatatatagcttttgatgggttctatccattctgagttgcagtcgtctgggctgtcttccggagtgtcgtcttgatccgcgccgatttgtattgggaggacgtgttcctctttcccaaggtcaatgcttggtttttcattgaaatctactgggatgactcttctcaggctcgggtcagatgtcgaggctagagcggctagggcgtcaaccgatgtattctctccacgagggatccttgttaactcgaattcctagaaattctttgccagattttgtacatgagtcaggtaggcctccattctttcgtcccgatctgaatattctccgttgaactgattcgcgacgagctgtgagtcgcaaaaagctcggattttctctatctttagcccccgagctaaattaagtccgactacgagcgcttcttattcggccacgttgttggtgccttcgaagttaagtctaaatgattgctcgagaacctctcccgttggcgaagtgaggcggatgcctacacccaaactttgctttgatgacgagccgtctacgtgcaatagccaagttgtatcgagtggattttcccgggcctccataaagggcagtttgacgataaaatcggctaggacctgggattttgcacatgttttgttccgatactcgatgtcatactcgctgagtttgattgcccatttagctaggcgtcctgattggcttggactgtgtaagatggcgcggagcggcatggatcccattactatgatggaatgggattgacagtagggtcgcagtttccgagccgacattatgactgctaaagcgagtttctccatttgcgggtagcaagattccgcaccggtgaatgtctgtgagacgtaaaagatcggtttctgttcgcctctgtcttctcggattaacactccgctaactgcggtatctgatacggcgatatacaagtatagtggttctctgattacgggttttgcgaggataggtggtgttgccagatacttcttgagttcctgaaaagcttctccgcatcgggtcgtccattcgaatttcttgtttccccgaagcacatcgtaaaaggccaagcatttgtcggttgagcgtgagatgaaacggttgagggccgcaactctttcggttaggcgctgtacttctcgcttgttctgaggtgatgccattcctaataatgcctcgatttgcttcggattcgcctcgatgccgcggtgcgtgactaggtacccgaggaattctccggatcttaccctgaagcggcacttggctggattgagtttgacgttgtagaggtttagctgctggaaacattcgcgcaaatgggacacgtgttcttcctctgccatggatttcaccagcatgtaaacttctattgtcttcttgatctgtaatgcgaagattttgttgacgaagcgttgataagttgccccagcgtttttgagtccgatcggtagcaaaagatgccttgttccgtgtagaatgcggttttttcttgatcctcggggttcatcatgatctggttgtaaccggcgaaagcgtccatgaatgatagcaacttgtttccagaagttgattctacgaggcgatcgatgagcggtaatgggaagctgtctttcgggcaagctttgttaaaatcggtgaaatctacgcagactctccatttgccgtttttcttttttactacgaccgggttcgcgagccaatcgagatattttgcctcggtgatggagtcgatccttagtaatttctctatttcggctttcacggcttctgctcactcccgacccaattttctcctcttctgcgtaacaggtttgaacgttgggtcgatgttgagctcgtgtaatacgatgtcaacacttactccgggccaatcttctggggaccaggcgaatgtattgacgttttctctgaggaaagcggtgagttcagctgttaattcttctcctagatctccgccaatttctacgcatcgctcgggtttttcatcgtcaaggcagatagagattaccggattggggattgattttgtggattcccgagcctccccgatctttaactgctataattgctcggaaattgttttctcttcggctcgaccaagcttagccttcttacgattcgcgtcggccgttgactttgtgacggggttccttagcttgtgtgctgccatgaagcagattcgagcatttttctggtttccccagatggttttcacgccgctgctcgtgggaaatttcaagcaaagatgatatgtcgaagcgacaactcggaattgatttaatcacggtgtgccgatgattgcgttgtaaacggtcggctggtcggtaacagaaaaatcgacaatttttgttacccctttggctcggactggtaacttgatggtcctgagagtcatagtggtttctcggactggtaacttgatggtccagttctggtcgcggagttggtacaatttgcgtcaagtcgatctttatttctcgtagccttgtcagaaaaatgatgtccagtgtgcttccggtgtcgaccagaactcattcgacgttgaaatcaccaatggttagtgtaatgactaaaggatcgttgtgcggacgatccaaaccgttggtatcgctttcatgaaaagttacttcgtcatctgatccgctaaatggccgcgtccagttatgatttgagtcggccttcctttgataagctttgattgatgccgtcgtgtcttgacagaaagccgaatctcctaaaattgtgaagatccttcctcgagcagcttctggttcatcgtcatctgcttcgcgattgcctcaacctcttttagatccttcgagattcgccgcgggggccgcctgctcgggattggccacagcatagacctgctcggttttcgccttctccgtttctaagtcccctatggttaagcctccaccgatttctccgactaggaattttgctgccaactttgccccgaggctacgacatctggaagtatggtggccgtaactcttgtgtaactcacagtattcctgctcgtttcttgcgggttggtcattcgtccaagtgtaggattctcgcccgcgtcctcgaccgcggcctcgtcctcggcctcggggtgtatcagcttggtaattgtgggcttcagagaaatttcgtccttcatggtgaatgaatgtcccgtcttgagcgccctttttgtggttcggagatctgaattgggatttatcgctacgaggcatttgcttaggcggttcatgtctttttgatagtagttccatttcttcttcatgggaaacgtaatccgaggctcggtgtagggcatctctgattgtctgcggcttggacaagtttagctccttccgaaattcggacttgtagcacagtgctttcttcagagcagagagagctgctacgtcgttgattccttcgactttggctagggtagatcggaattttgcgaggaagtctcgaagtggctcatttggctgctgagataatgaccatagatcggcgtctgacgtggatcgattagcatcgaatattgctttaggaagagcgtcgatagctcctgaaaactgtccacggaatttccctcgagtcttgagaaccaatccaaagctggtcctttcaagtgttcgacgaaaaggtgaaagacaccggcgtctctttcgtcgggtctgaacttggctcgggccacggagattatgaatgactttaagtgtcctttcgggtcggaggattcactgaagtattcaatccttagctttcctggatctgagattattgtgttggagatcgtgcgtgtgaaaggtgtgttgtgggactcttccaggatgcgatcgatgttcggggccgaggagactgcgttatgcatttgggatctcacaagcttcatctcgttttctgccttggctagggagagcttgatagcgcttatttcctgttctctggcgtactcctcagcccatcgaacgttctcttttgaatcttcatcgtccgagaccccgatctgattggcctcgacattttctgctcagggaggagggagctgcggatcgtttccttctgttcgattcgtgtctcgat

SEQ ID NO: 527 - DNA, 105830 bp, Arabidopsis thaliana
gcttctttctttaaattcaatttccattcagagcgacaaacatgagtttaccttgtttcattccaagatgagtctggctgcaagatattcttcagttttggttcgagcacactcaaggtttattcttcgctcttactttgtctttgtgttttcagttcaaagagcttttgtagatattatctttgttgagtaataaatatagcattaccaaaaaatagcaacacgaaaatcaaatatagtgttgaaaatatagtcattgatgtaatttagtgtcatttgaaaaagattgtgtgtcgtggatagcaagtttcgaaccttgtttaagagagtttcagccacgcttagaaaaaaacatataacaaagtagtttattcatatttgttattttagaatatgggtttgcacttcttttaagtaactcttccacttttgtatttattttactaaactaagtttcaccactttcaaacttttccacttctttcattaagtggcctttcagtctcccacttaatctattgtcatttctaaatagaaaaatataaattgactttgtaaaattacttccaatagatacacaaattttaacacaaagagacctttcatcttgtatagcaaaaattaattaatatgacctttgttacaccacttccacacacattttgacaaaattggttatccccattttacccaatatttaacaagttcatactagagttttccactttagagctttatgttttataaatgtagtgatctgtaacactaatttacattcacaacttgattacttgacttcacagacatgaaagcttttgtcatttaatctgaaaatgagatgattttccacatttgtttcattttccacgtttgaagttttacaaaacgtttgtttctcctaaaaacacttgtgtcatccagactaaaaaaggcttttcatgagtttaagaatgaatttaaaattcataggcgaataaaagtaacttctaatggtaacatcttatcagttggtgcatcatagcacaatatcctttgttcaagattcgactttgtctttagaaagtgtttcacctgcttctctatgtcttcgtcatcataagaaatttcaccaaacagtattacttccaatagatacacaaattttaaaacaaagagacctttcatcttgtatagcaacaattaattaatatgacctttgttacacaacttccacacatattttgacaaaattggttatccccattttatccaatatttaacaagttcatactagagttttccactttagagctttatgttttatatatgtagtgatctttaacattaatttacattcacaacttgattacttgacttcacatacatgaaagcttttgtcatttaatctgaaaatgagatgattttccacatttctttcattttccacgtttgaagttttacaaaacgtttgtttctcctaaaaacacttgtgtcatccagactaaaaaaggcttttcatgagtttaagaatgaatttaaaattcataagcgaataaaagtaacttctaatagtaacatcttatcagttggtgtatcatagcacaatatcctttgttcaagattcgactttgtctttagaaagtgtttcacctgcttctctatgtcttcatcatcataagaaatttcaccaaacagtatttccttccccccccctcccctcacgtttgcataaacacctatcctcgttgcacattgtttagtacgtatattcgttatgcagaaaaatagactatttcaaaatttatttatgtgtaaaagcatatcaattgttaatctgaataatgtgtatgctactttaaagacgagagtttctagattggataattcttgaatagatatggtagatttccactctacacacgatacaatagttaacaacatcaggttgttgaatacatatattgtttcactacagtcattaaacacctgaaattaaaaccgagttagctatatcataactaaataattttcagttgttaacttttgtcaaaaagatgggaccgaccttaagattgtcacaagacaagtaaaggatattaacattccatattcccatgagaaggtttttcaaaatatttttgtctttgagtttcaaagtaagttgttcttaacatgttacatgtatgatatgatcatgtgtcgttcgaagttcgagactaaattcaacaagcgaatcaaaacttgcttgttgatactcatcacccatactatcaaaatattctatgtataccatatttggattatcaaatgacagtgacacattctcattagcctaattgccactgtcatttgataactcaaatatggtcaacctagaatacttcgatattaagactgataagtatcaacaagcgagttttgattcgcttgttgaagctagtctcagacttcaaatgacacttgatatgttcatacatgtaacatgtgaagaagaatttattttgaacccaaagacatgaatagtttgaaaacctttctcatgagaatatgcaatgttaagatcatttacttgtctctgtgacactttaaggtcagtcacatcttttttgttaaagtttacaattgacaattagttagtgatgatatagttaacttggtttttatttcacgtacttaatgactgaagtgaaacaataccgatattcaacaacttgatgcaattaactattttgccatgtatagaagggaatcacttccaaatctactcaagaattttccaaatctagaaagcctcttccttaaagtagcatacacattcttgatattaacaactgacatgattttacacggtaaatgtttttgaaacggtctcattttatgtttcatggagtgcaacacgaatatactaaaagatgtgtcgacgaggatgagtgcttttgaaaatgttcggatgattgtggtggagggagaggtggtatgataagagaagtcttttgctcataaaagtagggtgctaacagttcacaatgactttacaatctatgtggctccttgaaacaataaactatggattcgcataactaatggaccatcttcatattcacgaatgactaaaatatcttaactaatgcttaaacattcatgtttcaccagaatgacaatacatgaaacatgagtgtcaataatggctttgtattgtaatgggtcgctggtttagttgaagttccagtagcacataccgaaactacattccttttccatggagtaattctgttttaggatatttttagggtttttggatcttgtattagaaaaaaaaaaacacaaacacaataagctacttaactagaaaataacatcatcatatcatttgactaaataaacaaaacacttcttcgtggttttgttgatgagagacatgtggatgtgagagactactctttatccaccaattgttcctttgatgaatggatcaagatccttatctcctgcgatcaccaactatcaatgcattggagtaatcctcttcattttcttatcattgcttgtgtttctaagtaactcaataacctatgaaattaggcactttaggattgaaggcgtgtagtcaacaacaatagcaccaagtagaccatgttgtagatactctagtcttgagttgtatgtgaatacgacccactagaaattgaaataaacaaagaaatttcattttttgtagtctaatttgatgaaattttatactgatattgtttctttgtttctttcagtttccagtggctcgtattcacaagcaacttaagaccagagtttctgcacatggtactgttggtgcgactgatgttgtctacacgacttcaatccttgaatgcctaactactgaggttcttcagttggccgaaaacactaacaaggatttgaaagtgaagaggataactccaaggcatttgcagttggcggttagaggagatgaggagcttgacacactcatcaaaggaacaattgttggaggaggtgtgatccctcacatccactagtctcatcaacaaaacaaccaaggagtaatttgtttcttaagtcaactaatatgatgtgatatgctagttaagtagcttatggtgtttcagttactctagttttggatcggataagtagtttaagtgttaagtcttgagacgtaaaatttttacgtctcatctcgtagacgataggagaagtcttttgctcctagagttctggtgctaaacaattcacaatgatatgcaatccatgtggctccttaaaacactcaaccatgcatgcacaagcaatggaccatcttcatattcatgactgactaaaatctcgtcattgatgcttactaatatgtcaaattgtagtaactcggtggtttagttgaagtttcattgttatatatatggcgtataggcctaaagttgtatgaaattttgattgatgagttaaaatatcttattatataaaagtaggattttcaaagttactaactcacgtgattacgacacgagtcaagtactttgaggagatatcgacatgtatcaaatttaattttgttaatatatttaaaatagaaattagaaaattttataatactttccaaaaattatatacataaatcacattattaataaaatgggttttaaaaaaaattaggaacctattcaaaaatgttttttttggtgtattttgttaacattttgtccgtttccttttgttttgttatgataaattaatatatagatgtcaacaaaacacataaaatggtgagatgtctcaattgtgtcaaagataaatgagtactaagtgtaattatgtttgagtaaaaagtttaggacatagtactaatatttaaagtggaagtcacatagtattagttgtttagtaaacaacaaaaataacttacgttattgaaggatatttaaacataataggaaaattgagataagatttagaacactaaatattgaaaaagcctgggttactatttaaaatttaaatatagtcaaaaataaattgaccaataagatggaatatgtagattttgtttattagctcttatccattaagatgaaatatatcgaattaaaatatagtttgttatcataaaataaatagttaaattgtattgcaaaatgtaatgagtaagattaaaatttggtttaaaaatatttagataaaataaaaaagtgtggattggtattagaagtcaaatattataagaaaatttctgtatattttttacatccgcctattgaggcgaggattatctactccattgatttttaaagttgctaactcatgtgatcgcgacaggtgccaaataatcaccaaatatcgtcacatgttaaatctaaagtcgtaatttaaagacaaacatagaaaaactcttaaacctatcaaaaagaaatatacacataagtacataaaaggaatattttttctatattagaaaaagataaaagatctttatcccataaagaaaatcttaatatattacactattaacattaattcaattataattctttttgttaatatgttaaaaataataagaaagttttatccttctgagaagaactaaaagtttattaattttttatataaagtttgtacattcttaacagagcttgacatattacaaaactgtattttacaaagcgagacatgtttcaaactttcaattaatcaattagattttaatgcgtgttttaatatttttcagttgtgaaacttaaataggcttatccttttattttcttaagaaaaaaaataaataatattgaatacatatccacgtaaatttgcaatatgtaattataaaatatatatgtaattatgaaaatagtatcaaaatgaatgggggattaaaagtgtagtcgtcatttttgagtaagacatttaagataagctaatgatttcaatgttttgcttacatagtataaacatttagtagagatttttttaaaaagacataatagatagatagagtagactaattgagatgagagttacaacattaaactaactatatgttggttaagttttttttatttaaaaaactacaaaaccttctatatataaaaccaactcataatttttacacactaaaaagaaaaacatttgggcgcgcgcgttcaaactcaaatatataataaagttgagattgttctcatattcgaatcactgttagaaatgaaaataacatttgaaagacataaatttctatctaatcaatagaagtctcagatcaacaaaagataaacagaaaaaaagtctcttatcaaatttctatctaactaatttgaaggatattatgctaattaaaagtctcaaataaaaactaaaaaacaaaaacaaaagaagacaagacgtaccgtaccgttgacacaaagcatccgtgcattatttctgtcatttttttccgacaaaactcgtagtttctgtctactttcatcacagatctacgcagtaattaacaaaatatctattaagaattaaaaacacatagaaaagagaataaaaaccaactgattagatctaaatctgtatcgtttcgctaaccatatcgacagtgtaatccattggagaattctttcagtttttctttccttgcttggtcttaatcctaaatcaataaaagttaaatagtttaagacaagtatatctgaaatttgatcgaatattttatattgcttgcctgaaatggattccttcttcccgtacatgtgctgctacaaaagcagacctaacgttgacacactgccgattacaccgagagctatatctcctcgcctttggattctgcttcatcttcaacaatggatcagagaagtttttggttctttgggcggctgtgttcttgtcttgctatgcttcaattatatatatatatatatatatattatatatatatataaaaaataaagggtttgtaaaccttaattatctttttcttttgtcagagggggtaggtgtcacaacgtgtttggacaacaaataatctaaaatcttatcaagtctatctgaactctctttatttcaacaaatttaatatattaatttaattatttaaattaaataaataatatttaatttgaataataggactattctagtttgaaaagatatctttctatgtataacaaactatttgaaaatatatgaatcaactgtgataccaaaaaacaattcagttgtgaaatagagtaataaattttgtagtgttctacataatccagattgtgtgttaaatgctaccctagagaagaagacgtcatacgcttggagatcactgttacaaggtcgagatttacaaagacgacgactcgatgatcaacgcttggtccgatccctggttgccttcacatccaccaagactgccacggcctcgtaatcaaactgatggaaattatatggtctaagactgtgtgataaaatcatcaaagaagcaacaaaataagccatacgttttggagatgacggccaaaggattagacaaagtgtaactatatatgattgatcctttgtcaatggaagattacagtcaaatcaggttgagttatcaaatattatttggttacttatcttgtatcaggtcaaggcacatgcatgcagagtaactatgaatgctctcgaaagctaatttttttttttttttttttttttttgagccaaaacccataatttccctaggcccgaaaccatagcatgtaatattagtttcgtcccaaacgtcactcgaaccggcgacctctaaacttcgcgtaggatttttaccaattgagctaacgacacttggtctctcgaaagctaactacaagcgcttcgatcatggtaatgcaacactgttggagtaaaggatacacgaaggttatttttgaaggttactgtctagttttcagtctcacttttatgttccttctattatcacgaatgccttacattgtgactatctaaactaacgacaccatattaataaagtcaaatgttaaaaaaaagtggtgaaaacagtgaaaattttaagagtgataataggtaggtgtgtttataaatactaaactgtttgaattcattaataaataagtgacaaaagttttaaaataattttggcacttgacataataatggtttgaatacattatataagaagaagataacaatattgtaagaacacatgtttgtatatgtgtctataaattgtttataaattttaaataattttgatatatatatatatatatatatatatcactttggtttatggttcatacttatcaatttattttatcagtgatttatgctgttttctgtaacgaaattatttatcaccttcatctgactatttttgatagattacaccccaacaagtacacatatactaaattctttactagtaataaaatttatgcagtcacatactatataaaagttaaaatatcaccctgtaaagtcacaaacgtttaagataactttaaaaattaaaaatctatctagctagaagctatattatatcttatatgtataatagaacatattttagtaaaatttttaattttagttttcagaaggaaatccaacttttaaaaattatatgtttagtgacactaaatcaaataatttttaaaagatagatttttttctgaacactaaaataaaaaaactttactaaattagtgcttcattttcacatttgtttaattttccatgtttcaagttttgcaaaaccgtttgtttcttccaaaaacaattttgtcatctagactaaaggaggcctttcatgagtttaggaatgactttaagattcaaagcctaattttgcatatctaattgtctcatcttttccaaatacagaatcgtgggtgagtaaaagtaatttctaatggtatcatcaaataatttggtgtatcgtaccacaatatcagttgttcaagattcggcattgtctttagaaagtggtttacctacttgatttgatcctctgtatcttcgttgtcatcacaaagttcgttaatctctattatcaagtccgttgaaggtccttaagatatttaagtttgaagaaatttgtgatgacgatgaagacatagaagagcagatcgagcacgtcaaacacttcctaattaaagcaatgtcaaatcttgaccaaatgatgttgtggtaggataaaccaaatgatctaatgaatgtcatgagatagtgtagtctttttcaacgacttactctatcggcaaggtataaaagaatgtatacattacgaatcttttagctttatagttcactcagatttcattgtgttgtgtttcttgtagccaatctctggatttggagtggctaaagcaatagattcatgtcatgagatagtgtagtctttttaaacgactacatcatctccatgatttgatgaatgtcacttgcaacatctttccgcttctagtatcctagttgagcttgaaaaacacatggctttgggcttagctagaaagacttaacctcttcactttcgggccaaatttcccaaccaagcttctttagctaaccttctaagatgcaatgtaagctaaataaatagtatatacaatgcgaaattttggactttagggactctagcagagacttagttcataacaatcaaaccgtggaatccgtaacacttgacccgcccgtaggcatctatcaaggttttaagattcactcgagttgtggtttcgagacccgctttctcgctcttaatgtggtttcaagacacgctttcctgatagttattctagttcttgtatcgagtttgttcaaattggatatttcatgtcgatacaaggcacctttatctctttttctaacattaatctaaaaattataaaaccagaaattttagcaaaaaactttagggacatagtcggatgactattttagtttttcagtgaccactagtacatgaacagaatgacctacaaccgataatcatttcagcaacaaccaaaaactaattataatcagaaatgcattactaggctagtcttcacataatatatggactcagtggactacatttactatcatcaattgctttttccaacatcagagaagaaaaaagaaaaaaaataccaatgtattataaaatgtagaaattcaacttaagtagatttatttactgttttaattacttattattattcaaagcacaattgagaatgaaattacaagccacaagagtcacatacaattcatgtatgaagaaaaaggatgattggtttgtcgttccatctagattgtgctttcaatagtgataaatcaggtcgcaaggatgataagccaagttgatattggtggatacttccattgcttctcttgtggcatttttcaacatcaagctgagtaaaataaaagagtctatctttttccaattcaggttctacattttaatgcaactctgaatagacttttagtttttatattttctcccttactcaagtgttggaagaagcaattgattatcgcaaaggaatacaaaaaagtatatgtactttgttgtagtcctctcttagctcagaagcttgtaaaggtaaaaaaaaaaaaggtacataacattatctgaaacgtagagaaagctatgaagattttagaaactaaattgtttttgtcctcttactagtcttccgttaaagatgcttagaggtaaccattaaacaaaatatgatacacacaagaagtgaagatatcattgttcattttctttgaacatgcctgatgattttgcattgccttataagatgcaatgtaagcttagtatatcgtaaatactaatggtcatatatattctatattttctttctcgttctgttgttgattgattcgatatccaccgaatgattaatgatcttcattgatgttcatgagactttactcacaatatatggtaccaaagagaattttccgttccaggaaacatcatatattaccgcatatggcatcgtaagatctcagagaaatattacccaaactatttgacttatgcattggtcactacaatggagaattactcatcctcttagatttcatcagcatgtttttcaccacctaatcggttgttgaaaatttataatcctaagcatttagggacatgaacctagaaataatgaattaaatgtgtatagtactcttctaaaatttttggaagttcactttctaaaattcatcttcttcgattcaactgtcatagtttaatgtctcgtgactcgtgcagtagacgagatgataggagaaatcctttcatttgcgtctagaggtggagtgctatacatagtgacatacaatccatgtggctcctgaaaaactaaatcatgtatgcacaaccaatggaccatcttcattcattgctcatggaataaatttcattcattgttttaagatatttttaaggtttttagattttgtatgaaaatcccgtttatgcatagatatgtattgacttttatatattggttaataaagttacgttgagattgttctcccatatgtgaatcactaatgaatttaacatttgaaagacatgaatttttatctaatcaaaaaaagtcttttatctaattaatttttctctaacctacttgacagattttatgcgaattaaaaatctcaaatcaacaaaaacaaaacaaaacaaaagaagacgtaccgttgaaagtgtatcacttctgtcactctttcccgacaaagctcgtaatccactttcatcacagatctacagagtaatttacaacaaatcttttaagaatatatatacatatatatataacaaagaataaaaaccaaccgattagaaatggcgatcctttgggcgattttattacggtcttttaaccatcttcttcccactacagtggtggcagttttcagcaatttggccggtgttatggaatttccttggcccatctctccggtagatatctccatgatgttctctttccatcgtgatgttacaggagttgcggttcaaaaaattcctcgcctttatacctcctgaataatctatccctctcgcttctttctaccccttgagattttacttactcattcacaaaatggcagacaatttgcggcgagcagtacaagacatcaatctcggcgcaaacaatgctccagttactttatcggcggcagtggtggcccaaccggcggcagagaaccggttcatcctcatgggctgtccagttatcccccgcagacagaacctccgttcaattgtggcctcaatgccacgagtttggggccaagccggcttgatccatgtcataatcatcccaggcaaccaatttcaattcattttcccatcggaagaatcgcttgacatggtgattcagaggggtccatgggctttcaacgaccgaatgcttatgcttcaacgatggacccattggtgaatcctcctctgaccacaatcccattttgggtccaaattcgcggaattccttttcagttcctcagtgttgaggtaattggagagatcggaggcgcaatcggtgaggttcatgacatcgattatgatgctgaggcagcatcatgaattaaatttgttcgggtgcagataaactggaatgttgagaatatccttcgtttccaacgcaattttcagttccaggctggagtgaataccttgctccgatttcgatataagcgccttagaggcttttgtgaggtctgcggtatgttaacccatgactccggagcttgtgtgatcaccaatggtggacatgattccgactctgagggtgacgatgatgatgacatacccaatgctggaatccaaaaccaaggtatagaaatctgtgagattgaagagggtgaagagaatggcggtcctaacatggctctggtggttgaggctccagacgataatatgccctagatccccaacaaaacttgctggagaatgcagatgatgatcttcaagactatcaaccttacagcatgtaccagggagaaagtgacacaaatgaactcttcaacccaatatcaatctttgcaaatgctacaggagacattcccggtgatgaaagctatgcaagatactctgcatccatccacccacgtgaagaggtgatgtccccaaactcaatgtgatcaagaggcaatggcaactgagagaggcaaaagaaagagagaggattcgctggaacaatctaaagaaaatgaatgctcaaagatggtgatcatggaacaaggagaaggcaacagctccagtgggagcacctagtgtagaggcgcggtgggccctaaaccaccacagccgccatgaggataacctgctggaactgtcgaggtttaggcattgacctcacagttcgacgcctcaaggagataacacactgctatctctcggacatcatatgcctttcagaaaccaaacaacaagatgatcgtgttcgtgatgttgcttgtgaattaggttttctctttcatgtaacagttcagcccataggccttagtggtggtttagtagtcttatggaagcattcactagaagtctctgttttatttcaatcccctaatcttgtagattgccttgtgaaatctaatgaaactagtttctatttttcctttgtgtatggacctccaaatcctagtttcagaaatgacctttgggagaggctagaaaggattggaataaattgacggagagagccttggctaatcttaggggattatacgttataatctagataaagctttttcctttggaacttcatctcctgcagagagacaaaagctgaaacaggaccttaaccaagcttatattgaagaggatattttttggaagcacaagagcagaaataaatggactcatgagggagatcgaaacaccaagtatttccatgcagtgacaaagacaagaagagatcgcaacaaacttgtttccatagaagacaaagatggtactgcgagaagaggagacaaggaagttgcagatgttgccatttcttacttccaagaactgtttagttctacgccagatactactgatctgcattctcagattttctaagactttccgaagtgggttacacaggagatgaatatggacctcacaagacatgttactcctcaggaaataaagacagctgtttttagtactggaccacattgagctccaggacctgatggattttcagcagcgttttatcacgagttctgggatgatatcaaccctacaattattaaggaagttgagagattctttgtagagggttttctaaatcagcaacacaaccatacaaacatctgcctcataccaaagacggaagcaccaacaagtatgatggagtttaggccaatagccctctacaatgtcagctacaagatcatttcaaagatcttagtgaaccgattaaagaaacacttatctagtgttatctctgataaccagacagcttttatccgtgggagaatgattactgacaacaatatcattgcccatgaagtcttccatgcgcttaaggccaggaaacgccaatcaaaatcctatatggctttaaagacagacatcaccaaggcgtatgaccgattagaatggagttttttgaagacaacaatggagtacatgggatttgatgatcgttggatccagtggataatgacatgtgtttcttcggtcagcttttcggtcctcatcaatggctctccccaaggatcaatcacaccagagagaggtattcgtcagggagatcctatgtcaccttatttattcattttattcgcggaagtcttgtcccacatgatgaaacaagcagatttaaagcgtcacctccaaggcatcagaatcagtgaccaaggaccagcaatcacccatctcctatttgctgatgactctctcttcttcatgctagtgaatgataaatcctgcaagactatacgcgagatactcagcctttacgagaaggtttcaggtcaagctgtcaacttaaggaaatcatcaatttcttttggtagccgagttaaaccacaagtaaagactcggatgagacgtatcttggggatccacaacgaaggaggtcaaggcaaatatttaggacttccagaagagataaagaagaaaaaagctgaaatgtttcaatatattgtagaacgtgtacggtcaaaaacccagggatggagtaagaagttcctctcggcaggaggaaaagaggtgcttctcaaggttgttgctcttgccgtaccagtttactccatgaacatcttcaagttttcacaatccatttgtgaagaaataaatggtattcttgctaagttttggtggagtagtggtgaagataaaaaagggatgcattgattttcatggaaaagaatgtctttgttgaaaaaaaaggtggaatgggattcaaagattttgagaacttcaatttggctctacttggaaaacagatttggaggatcctaaaaaaccagagtgtctcatgggaaggattgtgaaaagaagatatttcaatgaatcaaatattctcaatgctactcagaaaagaaaggcgtcatttgtttggaagtcactactccagggccgtgatttaatcaaacaaggactccgatttgcaattggtaacggctccaatatcagtgcatggatagacccttggttaccggttcaccctctacgacctccacgggtaaagaatggtcaagaagagaatcaactgttgtcagaatgaatgcattcaagttcaatgtggaaagaggatctcatcagcgagaaggttacagaagataatgcaaacttaattctgtccctgaaactaagcgcccatgcacctcatgacatgcttggatggcattatactaaggatggactttactctgttaaatctgcttactggttagcaaatcaactttacagagactcaaacgtataaccaccacggggaacttagatttaaagacacggatttggaaacttaaaacagtcccaaaattacgatactttctgtggaaacttctatctggagccttaaaacactgaagagacgacacatccggaaccaacctgtctgcaaacgatgctgccaagaagaggaaactacacaacatttattttttgattgtttttatgcacaacaggtctggagagcagccggttttccgcataataccatcacgatgcctggagcttctgtaaacacaaaaatgaacatcattctttcacccacctttgctagacgacatccacacctctctcaccttgcaatttggattgtctggcgactttggaagagtaggaaccaattgattttccaacaaaagagtatatcatggcagaccacactccaacttgctaggaatgatgaggaagagtggaacacttctactgactaccttcacagcctccaacccccaacaatgtcgagaagagataccaacagcatagcaaaacattgtgtggaaacgaccgccttatggatgggtgaaatgcaactacgatggctctttcaaccatcaataaagacaatctaaagcaggatggataataagggatgcagaaggaatctacaaaggagcaggtcaggcaataggcatcacgacaacatgcgccctagaaagtgaacttcaggctcttatcattgcaatgcaacatctctggagtcaaggacaccggaaagttatctttgaaggagataacaaaaaggtggaggagctgatgaacaacaaaaacatcaactttagctactgcaactggatcagagacgcaatacattggcgagaacattttgatgacgcagagtttcaatggactccaagatcaaataatcacccagcggatcttctggctaaacatatcatgccaccaaacagcacctttcactttcacttttatgttcctgatttcataataacagcttcacattgtaatcatactggtctcaattaatgaaagaagtcgtttaaaaaaaaagaaaaaccgattatattgggatctgtattgtttccctaaccatgtgagaattcttttagtttttgtttgcgtgctggtctaacaactaaatcaataaaagttaaatggtttgagacaagtacaccaaatacaaattcaatctatatgtatcagaagttgattgaatatgagttgaacattaagaagaaaaacaaggcacgtgaatgtaccttgtttcaacaactctaatttccattgacttctcttaagcatcgcattttcaggagttgatgaaacttcgacaccattttccttagtctctttctcaataaacttcttctggtcaacacgtgcccaaaaacaaaaagagtttgtttgaagactagtacgtttctgaaatttaattatagaagtagtacatatactattcacaattagtaatatagtcggttttggttgggttagagagagagagacatgtggggcatatttagtgggtcaagttttttttaaaaatttcttttttttctttattacacattccctcaatgtttaataactaaagtgctcattagtaaattttatttttctaaaattgatcatataaataaaaatctatgtttttttctctatcatttgatatgcattttgtttaaaatgttttaaattttatattatagaacattgtacggatgtagatcactgtacagatatagaccgctgtacagatatagaccgctgtatagagaaattgaagaacaaaaatgtgagaaattgaagaacaaaaatggtaaaaatgaaagcttctcaatttattttcacgggaaaatcataaagcagagagctttgataagcttaccagagcgaaatccttaagactcaagacgagaaagaacagattttgacctaatctctgaggttaagaccttaaagaatatatttttaacttgtctcagagcttgtagtctcgttttcgatcataagctattcacagacaccaatggaaaaagttacttgttgtggaagctaatgagtctatttgcaagaggaaatgccaagggatagttttctcctacactcgcgtgtaccataaacttggtgctcgctaattgctaactatatcttactcaaacagaaccagatgcaaacaaatgaattggaataaattgggatggatattcggttaaccggttcggttttggtatgtctattccactttagagtttttattgtattttagaaaatacttttatttcggttcggttcggttcaatgtttttgttttttttggtttcgtggtttttatatttaaggttctaaaaaataaatttcatttgggatcaaattatattttaggttcggtttaatttggtatttgacaaataaattattaaaataataattaactaatttagttaaaattatagacttttaatatatttaagagtatttataataaatgactatagatttgaaaagaatgtacaaactaaccttgagtcataatatcttgtcggaaacatgttggagaacacgtgtaattacgtaaatgtcctttgtaacatgttatttttctgaaatacatgcgataacataatatcctctttttatcttgttattttctcttattacatagtatttataaaaagcacatggtattttttggaaaaaacattctattcagtttaatatctctttttatcatgatattttgtagtaatacacgttttttattaagatcacacatgatttctttaaaaatatattcttattttttagtaatacatggtttttattaaaatcacatatatttttttttttagattctgtttatgtaaaagaatttcataataatgttttttcttaaaaattcataacgtttttttaaatagcatgtttttaaactaaatataacatgtgaaattttaatgttacatgctattttgaaaaattacacggatgtgtttcgtttactgttcatcttacaacaaatgaagggtagctttgttatttcctttcttccgacaacgtgggtccatggttattttgtaacaaaaaactttttctctgctagtttcttaatttgtatgttttatttggttatctactaatattactctatatttaaatatatatttgtatacatttaataaaatattaatatttttagtgaattttagttagtttaatttggttttccattagtttggattccgttcatttcaggataatttttttttggaatttgggttattttataatttattaattcagtttgggttggattcaaaagattcggttaagataagtaatcaatttcactttggattgattttgtatctgaaacttgagttaaccaaacaaaatggtatttaaaccaagcaaagctcgtttctttcttctatttatgtaaagatgagaacaaagtttaacaaactaaagattcaatctccaaacatactcctcattgttcaactactagactaatcgaaacccgagtaagaaaacacttcactgaagtcttgtttcgactcaacacaatgtaagatcttctcctcataagagacttcaaagcatgatggtactgaaacaattttgctagcttctgagtagtcaataatgccaaacagtgaataacccatcttcagttttctcatttgtacgcgctaattgctctttgatcgatatgctggagtgtgacttactttgcagggaagaaggtaaaggaatgaacctggttttactgcaattactagacttgtcgaaacccaagtgaaaaagcagttcactgaagtcttgttttgattcaacacaatgtaagagcttctcctgagagacttcaaagcttgagggttgtgaaggtaatgaaaaaaacctggttttactgcaattacttgacttgttaaaaagccaagtgagaaagcagttcactgaagtcttgttttgattcaacacaatgtaagatcttctcctgagagacttcaaagcttgagggttgtgaaacaatcttcttagcttctaatgagtgagactgtgaattattatctttagtacgcactaattgccctttaatcgatctgtgaagtgttgtatggccacctaaagcttgaaaagactcaaaactcttgccacatattttgcattcatagctgcagctacactcaggtgttttctgtgacttactattcagagaaagtagttcacccatgtctagtttctgatgagtcaactagtgtattatcatcttcactgtacttccttttacgcgctagtttccctttaatcggtctgtgaagtctttggtggccacctagagcttgagaacacacaaaactcttcccacatattttgcaatcacagcttgatatgctctgagttttttgctgcaatttacttatcagagtagaaggtaattcactgcaactactagactcgtcaaaacccgagtgagaaagcagttcgctaaagtcttgtttcgactcaacacaaggttaaatcttatcctcctgagagacttcaagttttgatagttctgacataatgttcttagcttcggatgagtgagacagtgaattatcattttcagtacgcgctaattcccctgtaatcggtctgtgaagtctttagtgaccacctagagcttgaaagcacccaaaactcttgccgcatattttgcatctataactgcagctactcacaggtcttttctgaaacttactattcaaaggaagcagttcgccgaagtcttgtttcaactcaacacaatctaagatcttctcctccactcttgatggtcctgatgaatcaaacagtgaattatcatctttataatactcccttttacgcgctaatttccctttaatcggtctatgaagtcttcggtgaccacctaaagcttgataacactcaaaactcttgccacatatttgacatctatgacttgacttactctgcaatttacttctcagagcaacaacatcactgcaagtagtagacttttccatacccgagttagaaaccatttccctgaagtctagcatcgactcaacacaatctttaagctgatctaaatccatggaatcatcatcattaccatgagtcaaatcaaagtcataaacttgtttagaaaacataaccaaactcatcgcagcttcattcatctcatgatcctcaatctcagtcataaaatatggttcttttattgacattgaaaccgaacaaagatccccaaatccttagcaaatcctattcatcatcaaatacgtttaaacccataagaatcattacaagaaagtctgaaatttgtaaaaagttctaagctattttgagaacatagaggacgaatcataagaagagagaaatataaaggtcgcaatttgttaaagatgagagcgttgattagcttaccagagtaaaaacccttacttgagtttaggtattatcgcctgaatcgctgagagtgtggagtctcgctttcgcttagctttttactcatagagagactgatgagaacaattacttgttgcggaaggtataaagactatttgtaaagagatagttatcttctacactcgcgtttacatttatctttgtgctccctctaatcactattttttttttaatttttttttggagagtatcctttggacttctaatctacattgattagaatcaggtttgtgatttatcgtgaatgaatcaccattttttctagggtgtctattttggatatcgagataggaagtaacatgtaattagagcagctaatttggataatcaatcatatttttccaaaatattcttcataaaatacgggacgaaaaattcagataacaatataggttcgagaaatttaggtatatagaacaagagtgagagaaacgcgagcttcttgagcaagttgttctttatcatctttgtgtctttgatcttggttcttctatcgcttgtatctgaaaccaaaagacaacatcacactttaagtggtgtcagtaacctcattctcatagtgaaagtggggagcaagaaatcttccccggaacatagcggctaagtcgtgaactcggtgatcaaatttctttgtgcttgtttctttttcaagcaaccgttacttttaagttttcttcacataaactttcactaatttgagtaaggttcaaatggataatttcggaaaactatgataaatcatggacaaatttgggaaacttttgaataattttaaaattgttacaaatattttgaaaattttaaagataattcggataccttgtctcttatctaatccgttcatgtatccgctagaacatatttaattgtcccaaacaaataatcatttgaatgggatgaaaaattcgggacggatacgagtcaggacggatttgcgatccaaaaaaatggacatacctacctattccaagagagaatcgaactaaggatcttaaaaaccacaacctttggagagtcctagaagcaccactagccaaaaaagactcacttggtaattgctatatcttactcaaactaaaaccagaagcaaaaccaatatatcatcaatcacattaatttggtccaaagatgttaaattttctcgaataagatcaaagaaccaatacacactactaatttatcaacaacaatcacttgtctctttttttccacacattctattgagtttttaagcaaaacaccaaaatccaaaataaatttaaaaaaggagaaactgaacaatccaaatttgaagtcatcatcttgtttcttatggattagtctctctttagttaatatccacttgaggaactctaccaccagcttgaatgatttgtttctcaagctgcaataacaacaacaatggcaataaatttgttcattagtcaacaaaatgattcataaaatgaaccaaaaattggattctatgtcatcactactcacattgaacatatcttgaagctttgtcgtcaaggtcttatactcaatatccacttgctgcaaacatctcaaccgatgagtccttaagcggtgttgaacaagcttacccttcgtaattctgagcttcgcaatattccttgaagctaacacacaaagctttgaccctcttcgcaccaacactgtatcgaaaacaagagtacaagagaagagcttcatctatcaaaaacaagagtacaagagaagagcttcatctatcaacaacacagaacttctgctactacagagtatacttcttgattgttattaggatataagcgagacacaaaacataccttgagctactacccttcaattaatgcacactcgcacctacctgaccaaaatctacagttcccgtcgacttatccctgagttatatacacaagcaatgatgattctagccagactttgtgattgagacacaatcacagttttaagaagttttaagacaacacaaagcaatgatgatctaacaaaaattatgagtgagataagagaaagatcgaaattacaaagctcgagccatgttactgataagcttaacacaatcttcaaagaaaagagacagaacctcagctacaaaatcaggacttccatcatcttgaagcttcttcaattcagtaaactgatcatccaaaaaccccttcacaaaaacaaaaaccaaactaatgatctaaacgactaaaacaaacacatgaatctaaagttcaaacctttacacaattcaaatccctaaaaatgataacttgtaacaatgatctaacagactaaaacaaacacatgaatctgaagttcaaacctttacacaattcaaatccctagaaatcataacttgtaagaaccacaacaatttcacacataaagattcacactttcttcactttaatcatgaatctgagtaaatctagtatcgctgatctatattagctaaagaaagacgtttgaatgaattgggtttgaagatttgtagaattgaaacctgttggtagagagaaatggtgtaatcacggaattgaacgaataaatggcaggaatgccactatctgcgaaaaagtaaccaggaatgccactcttctaattcccattttttatcgaattaaaaataaatgagagaaaattcaaataattggcaaaagaccaaaaacccagacgacccaacaaagtatccgatccaattaagatccatgcccaacgacccaaaacccattccaaacttaagcgaaatccctaatttttaaaatcaaaccgtttctgccatttattcaattcaaattttccaaaatcaaattcataatttctcgcctttcgcgattttccgacgaattcttgattcgtctaatagtttgatggctcgtgttagagacggtattgctggccctgtatatgattcgacggagaagtcgtcgtccggtgaagtttcgacatcagaacaagttacttcagaaattgagaacgacggagatgccgccgacttggttccgaccaaaccagcaggtctgacagaaccagcagcacgagatgttgcggcgaatgatactacaaaagaaaccgctgaaattgaaaaggctttggaggaaccgcgtgatggtgatgaggcttctcctaaaggaaccgctgaaattgaaaaggctatggaggaaccgcgtgttggtgatgaggcttctcctaagggaaccgccgaaattgaagaggatcagacagggacaactttgaaacctctaattgacgctgtcattcaacaattcgaagaagcgaaagacgggaatggggaggagttggaggaggaggaaatggtgaatacaattccaaaagaaggggtagagaacgttaatcgtcaggtatatacaattgaatctctatgacacacatttgttttgtttgagtattagttctcgtattagttagaaatgttcaactagttcatctgtgacacatgtttgatttaagtaatttgatggaactagttcaattggtacatttgaattgttagtttggtacatatgaattcttcaattggttaatgtttattgaatttgcaggatacttatgaggccgaggatgatgaggtttctgttaaagagacagaggaagatgaggctggcaatgatggtttggaggatgatgatttagattctcagccactgccgccacagacaatgcattttcctttttcagaatacggcaaagtgtgcaagataagcagtaggtgccaggtcacgcagacagttgaactgatagagaggaagtttaaagaagaagctgtatggttcaaaagacacgatcagttcaagcatatattccacatgcctcaggagcctaaccaccagacgcaaggcatgtgggtgcttatgctgcgcacagtgaagacagatttgctcgaggaggcttggtttgtggtaaatggagtacctattaggtattccattaaagagcatgcgttgttaagtgggtttgattgccacagttacccaaaagaaatgaatacaatggggaatattaactttgtgaagaggatatttaaaaaagaatctggggtaaaggttgtagatgttcttgctaagtgctcgaagatgaagcatggttcaaataggttgaagttagtgctgttgtacttcttggtcaaggtagtaaaagctggtgcaaagaatgatggaaacattgaagagtttctgttaaggattgttggcgatttgaatgcgtgcgagacgtttccgtggggccgttacatctttttggaatgtatggcaggaataaggaaaatgatgaagaacatgaatggtttcgtgaaaccaaaagctcaaccttgcttcagtggattcattgtgcctcttgaggtaagtaatttatgattattatatgagtataaggtgtaatgtacatgttttatgatattaacattgttttgttatttgtagattctggcttatgaggctattccacagcttggactgaaatttagagtccctgtacgctccgctttgagtgactgtccaaggatgtgcaagcataagtttaaagaatgtagcatgaaaggtgtcccgttggaagttatatataaagagcttgggaatactaaggttagagtttctgtatttacttgattgtgtgtctagtctatcatgagattgattgattgattgctaaatgaatttcttttaacaggattttccaagcattttggtacctgcctatcatgagaaatatctgttgaaagatctcttagacgatgatgttgatgatgactgcggtccaatagatattgttattgacagttggagagagcgactattagtagagaagaacatgatatggtggaaaggaatgtgtgagatggacatttcttctcgatgtattgtaaatgagatttcggatgaggaagtccatgagattgagaatgaggtccccgagactgctgtccctcctcgattccctgatttagatacagttgtggcatctataacctcagtgacgcagatgatgaccaaaggctttgatgaaacaaaaaataagattgatgccattgatgtgagagtgcagtctattgagttatttgtggcagatctgaaggaaagggaacatgggaagcaaacagaggaggcaagtcaagatgggcatgcaacagacgatgacgtgttatttgcttcgccagatggttatgtgaccaccggaaacgagcaacaacgggatatagtgatcagtgaacgttctccagaggttgcagaaaacagtaagtataataattaatgtcagttgggtataaaaatgtgaatatatgacttaggttttgttttaaaatgtgtgcaggtaataaggagacaaacacgacggagaaagaggtgaaaggaaaagcgaagaagaatggcgggggcaagaagaagcaggaggtgccacctgtaatagaaaccggaaagaagcaaacaaggggagcatcccgccttattacatcaccgtttgtggcggatgataagaagcgtaagaaaatgcgaaaggcagattgatcctgttactggtagttgtggaacaattggtttatttaaaaacgtttggcttgatttgcattgtaatgatgtttactttcgtgaatttttaaacatttggcttgtaattggtcttttaggttcaactgtttattttggttcgactgagtagttcaaatagttcagatagttcaacactaggattagtcggttcgacttattagttcaaatggttcaatttggttcgactgattagttcaaatggttcaaatgtgttcgactgattagttcaaacggttcgacctatatagttcatccggttcgacttattagttcaaatgtgttcaatttggttcgactgattagttcaaatggttcaaatgtgttcgactgattagttcaaacggttcgacctatatagttcatccggttcgactgattagttcaaatgtgttcaatttggttcgactgattagttcaaatggttcaaatgtgttcgactggttagttcaaacggtttgacctatatagttcatccggctcgactgattagttcaaatagttcagatagttcaacactaggattatccggttcgactaagtagttcaaatggttcaaatgtgttcgactgattagttcaaacggttcgacctatatagttcatccggttcgactaattagttcaaatggttcaatttggttcgactgattagttcaaatagttcagatagtttgactgattagttcaaatagttcagatagttcgactaaagtccaaatggctcgactacgaagtccaaatggttcgaccaaacatccgttcgactgattatataattgttagcaaaatttactttcaaaacacagatagttatattcaaacatttagattcatacattgtattcaaaacatagatagttagcaaaataaagatttaaaaccacaatttagatttagatttatcttacaaacttaagcaaaacaaaggcataatgtttattgaaagagagagtcaggaggatactcgcgtggaggctcatccactctcatgtaggaggaggtcgcgtcatctggttcatcgtcctcctcaatgggatctggctccgtgaaaaacgaccaattcggtgacgatccatcgtgctcaacacaccatttccttagtggcagtggaatgtcagcaactttgtcgaaaccgtatctcacccagtctttcggatgagcctccaaccgcctcatacctctctccaggtcttacaatttaatgagtagttggcggtgacgccttctataagcttggtgttgattatccacctgtccaacaatagaaatgttaatttctcgcaaaatatccatcaatacaactatacgaccactatatgattcacctaatataaccaacaatcaacacaactaaaccctaaacctgaaatttgattaaaccctaaacctaaccaaacgagcaacaacgaaacactattcttacatttaccttttgaatgaaccttagacatgtgtcatgcatctcattggatagatccgtttgaccaaaaaactttctgggatgaataacttgaccggggacaaaatctcttggggctggaacaaaatccggccccatatctcctggtaaaggagacctcatccacttctccaggggggattacacggtgaagcggaacccccaaatgtcggcggataaacccgatgtcaactaaccactcaggtggtggtggagaagaacaatccggtgatgttggagtcggagacgccggagaggaaggcgcctacgttcttaccctctgaatgctccgtcgatgatcaggactctccatgatgaacttcaccggtgaagagtttcaatttcttgaattctttggtttcgtgtaaaattaaaagcagacgagtaaattgaatagacgtgactcttcggctgtcccatctgaactttcacgccgaacgattaagaaaatgggctgggcttgggccttttttttactaggggttttagcatccctaaaataagtattccttttgggccttttgccattttaatgggcttataaattacaaaaaacaaaatccaataaatttcaaaaaatagagtccgctttatgcaaaattcataattcaaaattcgaaaaggcaaaaacgatttcaatcaatccctaaatcgaaacattcgaattccaaaattgatttagggttttgtgagtgccttctctaactactccgatgagttcaagttcagtgtcagtgtcatctggggtcgacggagcccgtggttttccggtgaattgtgcgtgtggagcagatgtgacgatcttcacatccaagagtcaagacaatcccggaagacctttttccggtgtaaaaccaaaagagatccgaaaacgtggacaaacaaaagagatgtaagtagagttggtgtttatattgtgtatttatgtagttgctaaacttgtcggatttggtttgtgggttgtgcaatagggtgatttgtttaagtgggttgaggatgttgtgcaagaagaggtcgttgatgctttagaaaaatttggaatcattgcaaatgagcttaacaaaatcaaatctgaggcaaaagagctacatgtgatgttacaagaactgaaagaagaagcagaattgggcaaaaagaaattccgcaagtggaaagtttgcttaacaatgtgttttgtgtggctttgcttgatcaccattgccattgtttacgtaatgtttggtaataaaaagaaacaggaatttgtaatgttgtattagatctttaatatcttgtaatgactttgtaatgtcggatttgtgaccttattattccctgattttataatgcttttgatttgtgactttgtaatgttatttcattggttcgactgaactagagatagttcatctggttcgaaacagtttagttcaaatggttcatctttcgtcacattaccctgttcaactgtatattttggttgcacatcgtaataaatcataaatacttgcatatttaaaacaaagtggttcacaaggttcatacattaattaaaacaaagtgcttcacatggttcaaaagtaaatacttgcataatgaaaacaacgtggttcacatggttcatacatggttcaacgagaaccacgccctcctctagctcggaggatactaatagcactcctcattgatcgtagttccttgaataattgggtctcaagatcagtgatccggtcattcataatgcgtatcttctcgtggatgggctcgaacatcggaacttgccaagcaggaggtccttcttctcgcttgtccttccgactacagtacttcgaaaactcctcttcaatggcttcctcccaccacttatgcaagtgttctccatccacctcagtcagatttagtggacatcggaatcttgttttcccgtggagattgccaccaaccacattacccttttcaacgtctcttccacagtagcacttagtcggaatgccccaattcccgtcccgtattgcattgtagtagtcgaaaccgtcagatttctcactaggagaggagtcggagcttccgttaaaagagataggcatgtctgtcaaatacaaaatattaaactatcaaatacttgacttaaccctagatattgactaaaataaaccctagatcttgactaaaataaaccctagatcttgactattataaaccctagatctgaactaaaatacaccacataaaccctatatctttaatagaaaagatctaaccttgtgaagaaatgacgtcgtttgccggaaaaatctcgtcgccggaaaatacttgacgccgctaaagaatcgccgccgtcttcttcagcagagggttttctcgaattttcgatttttcacacaagtaaatgattaaatatagatgaaaatcctcaaaaccctaccattaaaaaaaaaaaaaactttaaacatatggatccaccaaaatttaacttgagttgataaatccagacatttattccatttattccttgagttgatatatagtatgccagctggaattatgcggtatgccagctggaattatcaagttcatcagttagaattttacacatagttgtacaactgaactatcatacacatagatgtacttttcactgttttcatatatgtcagctgaactttaatgtacatacttgataactatgtcgaacccaacctaactgtgatttattttgcatattgaaagttttggcagaatcacatttgatatacgaccatattcacgtaatttacttcatttgaggtgatctcatagtaactactccttatcatataagaggttgtttatctgaacacataccacgatttcaatttttataaaaaaatatttatcaatgacactttaatagtaatagtagattttttgttgagctagtagtaaacttcaaacgtttctacatattataaaatcgttaaacacattttactaagtgattatagttgaacgggctgaacctgttgtactaggcttacagatttcgggaattacaaaagaaacatagaacaacgttttattagttaaaataataaagtacccaaaaactaatacaaagtacccaaaaactacaaattccttcgtttatacgaataatacaaagtacccaaaaactacaaattccttcgtttatacgaataatacaaagtacccaacaactaaaatactacattataaattttatcaacttccggaatttccagattaccaaacaccttcgacacggggccatgactcacaagcttcggtttagaatgaccgctcacacgccagcaaacgagtacaaccacaattcccggagtacaaagactccgaaagtgagcttgaaagtccaaagcttgttgattgtgtgcttcacaatagagaactttattgctgcagttcatagaaattatttacttgatcagaaattgtgaacacgaccatctgaaccaggtatgctgaaccatttgaactatagcacttgaaccatcagaatagaccaagtgaaccatttgaactataaccatttgaaccatttgaactagagtaggtgcaccatgtgaactatagcatttgaaacatttgaactagagtaggtgcaccatgtgaactatagcatttgaaccatttgaactagagtaggtgcaccatgtgaactataacatttgaaccatttgaactagaataggtgcaccatgtgaactaaaaataggtgaaccgtttaaactatatcatttgaaccatttgaactaatcccaaaaaagtaaccatttgaacttactgctaattcaatatcttgaaagaaaacttcacaccgtcgatgccttcggtcactcggctctgccaaataatggcacctaccacatcttgtgtataataatagaagtaagtattcgtacaatttctcaaagaaaatactataaaattgtcaaaataactcaccgaccaacacattcttgttaaccgtcttctctatgatgttgtcgaaaggagtaaaattccaaaacgagagtgcatccgttttcaaagctttagtaacaatagtctattccataaaccatatctggtagtcatgggatgttgctctcacagactcagcgtcatttcggaccgagaaattagtgataattattcactcatactcatattctcgtattcgatcaaagtaaaatgacgcaaggcgacgaggaatggtagccttgattcgggaacggggaccctacaccaaataattttaactatatacatgcaagttatgtgaaagaaacaaaattaaacatattcgcaatatataaccgtttgatctgccaatatgacgcccagttcgaactcatccggtgccacaaacttcttgaacacattcacaacgaaaacgcaaatagtccatccactgatagtctgacaaagttcggaaacagaatgatatccatccatgttaacaaacgacagcttcctttattagtggggtgggctctttttttggataggatgaaatatgaatggtgtaaaatcgattgtaatcctgtcttaaataatattccaaccgacgtgacgattggtactcgcagtgccacctgtcaaccgacgcgacgattggtatttcaactgacgcgttgactgggatgccacccgtatttatagttgacccaaatgaacctgttgtactaggtttgccaaacaacgactggttcatagttgaacctgttgaactatgtttggcaattctgttgaactaaaaaacttaactatgcttcaaaattccgaaaacacaaatttaaaaacaaaggattgttcttaattgaacctgtcgaacaatatttgacaattccgagaaacacaaatttacacacaaagactttatcgtagttgaacttcttgtactagttgacgagttgacgtcaatcatcattggtttcaggctgcaaccacctctccaagttgatgccaggagtagctttgttattagtcttctttcggcgcttctcacctctggatgaaaaccgggtttcttgattccttcctttttttggagtgtaatctggcggttttgcgaccttctccacataatcaggaggaaagaaccagtgagcctgatgcggcaccacataaatcgttatgtaatatgccaatgcccacgtctcgatcaagtaatacttcgagcaaagaccatagatacttacattcaagattgaacggctattccaatccatcttagatcgctttatggctgcagctatagcatggacgcacgggtacttatctatatcaaattctctgcaagaacaagtattcctttccaagtccaccaaataagaaaaaccatcatttccaattacgctgtattcttgtcggaagctgtttagttcagttgcatttagctttgcaccaattggacagcgcgtgtgtaatatattctccacaacaggcaccacttgccttgtgttcgatgcagacgcggaatctttgcgatgtgtgttgaaccactcagaaaacttctccaaaatcgcatctatcatcggtaacagatggtacttccttacttctgaaaacacagcgttcattgactctgcggagttgctagtatctatgttgtacttgtctccctgaaaatagcacctagcccatttctcaatcccaattgcccgatccagataggtggctactttaggatgctttctcctaaattatgcatacctaatgttgaactcagtcgcagtataaatatgagctaattccataaatttggccatacctgcttctttgtcacctgccagcattttcttaatgttttgagacaaatgccatacacaatgtccatgtgatgcctttgggaacacatccgcgactcccttgatgatgcttccatgtctgtcgcttatgaaaaccaattccgggtcatccggtataatggaattcaactttctgaaaaaccagttccaactagcatgattctcgctatcaattacaccaaacgcaatggggtaatgatgatgactaggatcctgagctgttgctataactaacatccctccatatatggttttcagaaaagttgcatcgatcactataactttcctcattgccttaaacccttcaatgcttgcgcccaaagcgatgaataggaacttaaaatgtgcagataagcaaacaataacttgtagctagtttcagggctcccacgcacatcactaacatgtttttttttcctcttaaagctgtggagtatgaacaatccaaaccaagtcttcctttaacaatactcattatttgtttaggtttcggagtattaagaagacccggatagtcctcatgcaacacatctgctactaatcgcggtgtgcctttttgtttttcatatctagttgcctccggacaccgagagcatttatgtatttgtgtgtttcttcacacaccaaaaatctgtctcagaagtttttgtaactcttaaataccaatcacaacccttagatgcttgactgcattctaacataagacggcccgtgtcagatttaatagttttcacaccaaacacttcctctttcgaagctctattaatcaaatcccatactgcctcctttgaacgaaattcttgacctactaaatcaccaataccatcttcccattctttgacaacggcagccacactttcttgtaccggacgtgcaagatgaacatattcttccctaacataatcattatcagaatcttcattaaccccacactctatcatcaacggttcaataacagttttagaaactccattctctagcatcataggttcactaactgtctcacgttgttcctctagttcaataataggttcattagtactcagaattcctgtatttgcatccgcaaccattacaagcttggcagccaattccccaaaattcacaccgcatgaacttcttcgctctactattggaacttggctattattactttccaaatcactgcataactctacatgcaaaacaggtctaaatccctctttatccaatgacgttaaatatatcaacacatcctcattatctacaatataagactctctacatgctttagatatcttgtaactcaatttcagattccttctctcaacacctagagcaatctttctacagatcttatctattaaatccgcatatgttattctctccaaagatgatgtcttaaacactataccgtatattgaatttttgcaactccactcatggtctgctgtatagtaccctccatagtcaaagtgtaggttcgtctggatcctcttcttcatcgcctcctacaaatataaacaatatattagtaccagttgaaccacgagatggaccagtgtctgattcaatttcagttcgtccatggtttgatgctgcttacacattgattcaattcaattacattgtactaattataatacttacaggagatggaagaactaaagaaggatcgtttccagattagccgcaacaaagatcgataaagaattcgatccaacagtaacgactcacgtagcacgcagcaccggagaaatcgacggccggagaattggattagctgacctagcaaacgctccccagactcgacggagccaatgtcgaaaatcgccgatgtcggaagttaatcggaaatcgcctatctcgtcggaattaaatgtcggctcgaattaaatgaattgggtcggaattaattgggttgggtcgggattgattatttcgatttcgattttgtttttgatttttcttttaaaattaattgatataattcattaagggtaaataggtattatccactacaagagtggcatgcagatcaaaagatggcacgccggattcaaatttccggttcagtggcattgttgatcaggactctcctgtaactgagtaatgagagcgtccatggtaagagagagtgaagcggagatttggagtaggcatgaccacggttaccgttattacggttacggtttattaaccaccggttacggtttattaatcaccggttacggttataaatatattttaaccttaaccttaatcgttatatatacggttatggttaaatacggttacggttaaatacggttatggttaaataccgttacggttatttgataattataatatagttaatatatgagacaaaatattatattttttaatctttataataaaataaataaataaatagtgatatatcaaataatatttattttacgtaattatgtgtttcaaatatttataatgtatcagctatctatttttcttaaataaaccaatgaataaacaaattaatggccataattataatgattgaattaattatattttccaaacaaaaacaatattaaagagaagatgttgtgagcattaagaaatagttttaagagtataaataataataatatgaactatttatgatttgatttatggtaaaaagagtagttgagtaacttcgatcgtagtagtggacatattaaacgatttcagttactattttagtgaaataattatttatttagaattatacacagttacaactatatttttaaggttttaacaatacggttaaccacgcggttaaccgtacggttaaccgacggttttgatacggttacggttaattaacggttatggttagtatattttcttaaccgtaatggatctattttcacagttaacggttacggttattaaccgttttatacggttacggttgggttacggttaataaacggtctggttacggttcgaaatacggttactgttagattttggtcatgcctaatttggagacgattttgttttagacggtccggacacgccagtaccaacagtattgtatgatcgagatgcaccctcctatttcgatgacccgggtgaagaaggtaatatccagtaatgatgagaatatcagggtaacctgtataactaaatgataaatctcaacatatcgcgttaatggttttgtgtttttgtcattgacagatgctctccagcgagcgattaaagatgctaactacgaaggggatgatattttcgtgggaagattgttcaaaaacaaagacgactgttgcacaaaactagcaatacatgctatccgacgaaagttccacttcatacatgccaagtcgtgtccaactatggtgatagctgtttgcgtcggcaccacgtgcccatggcgagtttatgcaacaaagttagatgatactgaacggtttgaagtgaggacggcgatactgcagcacacctgcagcgtgtacgccaggggggacttccacaagcaagcatcgaccgcgattatagggaaggtgatgtgcaccaagtatcttggtgggggtagagggcctagacctaatgagctgcgaagaatgcttaggcaggagttcagcctcaatgtttcgtactagaaagcgtggagagcgagagacatagccatagacaatgctatggggtccgctatggggagttttgcattaatccagccatatttcaaactcctaatggcaacaaattcaaactccattaccgcgttagagactgaaacggataacacgggagttattcgtttcaaatatctattcttcgcacttcacacatctatcaaagggtatgcttacatgagaaaggttgttgtcatcgatggaacgcacttaagaggacggtacggagggtgtcttgtagctgcaagcgcccaagatgcgaatttccaagttttcccactagcctttgggattgttaatagtgaaaacgatgaggcgtgaacctggttcatgaacaagctaaccgaagttgtttcagacgagccagacctagtgttcgtctcagaccgacatgcttccatctacgcaagtattcgaaaggtacactactttgttaacttaattgttagcactataaccgcttacggaggtaactatattctcgtcgttatgttatagggattattaatttgactggcaaaaacaatatatgagttctaactagtaattttattatatattacgaagttagaaaatagaatacctaagtacataaaacaaagacattaggataacattgttgaataatgtagataagtacttatcgtgttaacacttatcgggctaatgaaaaatttattgtctacatacccaggtgtatccaatgtcctcacacgcggcttgcgtggttcatttgaaaaggaacattatcaccatattcaaaaacgaaggtttaggaagtttagtttcaatggcagcacgagcctaccgcctaagtgacttcaataagatatttgcggagatacgagcagttaacggtccatgtgcagactacctaaccggaatagggtttgaatattggacacggtctcattttgttggcgagaggtacaatgtgatgacaagcaacgtcgcggaatgtttgaacaatgttttgacaatgacaagggattatccagtgatatcgatcctagaatcttggagaacaacattggtaacgtggtttgctctgaggcgagaagcagctcaaatggaagacaacatattgcctcccaaggttaacgaaatggttatcgagaactttgaaaaggggtcaagttatgcagtcttgaaaatcggggatggtctatatgaggtaagggatatgatggaatgcggatacgcagttaatctgtgggaaagaatatgcacctgcagacagtttcagctcctcacaataccatgttcacatgcaatatccgcggcaatcagagaaggcgtaagggttgacacatttgttggagtacagcacaccgtgccacaactactgttagcatataaggaattgattatgccggtacctgatatggctacactagcaccatcaccaaatgatgtcggaggagggaagctagccccgccatatgtgaaaaggccagcaggccgcccaaggaaaataaggctattctctcggggagaattcaaagtaatattaaagttatttggtaagtaatgtgaatgataatattattatcatggttagtgatttgtatggaatttatggtaattcagagaaagtcgggaagacggtgcacacgctgccgaaccatgggccacaatcaagccacatgcaagggaccgatcacggtaacaatatcttcataaatcctatttaattaagcagtgaaatatatggaaatattaataacagaattggtaacaaacatgacccgtagaatgatgacaaggcaagttttttggcggaggagaatacagatggaagacgatgggcaagtagatcagctcaacgtggtgttttataaataatgatgatggtgtcattagaataattttgttgtatataaagcggattctagtggccatatgtataattatcggaggagatacccatccgttaactgatgtaatgaatgttttataagaaacaagttaatgtttaattatcagattgaaaaggttcatcttatgttaccaacgtaaaccgttgtcatgctatatcttgtatgaacgcggtaacggcgttttgtaccgagttagacataagtagtattatagtgcctctcgtaaacaatattacatattaacacaagcaaaacacagactaaattgacagtatatgtttatagaccgcttgtccagaaacaaagttatcaagatgctcgacagacctttgcttcagtgtttacattgaatttgctggaaattgtcctaaatattttattaacgtgtcaggtgaattataatataatagtattatttccattcatgaaccacatacacttcgtttaaagcgacgcgcgcaaagtattatatgcttatatgaatcttactcggtaacaaatttatttcctacacgactatgatcctacctagtaacactagaatttatatcctacatagtaacactagaatctatcgtgtcaggtgaattaggatctaatataattattaccatctattaactacctacaaattcgctgaaaagacgtgcgcgacccgaattaaggtaacaggttcatatgtttatatgtctcttagacggtaacaaatttatttccggaggccgtgttagacgataaaataattaattcacgcatctaaacaatgacttacctttacgacactattctcattgacctagattgaaaatcgtgttattcattatattcacgtaataaatatattaacatgatggtattattaatccccacacgtgaaggatctgcttagtataaccggcaacatacggattatggtgagagtgtactgtttgtatagcattgggatacacgtattagttttaaaatatatgatttaataggttagtaaacatttatttatatgatatcaaatttatccggtaaatcttatgttaaacgaccaatatagacaattgaaatacaaaaaacatcaaaatgcgaacgagtctagttttatcgagtataataaagaacataatccagcgagcataaaaaaaacatagtccaaatctcatacatgaaacagtaaaggatagctaaggaacaccagcgagaattatagccgaaacaagctttttggtttcatcttcaatggaatcaatagaatagtcaacacagtcgtccataccaccgacagcgtgtgcctgaatgagaaagagtatcatcaagccagcgtcaacgtgattggtcacctgtgggatgaagagagacctttccattgcaaatggactcggggatagctgagtcatcgttggattgagagccgcctgtttgaagagaataggaagcattctggcacctggttcaagatccgtattgatgctggaatctgtgcgcaaatgaacattacagtctagaacaatgatcttaaagcatgtgagatcaacacacaaggcaacccaatgcttcttatcaaagttgaatggaagatagaggaaatcaacttcagtaaacagctgagcacggtcagagtcgccaacgccagaaacggcctcgacccaaagatgaagggaactcaaagtcttgaggaataggagttttgatgaacttcgggtaaaggcggcacaattgggagataaacttggtatcaagcacatcaacacgaagcttgtggccgtcgacgacgtcagtacggaggacatgcctgctaaactttaacaatccgtccattaccttcaagaaagaaggaaaactaattattattgggtaaataaggaagttatctaaaatttattgatatgcgaaaggtaaccttgtttcccaacgattttttcctctcgattaactccaggacatccttactactaagcgtaacatcaccaaccagagaaatagagctaagtcacgagtaaataaaatattagacttccggataatctttatgatctatcctactcaaatagttaccacgtaataattttacctgatggctttgagtttcttcaatgagcggttataacgcttttcagaatctacagtctctctcgaaatattagcaataggagacgtgtgtcctaccaataactttgttttcttgtcaatggcaaaccttccatccaacttgcttgatctggttctaagccttttactccttctccctgcattattaccaacaacactagtctgagtgagaacatccgcctgcatcaaaaaagtgtaatatataaaataaatcaacgtaatcataatgactatgagttagatacccaacctgaggctggacaattgccatctgggaagcatttccgtaagttggaatctgttaccatataacttttagtttagcaatccaattatactttaattaggtcggtcctaaaataatattttcaaccattattcaaaatggattttaccttaatagatcctctaccctcggttcgaacttctcgcttgttaattcctatacagataacattaaaaatataccataataattatgttacaatgctaacactttagatagtaaaaaaactgtatgaggttgatgtttcaggtggaaaaaaaaaaagacaattacttgaatagaacctcttacgaccggtgaaacttctccccgtatactttcctataccaaataacataagagttagacgataatatatatgtgtaaagctaaactatgaattagaatctaatacaaacccctgcatcaacttgtggtccaccttgggaaccctataccaaaacccaaaccggttagacgataatatttatattaaaagctaagctataaattaaagtcttatacaaacccctgcgtcagcttgttgtccaccttgggaaccctataccaaataacaaactggttagactataatatttatattaaaagctaaattataaattagagtcttatacaaatccatgcgtcaacttgttgtccaccttgggtaccctataaacaaataataatttcgtttagtggaccaaacactgagtgtttaaaaggtgacgagatgacgaactcaaatgataaaaaacacaattacctgacggggttccccttcctttggtatctcgtctacacttggtaatgcctgtaaacggtaacaatgatgttatggaataaatatgtatataaaagtaaaacctatatttttcataaaattaacaaacctccagggtcccttgatcttcattttggggatgctatggaccgataacaaaatgattagaatgtaaaataaaaaaaatcagttaaatatgatatacaatataaataaaatgaataatataccttagtagattcatgatcctcccgcgaaacgtcattcccaacacttaatacctgtatcgtataacaaaagaatcatgcaaagatgggtactccaattacctggtactcgagattatttaacaatacctcttcctcttcttctgtatgaccggtatctttatggacaacatctgccatttccgtatcatgtttctgtaaacaagtcggatatttacaataccattaaatttatcaactaagcttaataaaaccataattcgcaaacctcgtcatctggtaaagtagaatctgactgaccactaccacaggactgtaaaaaaaggcagaaacatttactgtaagatgggtccgcaatagtaacacaggaaagaatgggaaagaagacgaacctcggaagaaaccacgctatcgggcagcactgagaagtaacagtctacctccggtaatatctaccaataagtaaaaagatatcaacaactgtcgaattacatcaccaaaaaggtagtggtcaggtaacgcgttacctgcgagttaacggcagcggcaatcccatcaacaaaattatcgtctctcgcaccctcggggacttgtctgccgcggttcgcctgtttgccaaggcgtgtagaacgacgggtctgcgaacgaagaggggggacaatttcaaaatcatcgtctccatctgagttgggaaacggattattacgggtcagaggaacatctttatctttcccattgccagcaggagcttctaccccattctcagaagggatatctttcccattattagttgatatggaagtgtttgcgataaaccaatcagtaacacctttcattatctttttgtactgcgtggccaatttagcatctaacatccgagataacgcgttcatgtcaacgttaacaatagattcctcttcatcaatcgagttctgttgggtcctccgaatcccagttgaatttttcttaaatctgccctgcttggccgattttctgccccgaccacctttcaacattgcagatttttttcgttttttgggggccaccaccacttcggaaggaacacaacccccagggaacatatcatcgttaaacttgaaaccttcggcgaccagcttaaccatagtgtctacacgaggatctgcttcatcatctgaccacgaaatatcttgggccggatcaataacggcttcaggaagtataattggatcaaccggagtctgcaaaaacagcgtggtaacaaatcaattacaccggtcgctgaacatttagcagataacctggtgaaaatgttaacgggaaaaaaacattatcatctactaataaatttatcacatgtcctttgttgtcaagatctttcgcatttccaagcttaaacgggaccacctgtcgaggtatcagttccaaagtctcttcgtccgactcagaacagacagtgtcctcagacacaggaccttctttaatagctggtgcggcttgaagcacaacaagctgtagggcgtataatagcccttgtacatcaacagaagttgttgcaagctgctcgacttctctctcttttatcgatttcatggtcatctcaaatgtcaatcgaccccacggataagcaagaaaagaagacagattttccaccatctcagcgtgctctttaacaattttgggataatgtgatgtgggcaagaggtagccgtcaactagagcgagaacagcataacgaatccgcaaagacggatcgtcggtaaccttcttcttaagcatcgtgataacacgagatacagtaacatcagactcaagctcaaacagagtgctgtaaaacggaatctctttctcagcagttcccttctttcgtttttttggcaagtcagggtatcgcccacaagcaaggccagtaaccaaatgaaactctcgcagagaaaatcgaacaggtgtaccagcataaactacccagatctcgttggctttgtcaatgtccaacttgcgaccaagcagataaagcccgaaagtagtagaccaggcgggtttgtttggaaaatccaacaacccaccgagaggagagttcctgatgagccggatttcgtcttcctctaatgcgtcgataatgccatgtagaatcttcatcttgttgtaaacatttgccctctccccaagaacttcttcgccggcagcgattatacgatgagggagttcaggagccgccatctacaaaacccagaaatttatttcagaacacaaatcgaactgaaccggaattaagaatcgacaactgcttcgactttatatggttacctcgacaaaacaaatgggaaacgccgagcttcaatcggtgatattgttttggattctggaggaacaaaactggagaataacggagaaagggatagaggggacaataaaaatgagagagaaggcatataccaacacatacaactcttagaatttgaaccgttctcatgttaattatcacacctattctccaaaaaatctcgaaaaatgaaatctttgaagatatgatgtctcggttctgacacacgcctagtatatatctcacttctgatttgatagaggagtaggggtttagatgtaataattttgctacagacattatcgaaacagtgtgtatttgatggacttaaataacaactcttctatggtcagatagtgtagattcccttttttcaactaagtatgtctttttttggtctttattgacttacccaaaagttaagtcataaatttataagttgacaaaaaaaagagagagtaaagcttatgttctgcagagactgcggtgttggatcaaggaatataaaacaaaagagtaaaactaatcccgccatatataaaataaccatgtagatctcctcttgtctagatcagctgcgtagtctgcatcgcaataaccacatatacttaagtctgaattcttcttgtaacacaaccttgtgttcaacgttcctttgatgtaccttagtttccacttcacacctaaccaatgttcttttgcaggctggctcatgaatctgctaacaacgcctataggataggctaagtcaggacgggtaccaatcatggcatacatgattctccctacagcgcttgagtatggagctgacttcatatacttttcttcttcgctcagtttctcttcagttgcagatttcatcttcaagtgagctcccagcggagtcaatgctggttttgcttccaccatgttgaatgtcttgagtactttgttcaagtaactctcttgagacagccacaaaacaccagcttaacgatctctgatgatttcaataccaaggatctttttagttgctccgagatccttcatctccaacttattactcagctctttctttaatgcgtctatggcttgcatgttatttgccgccacaagcatatcatacacatataacaacaaatacatggtggaacaactatcataatcacttctcttgaaaccaatttcagtcatgtaatgatcaaatttttcattccactgtctaggtgcttgcttaagaccgtacaaagacttgttaagaagacatacctcattctctttgaataaggattcaaatccttcaggcggcatcatgtagatcttctctttcaattccccatggaaaaacgctgtttcgacatccagttgctccagttcaagatttttttgagccactattgaaagtaggattcggattgaaacgtgtttcactaccggtgcaaagatctcaagatagtccacgccttctctttgagcatacctttggcgacaagtcttgccttgaaccttggttcttcaactccaggaataccttgcctatacttgtatatccatctgctcacaatgattctttgtttctcaggtcttgtgactataatccaagtatcattcttcagttgagactcaatttcttcattcatagcaagtttccacttgtcctagttttcatctctgacagcttctttgtaatctgccggttctattgcatcaccatcttctgttgtgtatagagtttctgcaaaatagtcctcatcatcaaatcttcttggtgctctgattactcttctttctctatctcgcaccagatgagaactaagaggagattaatgtacatcagtctcttcaatatcatcagtttcatttcttggtggtgtactagtcattgagcctcttgtagcaggtgtgacttgagcttgtgattattctccacctgagctgatatctctttcagcttcgagatctaagtcaatgtatgacccattgtggtcatcttcttcatagagaaattgttattttctctgcattagatccttgtacactgcattctcctgaaaaatcacattcctgctcactacacacttcctttcttcaatcagccaaactttgtaaccctttacaccacttggatatccaataaggactcccttctttgccctcagattcaacttcccatcatcagtttgaacgaatgtaacacaaccataccttctcaagtagctgtatattggtgcttttccagaccatctcttgtccggaaactcaaagttattcgcagagcaaggagtcttattgatgagtagcactgcagtatgtgtagcttcagcccaaaatcttttaggcagtcttgagtcacataacatacttctcactctctccatgatagttctgttcatgcgttcaacaactccgttttgttgtggcgtgtatgggcaggttctatgcctctggatacctctctcttcgcaaaacccatcaaacatccggttacagaactccagaccattgtctgttctcagagttttaactctgttaccactttggttctccaccaaactgatccaacttacaaacttctcaaaggcttcatcttttgttttcaggaaatacacacataccttccttgtatggtcatcaatgaatgatataaagtattggcagttccctaatgccattggcattgtaggtgctccccacaggtcataatgaacatactcaagcttctctttagtgtcatgctgagcgaagttgaaaccaatcttcttagcttttccatagatgcaatcttcacacgtatcaagcattgacaccttcttcttatcaagaaatcctttcttaactagcaagctcatgtttttctgactcatatgacatagccttctatgccataacacaatgtcatcatttgctttagctactgcaagtgattcatcagttgcaggcttcccatggagtatgtagagcgtatcataccttcttccctccaacagaacttgttcaccagcattaactctcaacatatcattttctgattcaaacttacgacccgccttttcaaaagttcccaaagataaaaatattcgatccatatccgaaatgtatctcacattctgtaatgttacagtgagaccattgtcattcgcaatcctgactgtaccaactcctttgactcgtgagatagtcttgtttcccattcgaactgaacatcctgcttcttcatcaaaatcttcaagccattccctcttatgggtcatgtggtagctgcaacctgtatccattatccactcatcttccaaatgaatgtcagtggaggataaagcttctgacacaaacattcctgcagcttcaacaaaattttactgaggcttcaacaagatttccttatcctcctgaggatttcctttgttgtttccctgattcttgaactgaggcttgttcttgttgggacatgtagacttgagatggccatcttctccacagatccaacatcctcatttagacttagacttagacttagacctctttcctttccccttttccttatgttcactccttcctctattgtttgccttatccttgacatacagaccctccgcttgacctttaatacttttcttaactgacccaaactctaactctttagaataaatggcagcagtaacttcatcaagtgtcaatacagtcttaccagagctatattgcaaagtatccttcaactgatcaaacgacttaggaagtgacatcaacaacaatatggtttgatcctcatcagagactaaaacatttaagttctctaaatctgctactatatgaagaaattcatcgatattaccttccatagacagattctcagacatcttgaatctatagagcttctgcttcagatatatctggtttgggagagctttagacatgtagagcctatccgaggcttccaaaaccctatctgaaacactcaaaacgatggtgcttctagttttcctctttttctcttcaaaagcttccaccttttcacattcttctttctcttcttcatcagatttctctgaatctctatctttccccatcggcgtctcagcttctcttagaacagaactcaagcccaacatatcactgtgagctatgagcttctctttccccatcgtgtaatctccacgaccatcgaacttctcaacctatatccttgctccagacatggtttaaccgtttgttaacactgcggaaccacaaacggactgtaaccaaacctctaataccaatctgtaaggatttgatcactcaaaacgtcgacttttcttgagaacaaaccaaacacaacaccacaagcaagaaaattgtcgttgttacaacagtgttgagaacagaacacaagtagacccgaaaataagaacaatgagagtgcaagaacagaaacagagaacacacagcaagtttggtaacccagttcacatcaatagatgctacgtctgggacgagactgttctcggaatccactaaatcagagatagtgtttacaaggagaattacaagtgaccactcgatacccttcactagtattcaagctcactctatatcactctcctagacctaagaaactctgttacaagcttatgataataacaagtttctaatatctctcagccgccttagttctctctacatctcttaataacctagagcacctcttttatactgaatataactagggctcccttgtgctgacgcggacactcttgcaccatggaaacgccaaaggtacagtcttgaaaccgcgtctgttaaagcactccttaacagctagcaccacatacagacaaacttgtcctctatggctgagtggcggcaattttccttttgccggttcaccatgaatgtgatccaaaagctaactcaaccagggtttgatttacttcacctgagttaagtctcaacggatctttgctttaaacatttgaaacctttcttgaacttcaagtcatcatattcttcacagttttatatataagaaaacatgaatttaacgtatgttagctacgtatggtagttgagacgttaaataataaaacttcctaagtgaatgtcgatctataaattgttcaaagggcatggccagaataaataaagaaaactacaaaagatagagtaacgattcacatgcctctttatatgttgcctccaagctccaaagtcactggatttgaaccaaacttggaacataattgaacaaaagtggcagatatgacaacttagatgctgcaaaatccacttttgtcactttattatcctcctcaattatgtgtactatgcattcacagtgaatcttgccattcttgaccctacgtttccgattacaacacacaccgaatctcttctcctcgtcaaaaataagccttacgttagaccaaatatcaaactcaaggtgatccattgctaagaccatgctccacgacaccactttggtctcatcaatcttatttgttagccatatttctgtctttgatgtatttgcgccatgtaataacacaataagtttttcttctttaacaacggagagagccaaagttcccaacatagttgctatgtgacacgacggaagacacatacgttcaaatctctctgttttataatcaaaactgactaagccgaggtgtgtctcttccgaaagatggttgtcaatggagcagcaaattagtaagtccttcctttcaaagatacgctgtaaagactagcattcactaagcgacagtccggagtgacgtcaagattcctccatgaattagactttatgtcacagcgaagttttgcttgtgaatatcaaaataattatagctcaatattttgtagctattattatttctgaattccttgtcttgccaagatccaagagcatatccgtagtagcaacttgaattgatttgaatccacttggtttgaccagtacacgggttccaaactacgagtctagggcaacctctcataatggtacataacaataagccatcgtagtgcaaaacttcctctatatcagctaagtttaaataagaatgagaattgattatgctaagttcacctgttacatccatagagattaaagttcaacaaataaaccctaaattcctttgtgatcgtgagagctagatattgtcttacggctttatcgaagtgcttttttgcgaatcttgtatcgttgaataaatggttccatgttttgcaagtagatcgtatctcctccacgatatcctctggaagttccgacatcgataggtgcggtttggttttttgactttagggtttttagttacctcctactccgaagagtaataataattcgtaattaaaaatagtttgaaattttggtttggttcggtttggtttagtttggttcgggttgatataaacctgataagtaaaccattacacaaatacaatatcttcttctgtgactgtaataagattgatatggagacgatttcattgtaattgtaaccatggagctatgatcagaacttcgtctgtgttgaactccaccaagtacttcaactctcacattaaccatttatcatctcatggcgatcacaagcaagttctctcaacattctcttccatgctcgccaataaactcttacctgatacttttactttccctagtcttctcaaagcttgtgcttctcttcagcgcctctcttttggtctctcgattcaccagcaggttctcgttaatgggttctcttcagatttctacatatcatcttcattggtcaatctttatgcgaaatttggactcttggctcatgctcggaaagtgttcgaggaaatgcgtgagagagatgtggtgcactggactgcgatgattgggtgttactcacgcgctggaattgttggagaagcttgttcgttggtgaacgagatgagatttcaggggatcaaaccgggtccggttacgttgttggaaatgttgagtggggttttagagattacgcagttacagtgtttacatgactttgctgtgatttatggttttgattgtgatatagctgtgatgaactctatgttgaatttgtattgcaagtgtgatcatgttggagatgctaaggatttatttgatcagatggagcaacgagatatggtttcatggaacacaatgatttcagggtatgcttctgttggtaatatgtctgaaatcttgaagcttttgtacagaatgagaggtgatggtttaagacctgatcagcagacatttggagcatcactttcagtgagtggaacaatgtgtgatcttgaaatgggaagaatgttgcactgccaaattgtaaaaactggttttgatgtagatatgcatctcaagacggcattgataacaatgtacttgaagtgtggaaaggaggaagcttcatatcgggtactcgaaacgattcccaataaggatgttgtttgctggacagtcatgatatcaggacttatgcggttgggtagagcagaaaaggcactgattgttttctcggaaatgttacaatcaggatcagacctgtcgagtgaagcaatagctagtgttgtagcatcttgtgctcaattgggttcctttgatcttggcgcttcagtccatggctatgtactgaggcatggatatacactagacactcctgcgttgaactctttgatcacaatgtatgcaaagtgcggtcatttggataaaagtttagttatctttgaacggatgaatgaaagagacttagtttcgtggaatgcgattatctccggatatgcccagaacgtagatctgtgtaaggccttgttattgtttgaagaaatgaagttcaaaaccgtgcaacaagttgattcatttactgttgtctcacttttacaagcctgttcatctgctggagctctccctgtagggaaactgatccactgtattgtaatcagaagctttatcaggccatgttccttggttgatacagctctagttgatatgtattcgaaatgtggctacttagaagctgcacagaggtgtttcgattcgatctcgtggaaagatgttgtttcatggggcatactcattgcagggtatggttttcatggtaaaggggatattgctttggaaatttactcagagtttcttcactctggaatggagccgaaccacgtgatatttcttgcagttctctcatcttgcagccataatggaatggttcaacaaggtttgaaaatattcagttcaatggtcagagattttggtgttgaaccgaatcacgaacaccttgcttgtgtggttgatcttctatgtagagctaaaagaatagaagacgcattcaagttctacaaagagaactttaccagaccttcgattgatgtcttgggtataatactcgatgcttgccgtgcaaatgggaaaacagaggtcgaagatataatttgtgaggatatgatcgagttgaagccaggggacgctggacattacgtaaaactaggacattcttttgctgcgatgaagagatgggacgatgtgagtgaatcatggaatcagatgaggtctctcggcttgaaaaagctcccgggatggagcaaaatcgagatgaacgggaaaaccacaacatttttcatgaatcatacatcacattcagatgatacagtgtctctattaaaacttcttagcagggaaatgatgcagtttggttcaaataattagtgtcaaacagaattatgacataaattttataattgcaaagcatctgctaaaaataggatctaatgatgcgtgaagtcttgaaaggatccaatacttgggggacatttcaaggagaacagttactgagaatcttctaagattcaaacaaaagagaagacaccattaatttgcagagagaaagaaatagagagagatgaccagaaggcagaagaagacggcgaaggtggtaacagtggtaatgggactgtgtattgtcgcatatattgcaggaccgtctctgtattggcatctcaatgagaccattgcagattctctccactcctcttgtcctccttgtgtatgtgattgttcttctcagcctctcctctccattcccgacggtaatcatcatcattatcgttgtctttcctttcttctttccctggtcacaaaacccaacttttgaaacgtttgattcaatgtttcttctgcaggattaagcaatcacagtttcttaggtgagtatttttctggtaataactttttatatatttagtaagaatgctaaaacgtcgcagatttcacgtgcattttggttggatcttgtttcattgccaagattgcatgaggcacgaggaagggagtgaagagagcgagagtagttttactgaaatggtagctgaagagctgaagctaagagaagcacaagctcaagaagacgaatggcgtgcagataggttgctgctagatgctaagaaagcggcgtctcagtatcagaaagaggctgataaatgcagtatggggatggaaacatgtgagctagcaagagagaaagcagaagcagctctagatgaacagagaagactttcttacatgtgggagcttcgagctcggcaaggaggatggaaagaaggaactgttgcttctgatgttatctaagaacagatcttttgcttctaaaagaatctttttctatataatggaaactctcaatagagataaaattttgttcatttgacaggttttgtaattgtttcttctttctaaatcctactttgtagtgaccttgacattagtccggtctaggataacgttgaggatcttcccaggcacatagattcgcttcttgattgattgtccatctagatatttcctgagtttgtcgtcctgtgaagctagaacaaaagcatcatcttcagagcatccttcttcaacctctatggtgcctcttgtcttgccgtttatctgaactggaagaacaatagttgtgttctttaagtaatccgggtttgcctgcacaaataccacaacaatcagtaccgcaaaacaccttcctgtgttgtgtttatatgttcagtttactatctctaccttagggaagctttcataggccagagaatttggatggcctaaccgcgaccaaagctcttcagccatgtgaggcgcgtaaggtgagagcaaaagaacaaaaggctcaatgattcctctaggttgattattccactgtcaaagtaaaagaagaaaccggagaaaagatcagtacttgtaaagtgaaaacacaaagctgaccgatataagagtctaagactaaccttatatgccgcattaacaaactccatcatccctgaaattcccgtgttgaatcgtgtactctcgatttcctctgtcacctgcagattttacatacctattttaagtaagatgtaaacaaaccgcaaagagatcataaggggatgagatgacctttgcaatgcatttatgaagagttcggagttgttcaagggttggttcgtcatcagttactaaggttccatctttgaaagaaccatcagactgaggcaaaccaatgactagtctccaagttcttgccaagaaacgatgcacaccttcaatcccactcgtgttccaagtttttgagtccctagtagaaggaaatgaaggcagatataaacattgagaaagcgagaaaacccgaaaaaacaaatttgggattgagatatacctaaatggtcccatgaacatctcatacaaacgtagagaatctgcaccatactctaatacaacatcatcaggatttacgacatttcctctacttttgctcattttataaacgcgtggaatcagacgaatgctaggatcctccttcagaacaaaatgatctccggacttgataacctagaccattaaagatcataagattaaaaacactggagagcttatcagttttagtgaatgagaatgaagattcatactttttcttccgggattgtcacttgttgatgttcatttaaccgttcttcagtatctgcagatacataatttccttcttgatctttccaagctgtatattggacctgcaaaagtaaaacaattaagcagaaaacattcaacggaatgagtaaatttgaaaaaggcggtgcaaaagacgacttacttccccaaggatgattccttgatttatgacacatttgaatggttctttcgtagacacaacaccaatgtcataaagtacctggaatgatgcagtaacaaaatttgtagttagatcacaatataacttaaagaaagggaggtttcaaaggatacacaccttgtgccaaaacctcgagtatagtaaatgtaaaacagcatgctcagcaccaccaacatatacatctactgggctccagtatctgccacaccaaaataaaaacttaaagatctggccaaagatggcacataatgattgcattctgaaatgctctcacttttctttttccttgtcaactaatgcttcagggtttttcgggtccatgaatctcagatagtacctgaaaaatcatgtaattttgttcagtttctcagtattaaaatcaacatccttcaacaacacactgggtactatattcaacaaggttcaagatcgaattcggcctatcctagaaccatcactatgagagagcatcaaggattctcaaatgggagatacattttttgtaatgaggaggttatatacaagaattaagaagggtaaatatctaccagcaagacccagcccattgtggcatagtgcttgtttctcttttggcaggttttcctgttgaaggatctacagtgttcacctgcaaagtcatcgatcataaccaaaatgtccatggcataggcatacccaaaaactaatcatattaaccgcaaaacatacccatgaaactgcttttgacagtggtggttcccctgttccagtgggcgtaaaatcatttaactcaggcaaagtgaggggcagttcagattctgaaatagcaatagtttcaccagactcatccaaaattaaaatcgggataggttcaccccagtaacgctgccgtgcaaatagccaatccctcaacttgtaatttacctgccaaaaaccttttgtgtaagaaaagtagaacactttttacataatccaaatgagaaagacatgaagatgaacctttttctttccattgccagttctctcagcccattcaataacttttaaagcagcttctttgctagatagttgatttatgtcaagtcctgtttctaaagttgaagaattttcaataatgcccaatccgggataaacctgcttagcatcatcacttgaatttgcctcatttctcactacccacttgatgggaatgttatacttcaacgcaaactcattatcccgagtatcatgagctgggaccgccatgattgctccggttccataactgtcacatataacaacgttctctgtttcacacaaattcatttcaaggcaatgtaaacagttagaccaaactaacctagctagaacataatcagctacccatatgggaatagcatctccattagctggatttttcgcataacatcccgtaaatacgcccgtcttgtccttctgaagttctgttctctcaagatcacttttcctcgaagcgaaatctttgtattcctcaacctgcaaccataagagagaactcatgaaaatctgaaaggcaagttgaataatcgaaagaagaaaaaactcttacttgctgtttctgttctgcggttacaaagtaagacaacaactgatgctctggtgccacaaccatgtaactgcgaatggaagcaaatatcatattaagacaatcaagatcaagatttcagatgttgaatatataattaatcctttaagcatacgttgctccaaaaagtgtatctggcctcgtggtgtacactgtaatctctttgtcagtttctcggccttccccatcaagaattgaaaagttcaactcagctccttcggatcttcctatccagtttctttgcatttcctttatactttcaggccactcaagctcgtccaaatcttctagaagacgatcagcgtacgcagtaatcttcagcatccattgcctcatcggctgcttggtaataaacaatgtcactgtaaaattcatgagaattttcaaaacagaggaaatacagatttcgaaaggggaaaaacgacataatattcccagatggtaatagatagtacctttcttataaccgggtggccaccacgctcactaacaccatccaccacttcttcattggccaaaacagtaccaagagccgggcaccaattgaccggtacttcagcctgagtttacaatctttcaaagaacttttctatacacaaatgcacggttttaacatgtgaactagacattgattttgttgacctgatatgccaaacctttcttataaagctgaagaaagatccattgtgtccatttgtagtagtctggctctgttgtagaaagttcacggtcccaatcgtatgagaagcccaatgatttgagctgcaaacaaacaaaagaactacaattgttaaggtccccagatctttactcccatggtaagacctaagcaaaacagtccaaagtaatggcttttgcataatcttcaaggatcagtaatcctaaaccatgaaacaagcataaatttctcacaacgaaaccgataacaaaactgagaaatttcttctgttagggaaatgatgaatagaagagaatagtaacttttctaggctagtgctagattgaaagaaatatatcacctgcaatcgaaagcggtcaatgttcttcaatgtcgtagttttcggatgggttcctgtctgcaatgcagattacaaatactaaggacacaaattttatcaacaaaaacatccatacataatgacttgagaacagagaaaaaaaatggacctcaatagcatattgttcagcaggcaatccaaaagcatcccaacccataggatgcaacacattgtaaccttgcatacgcctaagcctcgctagaatatcagttgctgtataacccaatggatgtcccacatgtaatcctgctccactgaagaacaaaccacaaaacacacacaaaaatttcatcttttccacaaaacccaaaatctgaaaacctatcatctattcaaaatcctaaccaaggatgctactgaaatcaatggaaacttctcaaaaccacaaagttcatttctttaagctggaatagccaaatctgtgaactttctacataatcagtattaaaaggaagagaccttggatatggaaacatgtcgaggacgtagaacttaggtttcgaagtatcaacatcgtctggtgtccggaaaattcggttatcttcccaataacgttgccacttgggttcaatttcgtgaaatggatagacccttttcaattcaatcgatgtagtcgccgtttccgacaccaaagcttcttttttgctaccatgagtctccgtcgttgagctcctgactccgccgcgataagagcggcgccaacggaaagggagacatgaaaagggctgctttagaggagattgaagcgtaagagagctggtgaggcgtgtgtggcggcaacagtgtgatagaacaaatgggtcagaacgaatttggaggatttgatgatgagagctcattctggttttgtttcgccggagacgaatgtttcagtggataattgagataagtgtgtgtgtactcttttgaaccttgagaattgagatcagttaaaacgaaggttagcgaaacgacgccgttcccatcaacagttacagttttttatcatttggtctaacggctaaaatattttccctgtgggacgatcaagaatgtaatatcacaatgattaaaaggaaaacagcaagagcttcctgagttgttgggagtcttgggacagtttaggctcaacattgttttggattaatttggattttggactcaagtccaaactagagaaaaacatgaactatgaactccttaactcttaattatcattgctttacatatagaacgttccttattcccctctcaccaaacttaacaagtcacgatgttcaaatttattgattcattaactctcttcattaatatttaggtgcactgtcttaataaatttgcagatttacgagaagagtttgcagcccatcgcattgcttatttacaattcattctctataaattagcctcaatagttctacttttttacttcattcacataatagcctctcactttttgtctacctttcttgaaatatatcgatcatagtttctgaaaaaatgtcttggttacatttctctacgtcattcgctatggagttgagattgctactattgtgaaatcaataatagcgttatttttttcttaggagctcaacagtatataagtcacgacattgttatgttgtcgatacatatatactgtagtaaaatcagtagttacagttttttaatcgttaggatatcgacgaggtgtaaatcatgtacctcttttttttttttgggatgaaaaatcatgtacttctcctattattagatataagaatgatttcttgtactgtaatgtggctttctataagtttttttataatttctgttgaatacaaaattatgcaattcttgttttattattgtttatatctttttgtttacttctacaaactcttcggctttcaatggatgacatgagaaaacagactaatccgttaatcgactaaaccactctatttttgaatcggacaataaaccaccacggactaactttaagtaaaaccggtctgtagttcaacttgttctatctttttcaacctacactagcatggcttatatagtttatgaaaggtacacaaaaatggtttaaatcgcaaatgaatttgtccgccctaaccgcctcaactattcgaccatttcgtatatttttgtttggcaagattgccacaaattcattgtttgaaaaacacccaattaaaatgatattattctaaaaataccctgaaacttcaatacttcaacaattaaaacccatcaacaacgtctaagcaaaaacacaaacctctctatgtacacataaaagtacatacatacacgaactatattcatacttaaatcgtatgcagatgcttttactgaattgaaaccgttaaactagacttctttaccgttaataacggccaaagatggagacgattcaccgctgattctgctcggtgcaggagtgttcctccgcgattggcgttttgttggcactatgatgacttcattctccaattttccgatcatgtcaccgtcgtcatcattatcaccgcctttaaaaaccggatgaatataagcgtcttgcaagtaacctttcaggttcagatttggctctcttgctctttccaatgtatctttcatcatagcttcctgtaaaataatcaacattttgccatttctggggctcgtaaaaccgatccaaacagtgacaaaaatcgaactaaacagaaataataaatctagataacgtagaagaaactgacctgtaaggggtaacggacaaaggcaggttcgaaacggcctttacagaagcggtggaaaccgatagtaatcacaggaagagcaatgagaaacggagcagctgaagcggcatgttttgtacctaacaaacccatcagaagcaactgagatatgatcaatgccgttataacccgtccatgaacatccggccaaaacgcagcagcgctctcatactcttgattatacacatttatgatctgagaataagaaaacaaataaacagaaggttcaagttatcaaactagccagtttcatcaaatttaggagagaaagaaactacatttacctgatggcggtatacgacataagcaagagcgaaaaagactaagataaaaggaagaagcattggtgtcacaggagcatagacaagaccaagaaggaagtaaagctgtatctgaggctctccagtgttgaaaccgatgcttcccgggttcattgcttcctctctgtctttctctgttttcaccaagaatgcgtttttgaggtggtatataatgagaggtttcaacataagaatctctcctgcaactcctgcccaaccatcaaccattatatatgtgataaagaaggttgctttcatcggtatcgccatgccaatagtcttagggattctgcacagatttttaaaaagaagagtccttagaaaagcctgtaacccaaaaagaacgaaagattaacagagatagagagtcacgtactgattaggcgattgattgaggaaagagttaagctgctcaaacgcagctccagcgataacacttccaagaaagacgttcactaagttaaagatgtaatatctagacgcggatcgtctttctaagaatgaaactgaagtaaagccttcaaatttggacatggtcatcagtatggctggcagaaagatgaggaaaagcttcaacgcaataccggctagcaaaccttgtatcagcgattttatgaaatctctgtgaacaaaaaggtccactgttagtcaaaatgttcctcatatttaatgtcatgaagaatggaacaattttagagaacaagagaactcacttttcgataatgactttcaagaacggtgcaactttctcaattccttcaatggtagcaagagattgtacaaacgcgatagggatgatgaaaaagaaggtaaggaagaagaaggctacattcataaccaatcttctcacagtcaaagaaacatatggaatcgctaggtttggccaatatatatcacgcggctctgcagcccattcggttaaccattcagttgggtttcgggtctgcgtggtctgagcgcaaacagcagcagcccaacgggttttgaaagagacaaaagatgctggcatgactgacttttgatcattcaccacattctctctctcttcagcaatctacaaacaatgcagattttaaaccaaaaaaggaacattaagcatatggcacacaaatggaaaccagacagaccacaaagctgacctcttttgatgttttatctacttcagcaatgtaatgttcgattgcgtcaactttttgtccacacaagccaaggcacccaagctgagtttgttaagacgatgcgagaagacagttattacttaacagaacatcagaaccatcacgtttaacactgtaagtaccttcgttataggtctgatctgagaattatttctagtgtatttgagctgataatagtcaagccagttctgcagcttcgtctttttactaaccaaatccgcgagcttgtttgcattgcatacaacctaaatattgattcaagaagtgtaaaaacaccatagaaatacatatgaaaagttcaagccgtttaatgagaaaatttacctgatgtgtgaggtagttatcagggtgattaactaggaaaaaatgctccacaagctcactcacagtttcgtctgggtccggaggtacattcctaacaagaacctgccaaaacgtcataacatacaagatcagtaccagctgtgttatgagtttaaaagcaagggataagaaacgaatcttacagtgaactggtcaggtcgacggccttctgaggcaagaaactgaagcctcatgttagcaactgtctcatactccttcatcagcatataacaagtccagattgtaaaggcataagccattatgatatgagcccaaaacctggaaaaatcaatacaatgtaactcgagattttatacctcaaaccaacattttaaagcacctgaaagcacacacacacacactcgagattggtggaacaaacctatttgaaccttctgggatattcgaaattgttagtttgtcaatatcacttgaagtcacattcttaaaatgcttagccaactccaactcgttgtttgtccaattaaccggtacaagaactgcccaagcaagcattgctattggagcaaaaatcttaagcctgcaacataagaaaacaaaggaaaaaatcttcactactaaatgactcaaatctaatggacagacatgagaattgcttcttctctctaaagacttagtcaacgtaatttcctcttcttgatgacaaaattagcctcaaaatataatttttttatctaatcttgaccaacaaactctactctataatctacattcaaaaaatggttcagctttatgagacattaaactaattggttgactcaataagactcaagttttttcatacccgagccagtaaatccggagatagacaacagagtctaaaccagcatgatcaatcagctcacgctcaggcatcttaagagcttcaggcatccaatgcaagaacttgaggtatgatctcaactccaaattcacaaaccgccccgcgaatccgccgccacttgcagggctgcttcttaaccccctgaggtaccatttggagaagtaaactctgtcgttgaatggctgaagccttaaaaacgcaaagattatgaagaaaatgaatgcagtgaggatgtttatccctgctgatacaccaatgtctttaagtgttgccatgctttgttacttttgctactccaaatgctcacagttttaacctgaaaggagtcataaagatagaaactttaagattcaaatctgattacatatcaaggaaacacatcaaaatcgaacctttagagactggatccaacataaaatccccccaaattggaagaactgaaacagaacaaatctttgagaacaaacccagaaaaaggagatctaatcgtttcttttctcggtttgcttgaaacccaaataaaaatctaagctttacacaaatgtactccacaaaagagaatgaaattcagagattcaatgaaataaattataaaataagggaaagagagaaaccctagagatggggagtgagaaaagtcagtgactggattgcctcgagattcatatgaggagaagctaaagcagtgatgaatgaagtaacacgcaagccacgcgagaaacacacaagagaacagattatagttatatagaattttgtatagtagtaatctatgaattattgttggtttctgggtttgagatattgtttcactgattcgtcagtgtttatgaatgatgtcgaaagggattttgatagagattgaacagaggcctgacccagtctcttgagataaagtgtctgtcggtttttgtaaaaactgtaacgaacaaacaaagaagacgagtagatcttttttttttcttttttaacgttttatcagtcctgattcaggaccgttttgatatttagaagttaccaaaataacagttcatcagtaggcctggccaaaaaaaaccggaactgattatctgaacctaaatcaaccggaaggtttattttattgacttctaaatttctttatccaaaaaatctaattatctgaacttaaatcaaccggaaggtttattttattgacttctaaatttctttatccaaaaaatcgaattcgaatccgatccgaatccaaatatacccgaatttttattcgaaaatttaaatttaatcaaaaatccgaaattttatccgaaagttctggtatttacccgaaaattcgagtatcggtttaaaaaaagacctgaaaatctatatcgaaccaacccaaatccaattggacctgaaccaaaatcgaaccaatattttagatttatcctattgggtcctaaacatttttaaccgaagaatccgtatccgatcaaattttatctgaacccgacccgcttacccgaattttcactccttattcatctagaataaaaaatgtaaattattgaagttttgtctctttctttctttctttcaaaaaaaaaaaaaacaaatcttcagatcttgacaatgagagacataccgacatgaagtttgtttaaacctggtcctaaagatttaagtagaatgattgaaaaggaacatattttcttttgtcgtagattttaaaataaaattcttctaattgtaggaagtggttttctacattttaattttaaaaaagctaatgaaataatccaaatataaacttgaaagtgtatgccaattaccaataaaaggtattgttataattatatgatttatgctttatttatgtggtctattcctaacattttatgcccactagccatctccaatcatgctgattctcaatgtaaaagaagatctatttttaaattatggaaaggggaaagttgagaatataaagctgtttaagatcaaatgtgggagtgggagtcaccaattttagtaaattacgcttttaagtaaaagtaaaacttggatttggatggatatgaaatttagtggatcagcgatagtttttgagagtggaaacacatttaagatgttgaaaaatcatttttgaaagaaattaagtattttttgggggtttgaattgaatatttacaagaaactagattttaatccgctgaatatcgcgggactattttggttttttacaaataaaaatttaatttgttaagcctgttaacggctgttaacttatatgtccgattcgaccaataattaaaatacagtgttttatttggcaacaatttattaagtgatgtatttttatttcaatccaaaagtattgagtattaaacttccaaattaaaatttgtttgggattttttaagcatttttgcctttaatgttttgtattttctgaatgtataactcttactatgtttgatttttactgtttaaaaatataggaacaataatgtacagttcattaagttaaaatctagattattattaaataatttaaattttaattatgtttattttattaataatatttattttgttaagtttttaagataatataattatattttgattgttatatctaggatttcacccatggtataacgtctcgtattactatcaactcaaactcgtcctaccatgtaatctcgttcactgaaactaaacatatctaatagatttcactcttggtatatcatctcgtattacaatcgacccaaatctgtcctaccatctaaactcgttcactgaaattaaacattttgtttttgttattttattttaataatactttaatttaaaagatatataattcaaattaatttaaaaatcttctttcaaatggttatttaattgttgtaaaagtcatacattataatattctacatccgtctctccatctaatctagttcggtaaattaaacattatttttttttttttgttctaataatatttttattaaaagatttataattcaattcaatttaaagttttcttttgaaatggttatttaatttaatacatttcatatattatatatattctaaacatttttcggtaaatatcctaaatattttataaattttaaataactatattatttatctttaataaattataatgttaataaaatcctaacatttttcctttttaaaagtaattagaattgatggatatatattagataagtaaatgctaataattaagaatattaattatttgataataataaatgtcaataacatttcttgtaaataagttccaacttgaagatttatttgttaaaatggcagcgaaaatgtatatgtagaagatggagatcatatgttggtggttgctattagatgtaaaacataacgttgtactgtgaactatatgccatgtatttctcctccacaaaatctattctctggaaattaacctaaatttttaaatatctgtattttgcctccttttcattctattttgtttgatacaaacgattgtggtttgtaatgttaaaattaggaatgttattgaatgatatgtatatttcataaaaataataataataaaagtaggatgaatagtaaaattccaaggcatttcataatttacccattacatggtcaaaatttatcaatattttaaaataataataatcatccaatcaagattttgggaatagaatatcttaagaacttagtataattacatatatatatatatattcccttttaaatgtatcaaaaacaaactaagaacatacaaggaatttgatgtagtactatacaatttacatgcaaacagatgtagtactatttgatgacaaaaaaaaaaaaaaagatgtagtactattttatcttttcatcggaataattcggtcatgaagctattaattggttttaatgagaatttattataacagttgttgccacactgtcgaaatactaacgcctaacggctagttaaataattaacacgcggtgagaagtgagtgagttacacgaaccactaagaatctaatataggaagataagataagcatttcacacgtgtggtgtggacaatttaacagtgttaacacgcgcatggcatgtgatctagaaattagaacattaattttagcgttttgactttgacctttgaatcactaggcgtaggtatttacacgtgtaacaatataatttttttcaatatgtgatgatcatgggccaacgtttgtgggtaaaggtgtggtgttcgatcatgatccacttaaatttactgaattttagaattataacagcagaaggatataagtaatataccaaacttaactataatctacctctccttgtctatgtatactaaatgtctaacatgtaacacaaagctgtacaaaatttttaactctcaaattttttgaaataatgcaaagctgtaaaaatagctgtacgagaaaactgtacaataaaactgaaaataaaaaaatttgtaacgtttttgataaaagttttgtaaatgtataaccatcaaaactgtacaacttccagctttgataatgaattaccattcaaagctagagtttcgaattttttcattgtatacaaccatttgaacacaactcttttcaattatgccatacatacatttagttaataaattttaccgattaactagtactgacaaaagaaacaaagagtaattatatttttttgataaattgttttattagaaaaatacttaaaattgataaaaataaataaacccaattgatatatttgatattacaataccagatattgaaacaaataagacatgttttgtctatatacttccaactagaagatatttatttatccatatcctagatattttaatgtgtgaatctaatacattctcttatatacgaccaaatagtaaaacaatatgcctctcctgcaatttttcttcatccaatatttctatggagtcatcttcttcactccttcatcactcttacctctcttaccttaatccaaaatttggaaaaagacctttggtttcttatccattaatgcagagttcgcgaaaatgcaaacaaactcgcatttgttctaacaagatgtatgttcccggtatgtaacaatatgacatattcatcacaaaatgtggtttttattcatacagaattgttctatatagattaatgcctatttttctaatgttttttttgttatataattgaattaggctttggagaagcttcaccggaggctaaggcagcgaagcatcttcatgacttctttacttacgttgcagtgaggatagtgtctgctcagcttgaggttgatttgacgatttatttgattttttaatttaggtgttttgattaataataagtatgatctatatattaattaatgacagagttataatcctgaggcttatatggagttgagagaatttttagatacaaactctgtaagtgacggtgataaattctgcgccactctcatgcgtcgctcttcacgtcacatgaacttaggtaccaaaaataacacctttatatcaataatttggttataaaattctagtatgcgttttctttttgtgaaacttgttagttggaattttaattctaggttcttaaagttatacattatacttttttaacaaatttggttttcttctagtaatttagacgaaatctctttactttttccaaacattcttttcgtacattggaagttgaaacttctcactaaaataactagttatgggagttcggtttatatattcggtttcagttatatccattcgcttatcgtttttttttttgttttaaagtttagtatcccttcggttaatttgaaagttcggttcggtttcgattatttcggttttaaaatttagtatccatccggttattttgctttaaatatttttggatatttcggttattttcggatatttttggatattttcggatattttgagatattttttttattatttttgaatatttttactattttatatatattctcaagtatttttaattatctagtctagaaataactaatacttttgtaaatatatatttatattttagatatttttggttactcaaaatatttcggttggtatccattcggtttcagttatttcgattataaaattttgtatccattcaattagtttctggttatcggttctgtttacttcggttttggtttggtacatctggttcgggtaatttgctcaggcacaaaactaacagtataacacaactaatctgtgcaattcttgtaaagaaaaactacttcaaaaattgcgtgacgaaatacaattccaccaatttgcggattactaacgaaatcactttgtagatccataagtttcgtatatcttttaggtatacatatacttgatatgagataagtaaactaaaaactttgctttttttttttggtatcatggccaatgcaacaagcccttcgaattttagaggtaagctaagcttttcttttctcctttaatacattttcgaaaacacttctacatcttttctcatctctacgtttgtatttacggtttgaaaccgtttgttaccgcttaggtacggtctgcttattgtaaaaacgatttcgaatgggataatatgaagcgcctcgccttcaaggttcacttctatctatctctctctctcgttgtacatatatgaatgcaagtacgtaatgaagcatcttgtgtttttgaaaatgcagaacgtagatgattccaacacaagactcatgcgcgagtacgtcttggagactagccatgtcgaaaccgattctgataagtgaaaccgaatatctcttcgaatcacattcatatatatagagtcttgagagtatacacacttgaaaccgtttgtacatacatatacataccattgtgctatgttactcccaggttttgataccttagttttttttacctgcaaatcgatcaaaacccgattttctttgcggagttacctagagacgggaatggataccgggagaggcatggattttgcccgacccaaaatacgattgagcatagtcttcgatattctctaacctgtcatgaatcgaataagatgggtttaggaccaacaaaaatgaaagcttcgtagctgaataatttaaagtacaaagtttactttacctatagacatagtttaccataatgcctccactttgacgaatacctttctctgatcgatccgccatccaatttattctttcaaccatctatgtaacgtatcaaaacatgaaagcttatcaatctcaatcactctattaactaaaacctatcgtcattcactggacttaccgctccattttgcaagtggaagttagcaacagagtctaaagcttttcctctcttcttctcttgcaagaggtacctatcaaaatcaagaaagaccattgaaagttatgcctatatgattcatatataaccattacatctcctccaagaatgaacatacctagcacataaccgcataagaataggttctaaaactggtaataggcgaggcgaagtagcccaatcgcagttctttactgatagcaaattcaacagaacttccataccgttgctaccggatgaagattcactgcataaaaagatcactgagttgatgacttgaacttgattttctatataacagataagaacataagggcatgaagaaaatcttactctgatagagtcatgagggcatgttcctcttctggtagtaatactttctcactaaacgtagatgaaggcgaattgctctgtgtaccacgctcatcttcagcaaatcttgactgagatgataacttcgagaggagccattgcatgaatccaggaatggggctaagtgttgcaaatgtctgcaacaaaaagaacagttttgttgagcaagcagatacaaacttttagacctgtaacaagatttgcatacaaattagtcaaagtactcacagaaacatgtggcatgtcttttttcaccaacgtaatcactcgtttgatcagaaattttccgaggtttatcccagctaagccaggctgcaaatacataagacagaagtcataaagccatagctttcatcagaaccacgaaatgaatagaaaatgtgaaaatcaacgagaacaaatgtaagaactacagatatgaaggaagagtgtgcacatacctgagttgaagaaatagagtaaaataaagcgcatgttgcttggttctctggtatgggaggattgtcccacaaaacttcctgcaacgccaatgaattttttagacacatagctatagaatctaaactataccgaatagtatcaagattagtttgacctgaattgtctgagcaacagtctccataagagcaacttctataaaaataagtggctcacctgagagtaacgacatagaatgatcaaagaatgtggtcaacttacaatcaaagagacatgagtccagagaaagtaactaaccaggaacagatggatgaaaatatccaaagcatcgacggcctattcccaatcttcttttaagatccaagaggttgctgattggatgcaccgccttataaataatgcgttattagacaaaacttttaacattctgaaatagctgagattactataatggagactagtactgcatacctcatatgcaacaattttctcaagcaatgaagcaggatcatcccaagtaatttgatgaagctctaaagtggcaggactaagccacataccgagtttctccttcagaaaagaatctaatgttcgcaaagacggcgtgttctcttttctatacattagaaacaaccatcagtgtcagatacaaccggaaatgttttaccaactgattcgaaactatcttcaaatatttgagtttccagtcacataacaagaggacaagaaacattacgagagtatcgacagaagatcagctcggaggatggacaaaaatctcaaccctccaggatgtgtattcaacctctcaaataaaacttcatatgttggcctaagagcatgcctcagattcctctcaatgcgatagaaaacagaagataaagcccccttatcatcatcacctaaagaaaagtactcgcccatcaatggagaatgtaacgaagaatcacacaagaaaaaacaagaatggcacaagaatgactctcactagctggagtttcaagtccaagatattgcttaacaagttctcggacttgctctcggttaacatcatactccttggctaaaacaagcagtaacttctcgcggtcttcaagcgaaaggctaaagtaaccctataagcatttttaaccatatatgtaatcagattgaaaaggttaaacacatcaaagatcagaatcaagaaacaacaatgtgaagatagttttacctcttgaaaatcattaagagtaatgtctaatacaccagttttactagctgagatagctgagtgcattgtctctcgaacaacatcataaaccctaaaacaaaaaccaaactcactactgcaaagatcaatggtgctaaatcaatatctacaatgagaaattaccttccagtggtaccaaaatcattagaattttgcacaatgtgatctctagaatgattctcttgaggattagattgaatttccttctgacaacaaagtcaacaaaccattattatagagtcaaattagccttattatattcttatcttcttaaaaacattcaagctccgattaaagccatagccaatttctcactctctctctctctttttcatcaaaagatgtaaacttttcattgcccatgattacaaattgtgtgaatttggacagaatcgcaaaattatccaaaaaattcaaacagagaaaaagaaaagcttacaggaaattgagagagggaaaatttggagggattgttggatctcattctagcacgcaacagaatcgctagatttttcttgctcatatctgtttcattatgatcatcatcatcacggttaaaatttcatcggagaaaaaaaggaactcaggaagaagaaaaaagcgatttcgcaatcagacatgacaggaaccttaaaatctggccgttcaagtatcggaaaaaaaaatcgagactttgtattcccttttcaacggatagcgtaaaggcactggcttttaaaacggcgtcggttttactttacctgtcgcttcacttgccacaaaaatttgaataaatggcaggaatgtcactttctccaaaataataatcacgaatgccacttattctttataattttatttttttttataattaaaactgatgtaaatatccaaataactttttaaaaaattaaaatatacagatccaactaaaataatccgacccaagtacaataaaataattaacttggcccaaataatactatatttttaatatgtaaagtaacagttttatccaaatttaaaagcattattcttaataaataaaaacaggattcatatttagaagaaaaaaattaaaattaaataaattttgaaatataagtaatagatttttttttaaaaatctctattgataaattcgaaatgtatgtattattcgaaatatgttttagttgttgataacatttttaattatttttgaaataaatatagtttatttatctatttatattaaaatttaacaatttaatatctaaatatattttaaagtttatcacttaataaatatagtttatatatattattttaaagtttatcacttaatacatatagtttgaaataaatatagttttgaaataaatatagtttatatatattattttggacaaaattttgtttaaaatatttaagataagaattatcttttaaattatagttaaatcaaatattaacttatggattttttctgtttaaagttttaattatattaaattataatgaggttattttattaattttatatataaagtaggatatagtatttttcaaataaaaactcataaaaaaggcattttccaaatttactcatatcatacgcccgaaaaatcgattggaacttattcaattgaacaatttgaactatataagttgaactcgttcgattgaaccagatgaactagatcagttgaactatttgaactagatcagttgaaccatttgaactagatcaattgaaccaatttcagttataccattttattatgcaacaatggattggtttggggagcaacgcgattcagttactacattgtactgactaccattgcaaatatctaaacagccatttttgtttcgttcattcactttcttcaatcgagatctatagacagagtagaacaaacaaagcgcttgtaaagaaaagaagacgttgcgacggaagaaaaagcgaccgatgaaatatatgagtcgaccggagatggtatctctaaaggaggaacgtttccagagtggacaaagtaaatatcgagatatcgatctagatttcgatccaacaatatcgatggaggaagacacatcacctgagaatcgacggctgccgaaatggatgagccgaccagagatggtttttcccgagtcgacagagccaattgaatttatacaccaaaaaatggttaaaaaaaaaaaaaaactggtttccatcaaccagagaaaagcgtcgtaagaggaagaacaagactatgcctgggatacacttgaacaatttgttgcacatgaaaaaattaattcatgtattttgaatttgtatttctcggatttgtatgaacaattcaactagttcaacttattggattagattaaaaacatatatgtatttgtgttcgtggtactttttaatttatttagttgagctagttcaaatgtctttctttggttttcgtggtaacatttaatataattagttcaactagttcaactaaataacgttaaaatgattaaatttgtaaaattgataatttattatacatgtaaaattatatacgaatatcccaaattataaataaataattttagatcaatgcaataaaatttaatattttctaaaatccaattttgttttcatataaaacaccccttctaatataagaaacatttagtctatgagcaccttatatgaagtaaaataggtaaaaaaccaagttttcaccgatgtcatattatgaaaactttggaaatacaaaataatagagaaaaagtgtgcgttcaacttataattaattatttaccttctaattcaactgtaaattatgaaaattgtggaaagttcaactatgaatacgatggtacaacggtataactacgagtatcttctaccgcaaaaagataaaatattttttagtggggtccatatgttgagtaaatacagtcactaaattaaatccaacgtttttgtagggtttatatatagaatatttatgtttttcttatttttattttatttttgaaattaaataaaaaattattcattaagggtaaaataggaataacacatataaagtggcatacagatcaaaaagtggcatgccggattcaaatttctggttcagtgacattcttgactgggactccaaaaatatattatgaggataattccaataaggtttctccacatctataattgagaataggactgggcacattacccatacccgatccccgaacccgaacccgacccgaattaaggggttcagtacgggtatggattctattaataacccgatcggtttatagatttcatgtctttggttacccgtacccaatcggttattacccgataatcgaaccccatccgaactaacccgaacatatataagcatttctgagacttagaaccctaattcactttcctttcttcgatttctccactactcagcggcgatctccgaaatttgcgagccatgattcacaaatcctatatatatatatatacccccactaagcaaactagaaacccttattagcaattttgcagcgtctcctccatcagagaactcgaagtatcattcacaggtactaaagtcttcctcttcttcgtaattttttcattatctttgtatgatcattagttgtatgatattctgtattttgtaatgtttgttgctagttgtcgattttctgtataatgtttattgaccttgaaataaggctaatggtattttgacatagtatatggcttcatgtggagtttgatgctacttggtagatgtcgtgtttcttgaaactagttggtggcttcttctttactctttcgtaactagttaatgttgctatgtttgtctgatatttaaaaatttatgtttctatgtttgttattttgttagatttcgtctttctatgttaatgacttctttttagtctctgtaattgtttatatgcttgcctttgttacacatagtttgtctcatgattgtttttgtctaatcacttgattgatgttctgtatttttatatgtatgttgctagatgtcgttattgtctttgtctaataatagatggcttgttagatgacttattatcatttgactgtatttcacatagtggagtttgttgtggcaataattcaacgtagataatttgaaagaataagtagatattttgtaactagattcaagtttatgccttcatgtggagtttgtttctagatgtcgtgctttttttatttggaaataggttctggatttttttttaacgctttagtaacttgtttatgtttctatatgtgtctgatcagtattcttaatttatttgtaatgtttcttcgtatttttgatactttgaatctctgatcattagtctttgtaatgttatccgagagaaaacaaagataataatcaatttattatattcttcttatttgtagatggattcatcatcatcattaccagctgaagataacagagattttgatgatgaagaagagtatatgactcctgatttgggtcaaaggggtaaaaggaagcaaacacctgaagctggagattcgtctgaacaaactaagcctaagaagatacttccctcaagatcagatgtgtagaatcatttcaaaagacgattgcccatccgtgacgagagtaattgtcactattgcaaaaaggagctttcatatccaacaaattcagggactaaaaacttgtggaatcatcttgagatttgtaaggaatacaaagcatggaaagatggtcaagatccgaaagagggtcaacaagttattaacaagaaaggaaatcttcaagttacaaaagtttctgagaatgtttttcagagaagcagtgaatgagatgcttgtgataggagagttgccatattctttcattgaaagtatggcttggagacacttttgcaacaaggtacttttgaaataaggtagattctttctttttacatatttctatacttgaatagttgaatgactctctctctcattgtatatactatttaggtaatcttgtgcaatccacactcaagaagaaccgcaacaagaaacattgttgagatgtatgttaagagaaaggctgctctaaggaaatggttccaaggcaacaatcaaagagtctcgcttacataagatatatgggtttctcatgtcataggtaatgttttctgaatttctaaaattaatttgcgatcattaacttgtcttacttaatgtattaacatgacttaatgttgattgctattcacaggtgatagttatatggttataacaacacattatgttgatgcctattggaagttagagaagctgattataggtttcaagtatgtcacagatcacaaaggtgagacaattgctgttgttttactagaatgcctagctgattgggggatagaaaagatcttttgtgtgactgttgacaatgctactgctaatagtaatgcgttaatgaggtttaaatctagcttttccagtctttcgaatgatgcttttgtgatgaaaggggaattcttccatatgagatgtgctgatcatatcattactttgattatgggggatggattggctgatctagataatagtataaatgcaatccgaaatgctgtctcttatgttagatcgggaacaaataggcaaaaagcatttgaacagaaggtaaattctggtaggatgactagaggtagtttaccattagatatcaagacaagatggaactctacattttttgatgttgtcaaaggcagtttttttcaaagctgcgtttgaaaagatggagttagaggccaagctgtacaatgaccatttcttggagtctgaaaaggggaaaaaaaggattggacctccttcactggaagattgacgtgcagtagagaggatcaataagtttttggtcattttctaccactctaccttggtagtctcaacctctactactttgaattctcacaagtgttttggtgagatagtgaacataacaacgaatcttcggatacatcgtaatagttttgacagtgatttgaagaaaaaggctaaggatatgtatgaaaaatttgataagtattgggatggcttgaagaacataaagatgtggatagtggcgactgtgtttgatcctaggaagaagatgcaatttgcaaacttgtgttttgcggatttgtatagtgaaggttctacaaatgctaaggtgctttatgaatctgtctatgatatcttggtggatatgtttaaggagtatactggaaggtatggtaaagctaccgatgtgcaagattctcaatcacagtcatctcagtctactcaagaaaagcaagcagagacagaattgggtgttgaagaagatcctagttatcgttctattgataaaaggtacaatgctttactgaatgtgacatgagtgaaacaaacaaagaatgagttgtattcatatctgaaggaacatgttgagaatccagtggtgtttccaggaactaagtggactcctctctcatggtggaaggacaattgtggcaagtacccaatattgtcatagatggctagagatgtatttgctacgcaagtttccagtgttgcatctgaaagtgcttttagcactagtggaagttgtctaacacactatatggttgaaattttgatgtgtattgagcagtggatgaaacaagacctgaaagatgaagcaaaagtccttacaaatttacaaatacttgctgatgtcaagtatgaagacaaacttcaaaaaagtttgtatctttgctaattacatgttatttcctctcttctattgatgcttaaacttaacaaaaaaaaattcttgtttgtaagctttctctgagttagacaatccaccaccattggatgtctaaatcactttgctagtttggtacaaggtaaatttttaaaacatttcttgttttcttacattttttaactctaaagtttcatatgcttatagctcttattttgttcatttgatgcctcacaagccacaagaagttatgaaggctattggctattgcttccggtgtttgctgttgtgaagtcacatgaagaacgtactcaatttgagaatatagagcatgttatgaacttcatgaagagagtagaattaccagtggagttacaaaattcaattccatggattgtatgggggcttttgaaagcacgaaattcttcagtctatgcagatagagtcaacgaccacaatatcgtgatagccactacattggaagaagcagaggaatggagtacacaaaactctgtggcttctcaagaaaattgttcgctaggtaaaaggattagcaggttgtcccgtcgttggagtaagttagaattgggttgtcttaaatgtaatgtccattcttcatagattagcgattcaactcttgtgggggagcctggattttgcgaaatcatttaggtgatgttctgtttcacgctcgtgattcttttctaccaatgatcaatagaattgaagcggagttaagatgcatccaatggagtcttcaaagcttacatgatcttcatattgaatcgtgtgaagtttggtcagattgtgcatcggctttacaggcgctagcgtcaccagagaagtggccaaaatatcgctctcaactcaatagcagcagagagcctttcgcaccgttaaggtctcacgaataaggtttattctttttatatctttcgttctgtttcttagttgatgtactttgtttttcaactcttgtttttattactcttttttattgatgaagacattagaaaaaaaaagaataatgatagatatactataagaaaaaaaaatatgagaaagagaacaatcatgaaaaaagtaataatagaaaacctttatattaattttttttttgtatttagatgagtgtttttactacttaatcgaagagaatagacaaatattacggtaagtgataaatgaatttgggctctatataatatttgatacgcaagtgtttctttgacttttgcaacactctcccttggagtttatttgtcatttatctctttgcgatgtccttcatgttgccttgttaaaaacaattctaggaaatcccattagtataaaaccatagtaaggtaaaagagtacaatgatacaagctccccctcgaatgactaggaacgatactctaaagattctgttgatggcgtattccaatgttatggacatgttttctgaaagttgtagtatgtaatgactttatgaagagatctgcagcattgttacatgatcgaacatatttcacttaaatttctttattcttctcaagctcttgggtatatgaaaataattttggagggatatgttaggttctagcgtttttaatatatccttcttttgtctaagcaacacatgcatcattatcctcatataagacggttggttctatattcacatgcattccactgcttgattgaatgtgctgacttatttatcttagccacaaaaagttccactcgcttcgtgaagtgcgatgatttcaatgtggtttgaagaggtggctactagtgtctgtttctgagaacgtcacgatatagaagtgcccccaatttcgtgaaaatatatccagtttgggatcgagctttatgtggatttgataaatatctcgcatctacaaaaccaaaatttgaccttttgagtttttagggtaaaataaccctaaatcaatagtcccttgaaggttacgaaaaacatgttttatcccattccagtgtctttgtgtaaggaacaaactaaatattgctaaaatattaatagcaaatgatatatcaggtctagtgcaatttgcaaggtacgtaaagcctccgattgcgcttagatacgggggtactttaggatcaagtatctcttcattttcttcatgtggtcggaaaggatcagttttaacattaagtgaactaacgaccattggtgtactaagaggatttgctttatccattttaaaacgttttaaaactcttttagctgtagattgatgtacaaaaaatccttatgagaatgtccaatttataaaccaaggcaaaactcttgagttccgatgatgtttatatcaccaacatatactgcaataattacgaatctagatatagttgcttgatgataacacatggaaatatagggttatttacatatctttcttttattaaatgctcacttcgacgattataccacatacgtccagactgttataaaccatacaatgatctttgtaattttattgcacataactctatgggtttagagtttaactttttagtcattttaaatccatttggaattctcatgtacatgtcagcatctaatgatccatataaatatgttgttacgacgtccatgagtcgcatttctagaattttattagctgtaaagctcattaaaaacctaaatatgatggcatccataacaggagaatatgtttcctcgtaatcaattctctgagagaaaccttgggccacaagacgagctttgtagctcgttatttcattttgttcattacgttttcggacaaaaacctatttataactgtccggttttacagtctcatgtgtgaccattataggtccaaatacatttttttggttaagcaaatcaagttcaacttgtattgcatcttttcattttatccagccatgcctcttttgacattcatacacagactttggttctagatctttgttttcttcatttatttctcttgaaacaaggaacaagaaaatatcatccattttattttgattccatatcttttcattatatatggacgtaattgatagacatctcatgattttcttccgattcatgaggttcatcattattgatagggtcatgatttgtttctcccataacattttctgttattatgagagtatcatgtttttccgtttcttttcgctttgtgggatttttggccttagaaccaattggtctaccgcgtttcaatcgtgttttaggctcacgcgtttcatctactttcccttgttcttgtgggatttcaagccgatcacgagcatttactgctggtatatgtgatttagttaccgttttggtatccacaaatgcattaggtagttggtttgctaaactctataaatgcacaattcgtcaaacttccagttctgactgtttagtgggaggatcaaggtgtaatagtgatggtacacaccatttaatttccttttccatctttttattttctctccctagaactgggaattcttttttgtcaaagtgacaatcggcaaaacatgcggtaaatacgtcaccagtttgatgttataggtatcatataatttacggagtatcacaaccaacatatattcctaaccttctccgtggccccattttagtacgttatggaggtgcaatgagaacatataccgcacaaccaaagatttttagatgagaaatattaagttctcgaccaaatgctaattgtaatggagaatgattgtgatatgcacttggtcttatgcgtataagtgattttgcatgcaaaatagaatgtctctagactgaggttggaagattcgatctcatgattaacggcctcacaattaattgcaaacgtttaattaaagattcagccaagccattttgtgtattgacatgggctacatggtgttcgacatttattcttgttaccatgcaaaaatcattgaatgcttgagacgtaaattcatcaccgttatctaatctaagtccattgatttgacaatcatgaaactgagctcttagtttgattatttgagtcaaaaatcttgcaaatgccacattttgagatgataacaaacaaacatgtgactatctactagacgcatctatcattaccatgaaataatagaatggtccacatggtgggtgtataggtttacaaatgtcaccttagactcgttcaaggaattttggtaattctttatcgattttgcttggcgatggccttataatcaatcttcctagggaacacgcaacacatgtcccttgataaatcgcttggggtttcattgaatgtccatgtgagctctctataattttttgcatcatcgtggtgcctggatgaccaagacgatcgtgccacaatgtgatcatcatgatctcttttgataacatgatgtgattctattgaattaatggatgtatgatgcaatcctgatgggagtcttggtaatttttccaaaatgtgtctttttcctaaattttcagaagtgatatacatgtacttttttccatccattctcagctgcaaactgagtgtcaaatccataaaggtatatatctttgaaactcaaaaaatttctgtttgaatttggaaaaaacaatgcattgtttatcgagaactttgtcccgttaggtaatgcaaaaattgctttaccggtccctttaattaagtctatgggacctgatattgtgttaacgataactttcgtcgatttcaaattagagatttattttttatgttttagaatagtgtgcgttgttccactatccggtatgcaaatatctccaaggtttgccttagataatgttcaagttgtaatgtgatccatttctaaaataaacataatccattaatgtaagtagaaaataaatttattcatcaaacacaaagcacatgattattatacatgataggtaacacaagcacatgatacttatacatgataggtaatacaagcacacaaatttaggacatttcaagcaagcgtcgatttatttatggcacataaattcgaggcatgcacgatagaaatttcagttttcaagaagggcagcctcatcgagatcattagcaaagtcagaagcatcaaggtgggttgtacccttagaatgttcttcaaggttcattttctttccttttcccttagcggattatttgtatagagcacaaaggtatgctggattttggcatacttgagaccaatgtcccttagtgacacatctgaaacaagcactctcacgttttcttgagaagtatttgcttggatttctttcctttcgaatcatgctcaggacgaatccattgctattaattcatggtttgtggattaaagcctcttccacttccgcgttagcttcggcaaccacgtcccctaaaagttttgttttctctttccggatttttaacatccaatgcatttcacctcagggaattcctttgatccggtaggtcgggacatgtgattcttgattaggagctcactttcttttcagctattaagagcgccacaatcaaatctgagaatttggtatatccacgcaacctttattgttgttacaaagtaatgtggtttttgtgaaacatggtgtacgttttttcaaggatatgggattcagaaatagtttttgaccacaatatctcagtttggccacaattcttaacatggcggaattgtatttcattaccttgtcaaagtcttggaaccttagactttgccattcgttccgggcaagtgggagagtgatgtccctttggtgattaaaacaatctttcaaagaattccttagttctttaagatctctcatgtgtgcatagtcatatatgacactttcatccaggtgtcttctaaggaagatcaccgattttgttttttttttgggccgttgaagaattattctctttatagtctccgttaaatgtagctcaacattggtaatccacgatatgtagttagccccggtaatctttaaaggcagaaaattggagcttctcgatatttgccatttcgtttctaaaataaatttttaaagaattttattagaaatttaatttatttcattttagaacatgagaggtgcttgaataagcaatgcaagtacaagaaatacaattaccataaattgcaacaattataaaaacgattacaaaaactaaaaacggatgagtcatttttagagagatgatattcggagaaaatgaaataattgagtgagatgaatgaatgagaaataagagtatctactactaataaaagaagctctttgatgcctctcaaagtgaccacatcagcaaaataaaaactatctaagaggatgccacattagcctaaaaactatgcgtttctaattttcttccagttggtgtatcatcaccatcaatcaaaaaacttatatgacacaatttttcttttaaatttaagaaattgcttcaaaattttagactttaatagggtttacatagatgataatgtcagtaagttgaacagtttcctttcccataacttattcagttctaataaccgatgcatatactcatatctacatcattgaaggctttcttttcaccttttttgtttttgtttcctgatttcagatccgattgtccgtatgaacagaggtccctcagttttgtttgaagttgtcatagagccaacttggtacgctccttaagttgtcacttttctttgtcggcttttcaaatattagtgtagacaggtattgtttatgcactcttctgttagtagcttatgtaagtttaatataacaatgtgggatttgataggtttatatcacttttgtgtttcaatgatgcttcactatttgatatcctcataattaaagagaatgttatttctctgtatatttgtgttatgaataaggatccgaatagatatttcagatttcttacttcatcttgatttcttgacccttcttcatgtagaaactttgttcatatattttttacttcacatcttcagcaaaaagatgttcacttacatcattgacatgacgaaccctacacaacagagacccaatatggatagaagaaagtattaaatgacgtttataataattatcttcgtggtataactccaagagaaaggtttgttgactttctttagtggttaacctcatacgagtatcaacattcaacacaacaatcctaggtcactggaaatgaaacaactggttagtcatttttctttaacaaaacagcaatttgttagtcattttctcaacaggtagcactggttagacaaacatactattcaacctcggacatggcataaagggataccaagaactcaatgacctgctacaaaaaacggaacagtaacattaacctcatgttaggctgtgatggaagccaatcttcagatcatattattcgtcatctaagtattttcaactttatgtttctcactttccatcaatatagtaatattttcattttttgaatacataaattcgaaaatcaaatttaataaattcatcttactatcttcaactcttcaagtatcttcatgtagtaaagaattatatatctccacaaaatcttgtgacatcatcattgcaaaacacaatgaatgattttaaatctttattaatttttaatggctctaacagttgtatacaagaaagaaaaagaaaaagaacaaagcaagaagttaaaactaggatactacacattacatttctaaatttttggttaaactagaattttactcatggtgttattttaagtgataattgttagactgtgagcacttgaactccactgatttaccatgactgagctcataaatacatttgtctttgataaattaagatttgtggtaatcatgatacctgcaatgttaggatcggatatgcatgccgccgggagttgcaaatgatccagctctcaaaatattcacttaggtacatgtttaacttcttctcttagaagtaaatatggtaatcaaggaacacatgtatatggattttaatttactggtgaggggtgacaaagagttaaggccagcaaagggaacaaaaacgttgtcaagagaagggagacgtctaacaaaaaaaactacacacttatcgtctcagtgataatttgcaatctaaagttaactttcaaatgataattaatcttaacagatgtaattttcagcaagaatatatcaccttctaattcgtatatagcacaatcgcatataagtaaacaaccatagataagacttggtagtatgaggttatatatgattctttcacatggataatcatactcaatagtcttttaaaatattccaaaaaattaacaactatgcttaatattactattactatatgaactaatatgatagtcgtatggtctaagaagacagaaaattacttaaatattcttaacataagaaactaaatatgaaattgtaattaaattatttgttagtcatcttatcttagacatgcacaataaaactaaaatctatcttaaaataaaaattaaatataatgttacaaaaataatttagacaggacttcagaagttggggtagagacaatggaaaaatacattacaagatgtgaaaaatactatatatacacaattaaaagaagtaaaaatgaatcactacttccacaaaaaattacaatgacaaaataattatagatagataaaataatataattaacaataccttatagacatttgggtggaagtactaaagccttaaatataaaattaaatataaaaaactttaaaatattaattgttagagatataccgagtgtagcccagattttattctagtatatagataaaataaactgttcattagctattaagtagccgtttgaaaattaaaaaatattttaaagcttgggtaattaatttcatttattaatttatgaccattgagatttaaaaataaaatttagtctaaaaataaataatcaagaaaatatatattaatttatacataagattatattatttttataataatgatactatgataataatatgatgactaaatcattgatatgaaagaataaattaaaagcagccaataaaacatatggtaatgtagatcatccaagttaaagcaataaattaaaatattaaatagaatataataattaaaatcatccatgttaaagcagcaaattaaaatattaaatcaaatatagttattaaaatcatccatgttaaaaaaacttaaaactgtaaattagagtattaaatggaatatgttgataaaaatcatccatagaaacaagaagtaaattatggtgatcaaattatccatattaagaattttaaaacaataaataagatggtgcgttaaacaaccatataaaagcattatatttataaaggggcggcagagccgcgctatgataataatatagattaacatggcagagtgatcgtgttgataacatgttgtaattttattttataaaataaaaacctttaccaattcattcaatttaccaattcgttcctcaattttgttatactctaatctctaggattttgttagaatttgaaattcaaattttgctctctctctggttgctgcaaaactaatttgaatccttactctctggtatagctttatcagtcaagtttcgactatggccatgtacaaaaacgatgtgaagcaatttgtcactgttttaagacgtaacgccaagcacatccgccactggctcgagaagaatcctccacgccctcctccaagttagtcctctctctctcacatgatttcttttgatttcacgaaggtgtttggtttggtgatttgatttcataaaactggtttagtgttctatttactgaattcctttttgtatggttttgattcggtgaaagtattctctaaacccgaaattggataggatttcgtcagtttctaaaatttgctttaatcgacgaaaagtaattatggaatttgggttttagtggaggtctctgcaaactgtatgaaaaatcaacaaacaatttttggtatccataataaaaagtctgtttaaatatatccattcaaaaacctttttactcatccatatccattctatataccatgttcaaaataacaggagattcgattaaccatggtttgtaaagaaaccaaagttcatgtccataaggtcttggaggtggaagtctctgcaaactgaaaaaaaaatcaccaaacaattttttggtgtccataataacgagtccatttaaatatatctattcggaaacctttttactgatccatatttctatataccatgtccataataacaggagattcgattaaccgtggtttttaaagaaaccaaagtttcatgtccataaagtattggaggtggaggtctgcaaactgaaagaaaaatcaacaaacaattttttggtgtccataataacgagtccatttaaatatattcattcgaaaacctttttacagatctatatccatcctatataccatgtcaataacaggagattcgattaacaggaatctcgatgctatgtagatgaaacgagtttgacccatagacttgaactttcaaaggattaatctcaacaatcatgtggctttcctttttttaagacccaaatatcgattctccttagctgaattcaggttttaatttgttaacaatgtttcaaatttagtggataaggattagaggttcacttcgttttacgttaatttgaatcatcaagacttgttgcaggcttgagacaacatcatcaccacaatggattaagggatctaaacactttcaaattatccaaatgatcagtttaacgtcatcaaattcaacagagtggccaaatgctatgcaatgataagagtatccatatacatgtgaacaaattgtcaaaacaaaatggatgatgtctgggaaattggtgattgtagctaatgtaaaaaacatggcatgaatcacatgataaccatatcaactacaccacttgaacagtaactaatggacaactatatttttgttcgatgtgaactaatgaccaagagagagaaaaaaaagtgtcaaagaagagagaaaaagacttcaaacgatctgtttcatcaaaaacgttaatcaaactatctttaccaaccaccacctccgcttcctccgtaggaaacttcaagctctcatgctcgcttcttcacattcttttcttctacaccatcaaattggagtgctagttgcaagaatattcaaaggctcatgtatcaaaaccgagataaacgtttaacagtcaaactaagaaatcagattatcatttagaaatcttgtgtattacactgcttatctgcttagtaataccaaagaatagttggccataaagtcatgtctgatttgacgtattatgcggacagccacaaaatggacaaaaatcatatggatacagaggtgtgtataggtgtgtgatctaaacacatcatttctagatccgaaagatgtatatgttgggaaacgatagctccaataagaccaaatatcacatcttccctaacagttttgagctagaaagggattaaacacaaagttattggtagccaaagttcttgaagatcaactacgtatctatgggctggaaatagagcaaaaagggtattagaattttaactggaaaaccagatgcatctcaacaaatcaaatttcaatgtcaattcacaacattcatatcactcgatcctaacttgggattgagtgaactacttaatttaatattcttcaagtaatttctcaaatcaatcctaacttgggatagaatcttatcttaatatttatcaatttaatattcaatcttaagaaacagataaaaccaagtaaaaatccaataccagagagaatagaatttggttaaagatgctcttacctctcccaaacaacgattcaatttttcttctttcccaattccagcatccctcgaatagagaaaaagatacaaaactgacaaaataaaggaaatttaggataaacatagattgtgattgtgaattttgagataacctcataattttcatgattttgtaagaattatagaacgacaatgattttgaaagagagattaaaaatggtgaaaacaaaagaatatggaagagagagatgataaaaagaggatagtttcttacccacacaatctcataaaaaatgagtttaaaaattattgcgtcatcactatttcaggggtaaattactctaattttccctaaaaagatggcaaagtgcctcatccctgaaaagtgcctcaaaaggaaaaagattctctaaaagtgcctaaacgtgtcacattccctatatattattacatgcgttgactaatttcatcataaaaaacattaaaaatattatctactactttgatttttccataacatatttgtaatattgtctcttatttgggatatatgttctccatttgttatctctgttggttctatgtcatcttatttgggatatatgttttccataacatatttgtaacatatatgatcaaaatctttgttatttatatttgcctctgtcattacatctgcaaaatctgcatttgagaggtttgaaattctgataaaattatataatcccactgtaaccattaccactcttttttgaacgtgaacattatatcttggaaaatcagaaggaatcctcaatttgttttttcaaactccaaaagttctctagataaactgtaaagatgtgtgacattggttaaacatttcatgtttgtttctaagaaaaggaatagaatagaattgagacatatgatatttcacaactcgatttcgtgacgatctataaggagctagaaattattttttgtttgggtagccaaaatcaaccagataatacttctctgatagaagccaagggaactcggaatcactttgttttgctatttgcagaacaattgtatcgtgacatgaacctggtgctccatttcaaatatatgtaaataacatattcaaatcacatattgccatgatgttcaatgatgcattatcgcgtcgattccaatacattccatgtaactcaagctttatttttacgcatacatgagtcccatccataatgatatgatcctggtgaggaatcaattccaatttcggcacttggaagatctggagtggatattctcgaaatatagatgacacacgactcaaagatgagatgatggattgaatgacggcacaaaaggatgcggaaaaaccttttgagaagtcgagaaagatcaaaattcgacatacgaaaatggatccatgatctatttttaagagagagtttttgataaaaagatagatgagttctcataagagattacaagaagtttataaagaagaaggaagtcttagaacacactcacaagactaccttggaaaataaaaagaaataaagactagtttgaaagtttaaaaataacccttccacttcttggctccaaaatgactcttgatatgctattttcgtcacttctcttgaccagcaaattacccacttggtttgggcttttcttgggcttgtgatggtcataaaattggttggacttcatatatattccattgggccaacttctgaatgttataccatggtttggatcatcaaatgggtgatttgaatgtgaatcatttgcctcattaaaaaccttgtcaagaaaacccattgggacaaaacttgacaagggaaaaagactacaaatgagacacatgcccatttgatgatcatgtatcaaaatcaatgaggttaagataacatctttcccatactctttctccgttataagttcattttctgttttaaaatgctcctcaggttcaagctgctcctctgcttcaagctcttccgcggctacaagctcttgatcaaattccatgtcctttgtgctttccatgatcacatcatcctctcccacttgaaaaggatttgacctcaaatccaattcacctacaatgaaaactaccaagtaagaatcattgaaattggaactcacattatacttaccttgcaactcaagttcataagcattgtcgttttttcttcttgttcggttggatggataatcgacctttggcttcaaaacaactccaattccagtcctcttaaagagattggacatgagaaattctaagtctggtggctcctcttttatacctgcaatgttgtcaacacctttggcaaaaagcaagtgcattatcatagtcatgaaatcattataaacaagtaaacatggctcaactttaatcaatgcaccattcttgaaatgttcatgttttacttttatcctaagacaagagtttgattccaaatattctttaaataaatccaactctttctcaatgtttcctaaatatgataaactcatagtaacaattatagaaacatgagaaacaaatcgagttaaagagttacttacctgagtaaggttcacagtgtgttcggtgcttggtatcatcatgactaatggaagtggcgttggatccgggggttctttttggatcaaggcattgttggtgaccaattcctcctccctagagctatctaacaactctcctggtcgccactgataggtatggaaagtactaaatgaagaaatatccatttcaggctcctctatgcattcttccatgttttttagccgaagttgattttgataatcttcacgaggatctcttgattgactcatatgatgagtgcttatctcccgatcattagtcttcttgattgccccccaaagtgtacaaccttcaccaagagaacgcaaattagctttcattcgattttgggagtttagataaatacctcgagttttaaatggtggtgtagcatctggtggtttatccttgaaaaaaatattgcattcagctctaggtgattgtttgtggaccatgacagcctcaacttgagtgaatcctcctaattcacgtggttcttgtttacgtaactctcggtttagaattggttgggatacatatggcggtcctttcatgttcaagatggtgatttttgaaacatagtcagctcgacaagcttgtgaagtggttgacaccaaatgatgattctcctcttttgtgcttccttcagttttgtcattctcatgctccatagtatgacctgaatcaacatcctttgacaagaacaagtgcgtgacacaagaactagaattttctaatccttgactaactacttcactacttgagtttggtgagctcagtttcgattctaatgaagtattagttagctcaaatttttcagggcaagttgcaactaaatgtcctttcttacgacagttataacaagtgactcccctggattttgaaagattagaagacttacattgcttttgttcaccgcttgatgcaagtgatggttgtcggttttgcttgtgaactacaacttcttcggtgaccatctttggttgagatgttgacttaactttcttgggtttgttgtaagcattgagaatcttcagaatttcatccttcaactgttgttctgctatggggtttttcttcgaatatggggctaagccttgttccttttcttgagctgctaacccttggattttgggattgccttttggagtgcattctagtgcttgtggagcatacttatttcttagcagtttcttaaaatctctccacaatgtgataggtggctccttataatataagcgatcatcaacttcttgcaaccaccatttgtaagcgtctcccgtgaggtggctaagtgcacaaacaaatctcatttcgctcaagaagtttttgtaggaaaaccactcgtccatgtttttctcccactctaggtaatcttgttttcctgaaaatttcaaaagtgcattagtcggtttataatcaaaatgaaacacagatttggatttgggagtgtgggtgattttctgtgggctgctttgtattgatctcaatgagttatccggtggcttagacttaagctcttgttccttcttttttcgtgctttgtgatgcccttgatgaatttgatttaagtggatgtcgaaaatttgccccatttcagtggtaagagcttcaattagatgcttgttgcggttgtggcttgatctctcctcagttgttgacattgcgacctgagaaacaaagcacaaatacaccagtaacaagttcttttcgtaatagaaagtattcaacacaacaaacacaaaatgacccttcaacttacacaaaactctcctagaaccctaatcacgacagtttgacttgatcggacactaaaaattatcaaatcgtttcaaacaattctaaaaacaatttaaaaaaatactagactcgttttcgaacccgtgacaattgatttcacaattttagcacacgccaaataattatgaaaattaaaacaagatgacagacagaaacgactcaacctccaagtgtgctctgatacaacatgatatgatcctggtgaggaatcaatcccaatttcggcacttggaagatctggagtggatattctcgaaatagagacgacacacgactcaaagacgagatgatggattgaatgacgccacaaaaggatgcggaaaatccttttgataagtcgagaaagatcaaaattcgacatacgaaaatggatccatgatctatttttaagagagagtttttgataaaaagatagatgagttctcataagagattacaaggagtttataaagaaagaagtcttggaacacactcacaagactaccttggaaaatacagactagtttgaaagtttaaaaataacccttccacttcttggctccaaaatgactcttgatatgctattttcgtcacttctcttgaccagcaaattatccacttggtttggggtcttcttgagcttgtgatggtcataaaattggttggacttcatatatattacattgggccaacttctgaatgttataccattgtttggattatcaaatgggtgatttgaatgtgaatcatttgcctcattaaaaaccttgtcaagaaaaaccattgggacaaaacttgacaagggaaaaatagtacaaatgagacatatgcccatttgatgatcatgtatcaaaaccaatgaggttaagataacatctttcccatactctttctccgttataagttcattttctgtttcaaaatgctcctcaggttcaagctgctcctctgcttcaagctcttccgcggctacaagctcttgatcaaattccatgtcctttgtgctttccatgatcacatcacataactccaacgaatccactataatacgaccaacatcttcggtctacatgaagtctttcacgaattcgataaagttcttgtcttgtcagagttttaatataaatttaatagagatggaaattaattgatttcaataatttttgatttgactaaattaattgatttgattaagttttgaaaaaaaattcatataatcatattaccatctaatataaatatactaaactataatttaaaaaaactatagtaattttgtatatcttcaaaagtttcctttctcgttttaataaatgtatataaattttgattagtaaatactatcacaaccatttatttttcactaggttaggcccgcctaaataggcgggtttaaaaaaccaattataaatttttactgatgatatttgaattctaaatagtaaatgatacttcctatttttaaatatttaatttagtaaatttgcttaaaatcaaattttaatcttacaattttgattttgctgtacacttaatgactttaacggtattttattgatgaaaattaaattttaaatagtagtcaacacatatttttctgtattttgtttagtaattttctaaaacccaaaattttaatcttacacattctattttgctatcaatttaactatctatttcatcataatattcccgattttgattatgcacatattattttaatgaataagtgttaaattttatatcaaaataatatgtatatcatatcaaatcaatataattacttcatatgaaaataattaataaataacaaaacataatgaaccaaaaaaaagaaaaccacaaaatattttggaaaagaaaaattgtttaagatatagttttgctatattttataatctcataaattagttttacctaatgtcaaactcatattagatgacttcaaatttatgaataaaacattgaaattttatattaacattttcacaaataataaaatatcaatccctctaaaccctattttcctaatttttggtggtttctctaatgactacatgcattaaaattcttatattaaaaaataaatataactatacaaaaattcccagtgggtattcaaataaaatactatattaattgaaaatacaattttatcgaactaaattaatgttaaataaattattttgttattttatacttcagtgggttcttaattagttattatcattactaatggttttgtttaaattaataaatgctagattaatttaattgaccaatatcgcatgtaaaatcaaagtttttaattttatttttgattaataaaaattattatgtatatatatagagataaaaattagtgtatgtaaatttgtttactttttttaggtttctattttcttagagaataaaattttttaaatctttgatgacacatgtaaacatcttatcgttaaactttccatctatcatgatctcgtgagttagtaatttttgaaaccgtactttatataataagatttgtaaaattttctatgatttgattaaaatttaatactgatgttatgaatataaaaattaaaatttccaaatctccactccctcatcaaatctccctcagccttatcaaatctccactccctcatcttcactcccccatatattcacttccattgacattttaagaaaaaggattgtcaaaaggaaatggtatacattgttatattaccaaaatttgataacaaaatatagtactaaaaaaagaatttgttgtctgccttgttaaattttgtttttttgtatatctagtctatatatacatttttacagcacttttttgaagataatgttgaagatttgaggaataattcaacaattaattcaaatgggtgggttttaaccggtttaactctgtttggatcctagattgcataattttaaggaataatgttatcctgatcttggattgcagaagtttaaggaatatgtttcaatgaatattacctacaagatttcgtaaacataattaatattctcgagtgcaaatatattctcttatataatctttcaaaattcttgcaatctctacaattatgcaaataacaacctttgattcctaatatctcgatacaatatatatctcaatgacatcaatatattctcaaaatcttctgtgtaaactaaccaaggtttaaatccgtagcaaacttttcttttccctcccaaatcatcaaacgatctaatatctaatactcctattacaatattttcaatagatcttctcacacttgcagttacggaaaatctcaacaattattctcattaacataactagatcatgaaaattctgaatttaaaacgcaataagatcattttaatttaaaacttactgaattaaaaacattcagagtggatacaaatgcttacgcctgaacaaagaggtatttatgatcagattactaatgcagtattcaatgacatgggaggagtttttttttttgtttatggctctggaggaataggaaaaacatttatttggaaaacactagctgctgtaggaagatctaaaggtcagacctgtcttaatatcgcctccagtggtatcgcttctttgttgttagaagggggtagaatagcacattatagattttcaatacctttgaatccagacgaattttcagtttgtaagatcaaaccaaaatcagatttagctgatcttattaaagaagcatctctcattatttgggataaattagttgatcttattaaaaaagcatctctcattatttgggataaagctccaatgaagagcaagttttgttttgaagcattagataaaagcttttcggatattatcaagcgtgtagacaataaggtattttgtggaaaggtcatggtttttggaggagattttagacaagtgctaccagtaataaatggtgcagggagagcagaaactgttatgtcatctctaaatgctgtatatatttgggatcactgcaaagtgttgaagttgactaagaatatgcggcttttaaacaatgatttaagtgttgatgaagctaaagaaatccaagaatttttcgattggttattggttgttggtgatggaagggtcaatgagcctaatgatggtgaggcgctaatagatatacctgaagagttgttgattcaagaagcagatattcctatagaagctattagtagagaaatatatggagatgcaactaaactgcacgaaatcaatgatccaaaattctttagaagagagctattctagctccaaaaaacgatgatgttaacacaatcaatcagtacatgctagagcatctggatagtaagtttagattaactctatattatttaatcttgtaaattatgttctgtattcttcttaattttatgaagatttgattgttattttatttgtcacaggtgaagaaagaatctatctttcagctgatagtatagatccttcagattcagattcactaaacaatcatgttatcactccaaatttcttaaacaatattatagtatcaggtatgtcagaccattctttgcgtttgaagattggggctcctgttatgttacttaggaatttagatcctaaaggtggtctttgtaatggaacaatgctacagataactcagttgtgtagtcatattgtggaagctagagttataacaagagataggattaatgatatcgtttatattcctctaataaacatcacaccttcagatacaaaactcacattcaagatgcgtagaagactgtttcctctctctgttatatttgctatgaccataaaaaagagtcagggacaatctcttgagaaagtaggattgtacttgcctaaacctgttttctctcatggtcaattttatgtggcgctgtctagggttacttctaagacatgtttgaaaatactaattctcgacaaagaggggaagatacaaaagcaaactaccaatatcgttttcaaggaggttttccataatatgtagtgacaatagtctactcacatattctgtgatctctatagtcgagaaggtatatttactataccttcataatatttgaattcaattatggtttgaataacccgcaaacaaactgtctaatgaaacacatatgtttttacatatgcaggaaactcagtttcaaacaagcaaagtcatagtccaccaaataagctaagaaagcatccaaaaacaattctaaagttgttactcgtagttcaaacaagtactattatgctcacatggtttcatgctgcattgtggcaagtgttttccattttctcaagttggatctatcttgtgattcaataaacactcgattttaacaagttgcatcaatttaaaaaggtagtctacgattccaatcagttatagacttactcaaacctataattgcctaagatatcatatccaacgaattttgcaaacacttgaactttaaacacctaatactgcaacacatgaagattagattctcacctctgcaatatatggccacctcttgctcagtagtttattcagacattagaactgaaaacagaaagaacaaagtgtttgcagttaaaaattggtagctatgtttctaagaaaccgagtggttaaactgtactgcaacacaagaagattagattctcacctctgcaatatatggctacatctaactctagagtttaatcagctatttgacctgagaacacgaaataacaaaatgtttggtagatatgtttttgagaaaccgagtggtaaaattgttctaaactgttccatcatagagacattataatcaagtattgttaaattcaaaaaatcttttccaaaatctgattaaaacaaatctgcaaattcatttcaataatctagaaaaatacacacctttacaaacttcatacgccttttattctgatgagctgagttgattgtttgtctccatttcttcctttcagttcgcataatcaaatcggagttgaattgggaagaattcggatcaaaataacgaagttagaacatcaaagatctccagaaactatagagaagtcgtttgttggaggaacgatgagcaactagacggaaagtagaaataattatttgccgatttgagcagttttgcaaaaaagatgaagaacatatattgtcgacacatctctgttacataagaagaagaacaattaatcagtcgagatgagtaatggctgttttttttttacatttcattccgattcaaaacaaatgttgctaacaaagtagataattctattttcagatatactgtggtttttattctcataaacaatttagttatttatgtggatccgtgggcctatatttatgttaaagatgaagcccacaatatgtttattgttttgaagcaatattaaaaatatttcagactcccttgaagaattgattcctagatttttatatatagatttcaaaatacaacctgaaaaactaaaaagaacagcatttacagtttatttaaattatctggatgcaaaattacaagactaatccaaaattacaagactaattgtttaaaattaattaaaatacatcaaaacaacttaataaggtgtatatttacttattttctacatttatattgtacacataaaaaacaatcatatttatatttgcaaaatatagtaaataatatatctaaacatagaaaaaattaaaattaacaaatacgtattacactgtgaattatatcttacgaaattaattagtcgctatactaaaataaaatttagacccgtggtattccgcaggttaaaatctagttatatcatcaaaagtataaaccaaaattttgttaaatgatgttttgtggtttattttgttatattatttgtggtatattttgttattagtttttggaaaaactatgtaagaaattattgattttatttgtttattaaaagaaaacaaattgaatatattttttggtcaacatcggtcaacgccggtaaacatcagtcaatgccggtcatcactggtcaatgccggattctggtcaaagtaggatgcttatggtgttggcaacatgacttctgtttgttcgtgtatgtccgtatgtgatgtcaatacttcgtgtagctaacaaaatatttttaaagtctgcatgtatggcgatgtgttggcttaacttcatgtagctgataaacatttttcctttttagtgaaccgttgcaaaatatctgttgaacgatagtagagtgagttttctttatccatagtatgctttgaaacgtgtgtgcggaattatctgtaaaaaaaaaattacacaaatatgtctaatttatgacattagtgcgtttttcacattttctttcgaaatccgcaaattataaagtcaccattcactgccttaggtggtgaatggtaatttgtaaaaagaagttttcgaaaattactatcaaaccgcagtagtgttaccgattactatttttgtttaatccaatttgtgtttttttctaaaaaaatagtttacggttttgtccaacggattataccgtggaccccatttcaaaacaaagcagtctttgggtccgaatggtaacagcgtaatttattgtttgggaaaagcggttttgtaattcggtacggttcaactgcgctacgtgcgagaaaaatgtatttgcgggacaagtgcggttagtacacaataagcggtagaaaataaaatttgattggtgaaaatactatttacggtatacaataaaatgtttgaattatatgaataatgattttttgggtaataaagaaaattttcgtatatttataaattttaaatatacaaattgatataaattaacaatttctatctttttttgtcgaaaataggattatattaatgaatttaaaaagtcaagatacaattgtttagtgagctaataggcgttgtgcgatgtattgatgataggttagccaatatcctgaacgaacggtatattctcccgttttatggtaatgcgaaacaagttggtctggtattatggttttaaggatatgcatttgttttactgaattccgatcgtcaggatggacaaggtttgggatcaaattatgatttcaaaacctgtatgtaccgtggctggaaattaaatctttaaagtagaagttgttgttgtggttctgctaatatagatgcccaaccataggattgtttatctctttttttttttgcgttcagtagctgacaataattatagtaccgagatttcataattcttgcaaacaataaagttggatgtttaatgagcctgcaagcttgtttagcaagtaaagcatcattaaatttagcaaggtctttgaacccgagtcctccttcatttttttagtacttaagtcgtttccacgcaatccatgggatgcctctattttgattgcctttctcccaccaaaatctcatgagtagtgattcaatttcagaaactatgccaattgggagcttacaacaagacattgaataaacaggcatagatagagctactgatttaacaaaacctcttttcctgcagttgataaatattttgcattccaagtttgtgttctctgttttactctatctataatgtaggtgaacatttctttttttttcccaaattgtttttgataaccccaagtactttccaccacctccatggttcggtatttcaagtatttgttttagtcggttttggagattcccattgattctggacccaaatgtaatgagagatttgcttgtattgattttatgtcccgaataatattcatagacctcgaatgcttcttttattgcactacaattgcgattattagcttgacaaaagaaaagggaatcatccgcaaattgtaggtgagtaatcgctgggactccattgcctattctgaccccccaaattttctagtag

SEQ ID NO: 528 - DNA, 99384 bp, Arabidopsis thaliana
ggttgggaaatttggcccgaaagtgaagaggttaagtctttctagctaagcccaaagccatgtgtttttcaagctcaactaggatactagaagcggaaagatgttgcaagtgacattcatcaaatcatggagatgatgtagtcgtttaaaaagactacactatctcatgacatgaatctattgctttagccactccaaatccagagattggctacaagaaacacaacacaatgaaatctgagtgaactataaagctaaaagattcgtaatgtatacattcttttataccttgccgatagagtaagtcgttgaaaaagactacactatctcatgacattcattagatcatttggtttatcctaccacaacatcatttggtcaagatttgacattgctttaattaggaagtgtttgacgtgctcgatctgctcttctatgtcttcatcgtcatcacaaatttcttcaaacttaaatatcttaaggaccttcaacggacttgataatagagattaacgaactttgtgatgacaacgaagatacagaggatcaaatcaagtaggtaaaccactttctaaagacaatgccgaatcttgaacaactgatattgtggtacgatacaccaaattatttgatgataccattagaaattacttttactcacccacgattctgtatttggaaaagatgagacaattagatatgcaaaattaggctttgaatcttaaagtcattcctaaactcatgaaaggcctcctttagtctagatgacaaaattgtttttggaagaaacaaacggttttgcaaaacttgaaacatggaaaattaaacaaatgtgaaaatgaagcactaatttagtaaagtttttttattttagtgttcagaaaaaaatctatcttttaaaaattatttgatttagtgtcactaaacatataatttttaaaagttggatttccttctgaaaactaaaattaaaaattttactaaaatatgttctattatacatataagatataatatagcttctagctagatagatttttaatttttaaagttatcttaaacgtttgtgactttacagggtgatattttaacttttatatagtatgtgactgcataaattttattactagtaaagaatttagtatatgtgtacttgttggggtgtaatctatcaaaaatagtcagatgaaggtgataaataatttcgttacagaaaacagcataaatcactgataaaataaattgataagtatgaaccataaaccaaagtgatatatatatatatatatatatatatcaaaattatttaaaatttataaacaatttatagacacatatacaaacatgtgttcttacaatattgttatcttcttcttatataatgtattcaaaccattattatgtcaagtgccaaaattattttaaaacttttgtcacttatttattaatgaattcaaacagtttagtatttataaacacacctacctattatcactcttaaaattttcactgttttcaccacttttttttaacatttgactttattaatatggtgtcgttagtttagatagtcacaatgtaaggcattcgtgataatagaaggaacataaaagtgagactgaaaactagacagtaaccttcaaaaataaccttcgtgtatcctttactccaacagtgttgcattaccatgatcgaagcgcttgtagttagctttcgagagaccaagtgtcgttagctcaattggtaaaaatcctacgcgaagtttagaggtcgccggttcgagtgacgtttgggacgaaactaatattacatgctatggtttcgggcctagggaaattatgggttttggctcaaaaaaaaaaaaaaaaaaaaaaaaaattagctttcgagagcattcatagttactctgcatgcatgtgccttgacctgatacaagataagtaaccaaataatatttgataactcaacctgatttgactgtaatcttccattgacaaaggatcaatcatatatagttacactttgtctaatcctttggccgtcatctccaaaacgtatggcttattttgttgcttctttgatgattttatcacacagtcttagaccatataatttccatcagtttgattacgaggccgtggcagtcttggtggatgtgaaggcaaccagggatcggaccaagcgttgatcatcgagtcgtcgtctttgtaaatctcgaccttgtaacagtgatctccaagcgtatgacgtcttcttctctagggtagcatttaacacacaatctggattatgtagaacactacaaaatttattactctatttcacaactgaattgttttttggtatcacagttgattcatatattttcaaatagtttgttatacatagaaagatatcttttcaaactagaatagtcctattattcaaattaaatattatttatttaatttaaataattaaattaatatattaaatttgttgaaataaagagagttcagatagacttgataagattttagattatttgttgtccaaacacgttgtgacacctaccccctctgacaaaagaaaaagataattaaggtttacaaaccctttattttttatatatatatataatatatatatatatatatatataattgaagcatagcaagacaagaacacagccgcccaaagaaccaaaaacttctctgatccattgttgaagatgaagcagaatccaaaggcgaggagatatagctctcggtgtaatcggcagtgtgtcaacgttaggtctgcttttgtagcagcacatgtacgggaagaaggaatccatttcaggcaagcaatataaaatattcgatcaaatttcagatatacttgtcttaaactatttaacttttattgatttaggattaagaccaagcaaggaaagaaaaactgaaagaattctccaatggattacactgtcgatatggttagcgaaacgatacagatttagatctaatcagttggtttttattctcttttctatgtgtttttaattcttaatagatattttgttaattactgcgtagatctgtgatgaaagtagacagaaactacgagttttgtcggaaaaaaatgacagaaataatgcacggatgctttgtgtcaacggtacggtacgtcttgtcttcttttgtttttgttttttagtttttatttgagacttttaattagcataatatccttcaaattagttagatagaaatttgataagagactttttttctgtttatcttttgttgatctgagacttctattgattagatagaaatttatgtctttcaaatgttattttcatttctaacagtgattcgaatatgagaacaatctcaactttattatatatttgagtttgaacgcgcgcgcccaaatgtttttctttttagtgtgtaaaaattatgagttggttttatatatagaaggttttgtagttttttaaataaaaaaaacttaaccaacatatagttagtttaatgttgtaactctcatctcaattagtctactctatctatctattatgtctttttaaaaaaatctctactaaatgtttatactatgtaagcaaaacattgaaatcattagcttatcttaaatgtcttactcaaaaatgacgactacacttttaatcccccattcattttgatactattttcataattacatatatattttataattacatattgcaaatttacgtggatatgtattcaatattatttattttttttcttaagaaaataaaaggataagcctatttaagtttcacaactgaaaaatattaaaacacgcattaaaatctaattgattaattgaaagtttgaaacatgtctcgctttgtaaaatacagttttgtaatatgtcaagctctgttaagaatgtacaaactttatataaaaaattaataaacttttagttcttctcagaaggataaaactttcttattatttttaacatattaacaaaaagaattataattgaattaatgttaatagtgtaatatattaagattttctttatgggataaagatcttttatctttttctaatatagaaaaaatattccttttatgtacttatgtgtatatttctttttgataggtttaagagtttttctatgtttgtctttaaattacgactttagatttaacatgtgacgatatttggtgattatttggcacctgtcgcgatcacatgagttagcaactttaaaaatcaatggagtagataatcctcgcctcaataggcggatgtaaaaaatatacagaaattttcttataatatttgacttctaataccaatccacacttttttattttatctaaatatttttaaaccaaattttaatcttactcattacattttgcaatacaatttaactatttattttatgataacaaactatattttaattcgatatatttcatcttaatggataagagctaataaacaaaatctacatattccatcttattggtcaatttatttttgactatatttaaattttaaatagtaacccaggctttttcaatatttagtgttctaaatcttatctcaattttcctattatgtttaaatatccttcaataacgtaagttatttttgttgtttactaaacaactaatactatgtgacttccactttaaatattagtactatgtcctaaactttttactcaaacataattacacttagtactcatttatctttgacacaattgagacatctcaccattttatgtgttttgttgacatctatatattaatttatcataacaaaacaaaaggaaacggacaaaatgttaacaaaatacaccaaaaaaaacatttttgaataggttcctaattttttttaaaacccattttattaataatgtgatttatgtatataatttttggaaagtattataaaattttctaatttctattttaaatatattaacaaaattaaatttgatacatgtcgatatctcctcaaagtacttgactcgtgtcgtaatcacgtgagttagtaactttgaaaatcctacttttatataataagatattttaactcatcaatcaaaatttcatacaactttaggcctatacgccatatatataacaatgaaacttcaactaaaccaccgagttactacaatttgacatattagtaagcatcaatgacgagattttagtcagtcatgaatatgaagatggtccattgcttgtgcatgcatggttgagtgttttaaggagccacatggattgcatatcattgtgaattgtttagcaccagaactctaggagcaaaagacttctcctatcgtctacgagatgagacgtaaaaattttacgtctcaagacttaacacttaaactacttatccgatccaaaactagagtaactgaaacaccataagctacttaactagcatatcacatcatattagttgacttaagaaacaaattactccttggttgttttgttgatgagactagtggatgtgagggatcacacctcctccaacaattgttcctttgatgagtgtgtcaagctcctcatctcctctaaccgccaactgcaaatgccttggagttatcctcttcactttcaaatccttgttagtgttttcggccaactgaagaacctcagtagttaggcattcaaggattgaagtcgtgtagacaacatcagtcgcaccaacagtaccatgtgcagaaactctggtcttaagttgcttgtgaatacgagccactggaaactgaaagaaacaaagaaacaatatcagtataaaatttcatcaaattagactacaaaaaatgaaatttctttgtttatttcaatttctagtgggtcgtattcacatacaactcaagactagagtatctacaacatggtctacttggtgctattgttgttgactacacgccttcaatcctaaagtgcctaatttcataggttattgagttacttagaaacacaagcaatgataagaaaatgaagaggattactccaatgcattgatagttggtgatcgcaggagataaggatcttgatccattcatcaaaggaacaattggtggataaagagtagtctctcacatccacatgtctctcatcaacaaaaccacgaagaagtgttttgtttatttagtcaaatgatatgatgatgttattttctagttaagtagcttattgtgtttgtgtttttttttttctaatacaagatccaaaaaccctaaaaatatcctaaaacagaattactccatggaaaaggaatgtagtttcggtatgtgctactggaacttcaactaaaccagcgacccattacaatacaaagccattattgacactcatgtttcatgtattgtcattctggtgaaacatgaatgtttaagcattagttaagatattttagtcattcgtgaatatgaagatggtccattagttatgcgaatccatagtttattgtttcaaggagccacatagattgtaaagtcattgtgaactgttagcaccctacttttatgagcaaaagacttctcttatcataccacctctccctccaccacaatcatccgaacattttcaaaagcactcatcctcgtcgacacatcttttagtatattcgtgttgcactccatgaaacataaaatgagaccgtttcaaaaacatttaccgtgtaaaatcatgtcagttgttaatatcaagaatgtgtatgctactttaaggaagaggctttctagatttggaaaattcttgagtagatttggaagtgattcccttctatacatggcaaaatagttaattgcatcaagttgttgaatatcggtattgtttcacttcagtcattaagtacgtgaaataaaaaccaagttaactatatcatcactaactaattgtcaattgtaaactttaacaaaaaagatgtgactgaccttaaagtgtcacagagacaagtaaatgatcttaacattgcatattctcatgagaaaggttttcaaactattcatgtctttgggttcaaaataaattcttcttcacatgttacatgtatgaacatatcaagtgtcatttgaagtctgagactagcttcaacaagcgaatcaaaactcgcttgttgatacttatcagtcttaatatcgaagtattctaggttgaccatatttgagttatcaaatgacagtggcaattaggctaatgagaatgtgtcactgtcatttgataatccaaatatggtatacatagaatattttgatagtatgggtgatgagtatcaacaagcaagttttgattcgcttgttgaatttagtctcgaacttcgaacgacacatgatcatatcatacatgtaacatgttaagaacaacttactttgaaactcaaagacaaaaatattttgaaaaaccttctcatgggaatatggaatgttaatatcctttacttgtcttgtgacaatcttaaggtcggtcccatctttttgacaaaagttaacaactgaaaattatttagttatgatatagctaactcggttttaatttcaggtgtttaatgactgtagtgaaacaatatatgtattcaacaacctgatgttgttaactattgtatcgtgtgtagagtggaaatctaccatatctattcaagaattatccaatctagaaactctcgtctttaaagtagcatacacattattcagattaacaattgatatgcttttacacataaataaattttgaaatagtctatttttctgcataacgaatatacgtactaaacaatgtgcaacgaggataggtgtttatgcaaacgtgaggggagggggggggaaggaaatactgtttggtgaaatttcttatgatgatgaagacatagagaagcaggtgaaacactttctaaagacaaagtcgaatcttgaacaaaggatattgtgctatgatacaccaactgataagatgttactattagaagttacttttattcgcttatgaattttaaattcattcttaaactcatgaaaagccttttttagtctggatgacacaagtgtttttaggagaaacaaacgttttgtaaaacttcaaacgtggaaaatgaaagaaatgtggaaaatcatctcattttcagattaaatgacaaaagctttcatgtatgtgaagtcaagtaatcaagttgtgaatgtaaattaatgttaaagatcactacatatataaaacataaagctctaaagtggaaaactctagtatgaacttgttaaatattggataaaatggggataaccaattttgtcaaaatatgtgtggaagttgtgtaacaaaggtcatattaattaattgttgctatacaagatgaaaggtctctttgttttaaaatttgtgtatctattggaagtaatactgtttggtgaaatttcttatgatgacgaagacatagagaagcaggtgaaacactttctaaagacaaagtcgaatcttgaacaaaggatattgtgctatgatgcaccaactgataagatgttaccattagaagttacttttattcgcctatgaattttaaattcattcttaaactcatgaaaagccttttttagtctggatgacacaagtgtttttaggagaaacaaacgttttgtaaaacttcaaacgtggaaaatgaaacaaatgtggaaaatcatctcattttcagattaaatgacaaaagctttcatgtctgtgaagtcaagtaatcaagttgtgaatgtaaattagtgttacagatcactacatttataaaacataaagctctaaagtggaaaactctagtatgaacttgttaaatattgggtaaaatggggataaccaattttgtcaaaatgtgtgtggaagtggtgtaacaaaggtcatattaattaatttttgctatacaagatgaaaggtctctttgtgttaaaatttgtgtatctattggaagtaattttacaaagtcaatttatatttttctatttagaaatgacaatagattaagtgggagactgaaaggccacttaatgaaagaagtggaaaagtttgaaagtggtgaaacttagtttagtaaaataaatacaaaagtggaagagttacttaaaagaagtgcaaacccatattctaaaataacaaatatgaataaactactttgttatatgtttttttctaagcgtggctgaaactctcttaaacaaggttcgaaacttgctatccacgacacacaatctttttcaaatgacactaaattacatcaatgactatattttcaacactatatttgattttcgtgttgctattttttggtaatgctatatttattactcaacaaagataatatctacaaaagctctttgaactgaaaacacaaagacaaagtaagagcgaagaataaaccttgagtgtgctcgaaccaaaactgaagaatatcttgcagccagactcatcttggaatgaaacaaggtaaactcatgtttgtcgctctgaatggaaattgaatttaaagaaagaagcaagcttcacgtttttttttgggatcatgaaaagctttaggcgagatcttgtaattacgagagagggaagttgacaaagagcttgtggtgaaaaacgacttctgcctgaactgtttgataatccggctctgagatcagaggatgagagtaacgattgtatttattgccaccatgaactagaaaacctttgttgcatattggtgtttgtttttgtgagagaaactgttggatgacacatcactatactaagaaagtcttgttaaattcatcgaagatgtgaagagatgagcgtcattggtctcatgttgaagctgtttgatgggttgatctgaaacttgggttccatcgtcgaaaatgcagtagcattaactggagttacctctggttctattgttggggaggaatggccatgagagttctgctgcgattgacctgaagcaattttcagcttgttatatgtcacttgcttgatttgatgctgcgattagaggactgatgtcatgtttgggaggaagtttgatgcaactctgaatctagtagctcaggggaagaaggtttcaggtttcaaaaacagttttatgttttgatgttgattcttccttcttcgttttgtttggctacagaactctgattttgcttctaaaagatgttctggaaacttgaaagcaagatcattccaatgacatagagatcatcttctggttccttatggtatgataggaattcgtcctcaaaattggctgctcgcaggttatgttattctggatctgtcatgggaaattagccataagtttcaaaccataaacccaaatcgtgatccgtcttctcctgtagcttcgtatatctgatgttgggcttgcaagcaatatttcagaattatcttggttggtttgtattagtcaagtaacacacatggatcatgggcttagagttaacaagaagaagagaagttgatgagcccattaaccccttctagaagtgcgattagagccgttagaagggagaagagaggagagtcacgggtaggctaaggtttcatcttagccatggtcaagtcactatcactctagagaaaagtcgtctactctctcttcatgtctctttcattttgttttgtttgttgtaaagggaaccctagtgtctccctatataaaagtcttgttccctacattgtaaccaatctaatctaagtaatatcttcacttcctattcttggctcttctctcctctataaacttcatacttctccatacttctcatactcttttccgcatattctaacatggtatcagagcatgttcttcgattcttaacatgctaaatctcttctacttactctaatctacttactctctacattcttcttaaatctacactttcctcttcaagaaacactctattacccaacggttaaaagagtgtacacatcatggagaacccaaaaccggcgataacgtcggtggtcttgaaaggagagaactatctactatggatgaggacgacaaaaacggtgttatgtggccgagggctttggagccatgttgaaaccaaacatgttcagtttaaggctaccaaagaagacggcgacgaagggttcaagagggaagaagaagaagctgagatcgagaaagaagccaagtggtttcaagaagaccaaaacgttctcgctattcttcaacattctcttgagagctccattcttgaggcttactcttattgtgaaacggcacgcgagctatgggagacactcgagaacgtgtatgggaatgtgtcaaacttgactcgagtctttgaagtcaagaaggccattaacaaccttagccaagtagacttggagttcactaaacacttcggaaagtttaggtcactatgggctgaacttgagatgcttcgaccaagtaccgtggatccggccattcttaacgagagaaaggaacaagagaaagtattcggccttcttcttacactcaatcccgccttcaacgatctcatcaaacatcttcttcgagccgacaagcttccttcacttgaaaatgtttgttctcaagtacaaaaggaacaaggatctctcgggttgtttagtggtaagggcgaacttatcacggctcacaaagggatctacaaaggtgaagaaaggaaggtatgggtgtgtgatcattgcaagaagaagggacacatgaaagacaaatgttggattcttcatccccacctaaaaccggctaagttcaaagcaaacatatctcaagaagttgcaagtgaccaaggagaagtggtgaggaagtcagatttggagtctctcataagatccatcgcctctctaaaagaatctggtacctctttcttgacctatgaaccaaataaaatgctaaaggaatccggtacatctttctttacttccgaaccaagtaaaactcttgttatagattcgggcgcatctcaccatatgatcaacaatcctagtctaatcgataatataaaaccggcgttaggcaatgtagttatagcaaatggagataaagtaccggtaaaagaaataggagagttaaacttatttgataagaaatctaaagctctatatatgcctagctttacttcaaatcttttatcggttaagagagctactaatgatttgaattgctatacaatatttggtcctaatagtgtacattttcaggatattaagaccggaagggtacttggaaaggagatgctaaaggagatctttatgtgtttgagaaaaccccattgagtgattttacttcagtttcgcttaactcatgtttagctagtattcttaatgttgtgtggcatgctagattaggccaccctcatgctcgtgcatttgaattaatgttgccaaatgtttcttttgataactctacttgtgagtcttgtattcttggtaaacattgcaaatctatctttccaaagtctttgactatttatgagaattgttttgacttggttcactcggatgtttggacttctccttgcatgtctagggataataagaagtactttgtgacttttattgatgagaaatcgaaatatacatggatcacattgttaccatctaaagattgtgtgatggatgcctttataaatttccaaaactatgtcactaattacttcaatgctaaaattaaggtacttagatccgacaatggtggagagtatacaagtcacaaattcaaagagtaccttgcaaaacacggcatcattcatcaaacgagttgtccttacacacctcaacaaaatggagtggcggagaggaagaatcgacacctcatggaggtagaaaggtcaatgatgtttcatacgaatgtcaccaagaagttttggggagatgcggtgatgacggcttgttatcttatcaatagaacacccaccaaagttctacaagatgtttctacatttgaggtactaaacaaaacgaaaccttctcttgatcacttacgggttttcgggtgtgtttgttttgttttagtatccggtgatcaaagaaacaagttggatacaaagagcactagatgcatgttcattggatactctagaactcaaaagggttacaagtgctacgatcccattaatcaacgtatgtgtcttgggatgtgaagttctttgaagaaaaaggttattacgagaagaaagattggaatagcttggcagatctctctacaccctcaacggatcgtgctacaagtttacagtttcttcttgaccatcttggagttactccatcaagtgaaagagaaaccaagacaagagacttgatagaagaaccgattactattgatcaagaaaatgaacaagaggaggcctccaacctacaacaagatggagagattaatggaatccaaatacatgatgatatggatactcaaaatgaagatggaggtgttcaagagataaccgatcaccataccaccactattcagccggatcctactccacaagcttctccaactttaagacgaagtactcggattaagagaaaaatcttctcgcttgtattacaacaataaggcggtagctcaccctatacaagcagtgtgttctcttgccctcttaccacaagatcaccaagcttttataggaaagatagaagcaaactttgttctgcaaacctatgaagaagctaaggagagtgaagaatggataaatgcggtggcggatgaaaccggagctatgattcgtaatcatacttgggatgaagaagacttgcctccggggaagagagccgtgagctccaaatgggtcttcacgatcaagtacttgagtaatggtgagatagagagacataaagctcgcttggtagcatgcgggttcactcaaacttatggtcgtgactatactgaaacctttgcacccgtcgccaagcttcacacggtgagagttgttctctctcttgctactaatctctcgtgggacttatggcaaatggacgtcaagaacgcctttcttcaaggagagctagaagaagaagtgtatatgactccaccaccgggactagaagattccattgctccgggtaaagttttgcgacttcggaaggcaatttatggcttgaaacaatctcctagagcttggtaccataatttaagtaccacactaaagggaaaagggttcaagaaatccgaagccgatcacactctcttcacacttcaatccgatcaaggtattattgttgctctcatctatgttgataatattatcatctccggagacaacaaagaaggtatccatgacaccaaactctttcttaaatctacatttgatataaaagaccttggtgaactaaagtatttcttagggattgaagtatgtcgctctcccgagggcttatttctttcacaaagaaaatacactcttgatcttttgaatgagacaggaaaacttggttctaaaccggctaagacacctcttgttgatggctatacggtcaagcgaaccggggggggaagaagaagaagaatgcaccacttgatccgttagatgaaccatatgaagattttgctcaataccgaatactagttggtaagctcatttatttgaccattacacgacccgatctttgttttgcagtaaatcaagtgagtcaacacatgcattctcccaccaaatatcattggaacatgttggaaaggattctacgatacattaaagggagtccgggtcaagggatatggatggggaagaatgatagtacctagatagtcgggtattgtgatgcggattatggtggagacaccaccgataggaagtcaacaatgggctattgcacattcattggagaaaacttagtcacttggaagacaaagaagcaaaagatcgtttcttgctcaagcgcggaatcggagtaccgggcgatgaggaaactaacgaatgaactcacgtggctcaaggcacttctcaaggactttggaattgaatcatcaagcccgatcactatgcattgtgataatcaagcggcaatacacattgctaccaactcagttttccatgaaagaaccaaacatattgaggtggattgccacaaggtacgggagaagatagaagaaggaatgattctaccgtgttatacggacaccaaagacaacttggcggacatctttacaaagggggcaagtctcaaagtttgtgaacacatctacaacaaacttggacttgttgatcttacacgtccttgatgatcttccctaatccatggtcattacactctttttcccttaacatagttttctcccatgtggtttttctatgttaaggtttttaatgaggtaatgtatcatgggttccaagcttaacccattcatcataggctaagcttgagggggagtattagtcaagtaacacacatggatcatgggcttagagttaacaagaagaagagaagttgatgagcccattaaccccttctagaagtgcgattagagccgttagaagggagaagagaggagagtcacgggtaggctaaggtttcatcttagccatggtcaagtcactatcactctagagaaaagtcgtctactctctcttcatgtctctttcattttgttttgtttgttgtaaagggaaccctagtgtctccctatataaaagtcttgttccctacattgtaaccaatctaatctaagtaatatcttcacttcctattcttggctcttctctcctctataaacttcatacttctccatacttctcatactcttttccgcatattctaacagtttgctgcttcgtttgttctctgcatcgaaacagactcgatgaagctgctgtttggtgaagtgttttttgtctgacattgtcactttcgtttgacttggctatagaactatgttttgagaatttcaagagtttttggaatcttggaaatgagatctctccaagaatataaatatcttcttctggttcattgtggtttcataggaatctgctctcaaagttggctgtttgcacagagttttattccggatgtgtgttgacattttgccataacttttgaaccagctgcagatgcttcagaacaagagttttgtgttcgtggagaagcttcagtgcaacttgatgaagtctatactagctcaaagaagaaaaaacatggattagtggttgttcttaaacaatttctttggagttgaagtatgaacaacatgtcgaattttgttaagtaggattgtggctggttttgattcacggcgggtaatgaagctgtcaaggaagaggggagaagaaggttggactcttgtgtgcttatgactagctgaagaaaactgagatgtttcggaaaatactgcaactggagagtgattaagtcaagattatgaatatcaaagtcaaagacatgttgaagattcaaaattgagaggtttgaagtcttgatttttccgctgcaaattacaaggtacttgtgatattcatgtctgatgtttttaaggaagtgtctctatgagcataagaaacttagcatgttgtgatcaatctgaggtaacattccagagtggtgtaactccggttcagttctgtaaggttagctgaagtgacatctgcaaggagatgttggtcgggatcaatctgaggtaaaaatattcaaagttgagtaactccggttaagtattagcccaggaagctgaagtgtcttatgctacgtaaaggctgtgtcaagatgttgttgtggctaaaggatggttcacacaaaagtagaagattaatagaaggaagtggcacttgaagctgtttttagaacttgtgtgattgggagtgactgcatgatgaaacatgacattggaagtgacttaagatttctaaacgaattcattggtagacagtcctgtacgcgcaactgctgagaaaaagtcaagagggaaaagcaaaggagaattctacgtgatgattcactctagatgagaagtttgtcggcgtcagcctaaattttgaatacatcgtgttaagtttctgttgcaactacaaagattcagtgtaggttacattttccacttcaaaaaattactgtcatgtgcgtacggcaggctcagatcctgttcctattggcgacagcggtacctttttgaaaatggaacaactactaagcttgaggttatatggctcgtgacaaggaaacgttttttggattcacacaagagaatgaaagcgatctcctcacaagggtaaaagagaaaggcagcaagtatgacattaaagaaagttgttaaaacagaagaatgtcactggattagttggtgtaaaattatctagtaaggctctgtttaaacatgatggttggaattgtgtcaaggtggtttggtaccttgataaagtaccctttggttcaagtttactgcaaataattcaagaagcagtctgttcaaagagaaagactgaaggtatgtagttttgtgacttttcttgtgctataacagagttatttatgggagagagaaattgtttacaagacgaccaaacagaaattgtctgcaagcatgccaagtttttttttaaccaaggagaatgattcaaagagagtaataaccctcagttttagatggggaatattgcagatggcttgatttgtacaagagaagttattttagataacagttagcttggtgcttgagctaactaagaagcttagtgaagttatgattttgagaacaagctgcatttggagacagcgactaggtgtgttccagcttgcttgagtttgttacatgatcatatctcttggattaattctggaaaagaaggcttgcagtgtcagttatggttgtgggcgtagaaattttggttgtgcgttttggtaaagaatctgattctctgattaggattgatagaagaatttcatgataataagatcattttgatggttgtatcagcaaggaagtatctattcaagattgtgtgttcctaagaagagaaaagcaggtttgagttgaagcttattttctgcagactgtttaaacaagaaatcctggataacatgaaaggttttagatgcaagaaaacatgggcttatgttttcaagatggattcttctgacagtgtctatgtattccgagtagaacgctagcaagtagtcaagtagctatcacttatgtcggtcgctttgtgaagttagaggtgttttgtggtctttcacatatttttaagctccatcaaggggagatactgatggatactggttttgtatgagtgagatgtaaaactcagttcacaagcatccaagcagggataagaatgtgatgcaatggtgcaggggtagtgttttttgccgtgttgttgcatatatggacgtttcggttgatggagcttggttggtttactctaaactgatgcatatttggtttgagaattgatatctatgttggattattttattgggccaactcttgaagattatgtgacaaagacgtaaagatctgatgggcgttgttgtttttggttgtcataacgctgaagaaaaagacgtaaacacggttattcagattgtgaagtatcctctaacaggtatgattaaggtcattctggactaagtgttttaacagtgttttctcactcaagcagggggagattgagaaggttcagcgaacagattgtaagcacaatgatataggattcatggagagctttatatcttgattattgagtggtatgcgtgctttacatggagagcttgagttgtaaaactcagttaaaaacggagagattgaaagtgcagatattgttgggacagtattgaagtacaaccgatgagatcgagagtaagtcgttcgtgacgtaacgtagaagcaaaaaggccatgtggttcatgggcctttattcaagttaagcccaattgcttgtagagacttgaagcgtggcttaagtcgtctagggtttttggcacttgatatataaactaagagatagcaacatgaagagttgcacgtctagggtttattaagagatgcacacttgtgtgtggcgtcgtcccaccaaatacagatgatgatcttttggtggtattcctttggaatctgcagccgttagagaagacggtgatgcaccggctgccgggtggtagtcaagacatgtgtggcttgatactgtttccaaagtccatctagaaaagagtggtaggcaatagttatgctgtaatatcatatgcaattgtatttgcaatcttgttctaatggaattgtttctggactaggtcccggagatgtaggttgttaccgaaccccgttaacaaatctctgcgtgtctttactttatgcttcttacactcattacacgctaatatcgtacaaacacatagacctagcacacacatagtaactatacctccatccgccaatccttttccgccacgtcctccgatggtgaaggtgaaactccaccaccttcacccaccactcctctaccagcttcacccaacactcctccaccagcttcacccaccactcctcagccacagcctgagcctcttgttccttcccctgaagttccaccagagcccccaaccaatgaagacaacgaacgtacttctgtgatcttcactttccgtggtgaattcctcggtcgatgggagcaaaggtcagtgaaattccggatgaaccaagaatcgtattccccaaactcagaaccactgagtatcactttattagaaatctgattaagaagtttacaactaccttaattggttttacacaagatctaaactactttagcttgtcaccagagatttccctaaacacacaagagcagatcacaagaacacactctttgatctctctagaattccaatcagactaaaccttagtctctaataataaaaagcgttgcactagcttttcactcacaatcacggccaagtctaacaagaaccttagcacctctatttatactatcgaggtctttggtcttctaggttagccttcgagatcttggatcactccaaatcttcgcgtgaatatctcctctccaaactgaactcatcctgttgtgatctccacgtcattcgttcatttggcggcatatccacgtcagcatcaattacttgatcttcactttagtcttctgaaacagcttccagcttgttccagcaatcagcactccttctggtttgtcctgacagagggtgcactaacaatctccccctttttgatacaatttgtcaattcaagcaatcctgcaagaaacccctcaaagaaaactcacaagcacacatcaaggcatagagataataagcagcggaaataaacaatagagggtctcatcatagattgcataaacaagtttttaaggttcaaaatacatcatccagtacttagaaacaaaaacctactaaaaccaaaaggacatgattaacaaacacagcttaaaaactcctccttaatcctaaactcccccacaactagatctagctttcttcgttatcaacatctagagagtttacaaatgaattagagttctcagggactagttcataatctccccctgcttgcatgacataattgatcaaaaactctatctagacactctaccaattaaaccagacactgagtacaggacaaggacaccataccttccatacgtgtcgttattgtcgtcaacaaagtagagacatatctcaaatctacaggtaaggatgtgcgaaacacatactctagattaaacatctttcgcatacgccgggcattgctgcgtgttctcccatcgctagggtttcggcgtgagagctcaattttctgggttttctcacttgtttcattcgatagatccctttatgcaaaccatagaaactcaaaaccaaaaatcagtgctaaccggattttggtccggtcaaatctcataaaacacaataaccaccataaaacaaaatcgaacaacccaattagcttatagaattgaactaagtaccactgaaaattaactcatttttctgaagccatcttgatatacacagaacaagtccccattagtatcagcacagtaataaccatctctccctcatactgaggtccagaactgtcccagaggtgattgtacaatactaagctcattgtaacttgattcaaaaaaatttagaacataatctgctgacacaacacaaaagagactgttgattctccaagagtagtcttcacaacgtcatatctcagagtgttagcgagtccttttaacaaggagtgtgacagactgtgcagcaacattcaggctattgatgaattaccagtctgatcttttgtattcagaacttattgttgtttcttactgctcctttctacagagagacgagatgtcagcgagagaacttgtttttccaccccccttatttttttttatttttttatttctcttgtcttgttgcagagtgtaatgatgctctttattacttgttctctcaatatttttgtttgacatcccttctctccaaagtgtaggtgaacaagatttctcctttgttcccatcgggttagtgacaagatttctcctttgtcccccgtgtcttagataagctcatgcttcatcttatgaaatgaaatgcttcttttctgcccctttctgcatttcatcccttccttaatgctctacacactgtgtctgtcacacactttactgactttgcatctccgaaccatgtagggtagctctttctcttggtgaactttttacagcagaagatttgaaaaccggttatgacactttgtaaaatagatatgaaaacttgcttctcactgtacaaccaaccctgtttcagcataaacactcatcaagaagatagttagacttcaccaatacctagggactttagcaagttcacaaacatgttcaagtccaaaggcttagtgaaaatatcagcaagttgaatttcagtaggcacatgttctacggtaatttgtttttcttcaactaattctctaacaaaatgatgtcttatagctatgtgtttagtgattgagtgttgtaccggattcttagatatggcaatagcactttcattatcacatttaacaagtaaagggtcagaaaaagacataccgtaatccaaacccatgtgtttcatccaaagaattttagtactgcagctgcagaggttggtagtgctcataggagtttcaactggattgctggaacacatatcgaagcgtttcaccaggttctgagcataggtgctttgcgagatagcaatcccttcattaatctgattgatttgcaacccccgaaagtacttaagttcgcctaccatactcaacctgaactcagttgtcattgtcttcacaaacgctttgaccaacttgtcgaatgtgcctccaatcctcacataaacatgatttatcacataacatgctgtactgatagcctctgtccagaatttttcaggaactccatgtccatgaatcatggctctggccatctcttgaaaagtctgattctttctctcaacaacacctacaactctcttgtgttggactctaatctgtttaccttgattgtaggcatcatacacaattttctctatgtgtttcagctcttgtactcctctaaccatttctttgctcactatttctgacatgctcctcgcattcatgtgaccaagacgttgatgccataccactggatcctccttttcagctctaagacactctttaggttcttcccacatgtagcaattgttcccagttctaactccagtgagagtgttttggttcttctcgtttgtagcccagcattttacactattgaaactcacagtcagcccttcatcacatagctgactcacactaatcagatttgcagtaagcccttcgacaaagtacacatttgtaagctgaggcttttctgctttagtcaaatcaccttttcccttgatttttcttttatccccacctccaaaagtaactttactttccttgacagaggtgtaattttcaagattggattgacttcctaccatatgtctggatgctccactgtcaaaataccatggtttctttattccttcttcaatcgaggtgtatgctacatgacaatagagatcctcccttctgacatacatcttggaggttcttccttgatatggatatagttttccttgtctcttcagcttattcaacctagcagcatacctgtagcaatatctctgaatatgaccatgtcttccacagtagtaacattcgtaacctgtcacagttctccgggattgatagtgatcgtgattctggtacacgcgtcttgctggaacagcatcatagttgcttcgaaaacctgtttgactttttgttggagcagcagcttcgcttcgtacaaaattcgtctttgtacctgatccagcaccattgtatcctaaaccaaaatttgattttcccactcttccagcagcaagtatactatccaaatcttttgttccactgttcagcatgtggatgttcttgcgagtgtcactaagctcttgagaaagttctctgtttttctcttcagccacactgcatttctgaatcagctcagagttcttctgatttgcagcagttaactctcctttcagcttttctgttagttcttgaacttttagcttctcttccagccaggcaactttctctttactcagcatcaaccagctgtcatacagtttcctgaactcttcattgatgttaacgtccttttcgatgtcagaatcctcatcagctgagttgtcctcatcctcaccatctgcttcactatctgaactttcatctttttcttcaatgattcctacaaaagacacgaaaccttttatataatcttccgagtctccatcatttgagtcactttcactttcagaactgcaggatttatcaggcttagactttgatccaacacagtcgaacttagtgtgtccaagaccattacactcagagcacttgagatcttttctctttaaggagggacattcagctttaatatgtccgtatccttgacattcatgacattgaatctcatccctttttgaacttcggtctcgatatctatcagttccctgatttcttccgaatcctttcttctcaactctcctcattgctctactgaagtcttttgccatcatgctcattgtatccttcaattcctgtatctcattcttctttgccgatgctgctaaagcaagtcctttggagtaacctccctttccggaagtgatttctaattcatatgcttggagcattcccactacttcttcaaaatcgattgagtcagtgtccaacgacgttcccatggccgttctcttactttcaaaccttgatgggagacacctcaacagtttcttgaccagtttcttatctttgtatttctttcctagattgtgtgcttcactcgctatggcactgattttcccactgaactcctcaatgttctctgtttcttccatactgagattttcaaactgagatgctaacatgtcgattctggatcttttgacactacttgtcccttcatatgctttagcaagtttatcccatgcttctttagctgattcacagttttgaatccgcttgaattgattttgattcacgaagttgaatatcaaagacagtgcccttgaattagctttggcctttgcctcttctgcatcattccattgatctttagtttttagcacatcttctccatcttctcccttgatgaccggagccttccacccaatgctcgtagcaatccaagcttcctttcctagaccacgtatgagagctctcatcttcactttccagtgtccataatttcctttttccaacatgattgttttaccgaccgcaacgaactctttggggtagtccatcctctccgtaggatctgcacctgttgttaagtacaactttgttcagatgcccgctctgataccaaatgaaattccggatgaaccaagaatcgtattccccaaactcagaaccactgagtatcactttattagaaatctgattaagaagtttacaactaccttaattggttttacacaagatctaaactactttagcttgtcacctgagattttcctaaacacacaagagcagatcacaagaacacactctttgatctctctagaattccaatcagactaaaccttagtctctaataatgaaaagcgttgcactagcttttcactcacaatcacggccaagcctaacaagaaccttagcacctctatttatactatcgaggtctttggtcttctaggttagccttcgagatcttggatcactccaaatcttcgcgtgaatatctcctctccaaactgaactcatcctgttgtgatctccacgtcattcgttcatttggcggtatatccacgtgagcatcaattacttgatcttcactttagtcttctgaaacagcttccagcttgttccagcaatcagcactccttctggtttgtcctgacagagggtgcactaacagtcagtgccagagagggagtacttctcagatgatgacattattgatggagatgatgagggggtgataacaactgatgatgatgacagtgacactgatcgtcactgggaagattgggaagaatatcaactcattgaggacatgaagaaacagcaagtcaatgactcagacacaagttcatcgtccgatgaggatgatgttaaaagtggcaaagaaaagcttggagagcaagcaacaaggtcattgtcgacactaggagttctcggttcttaattatcttccttttttttcatcagtttaagcaagcaagtttctgttaatttcctctaaagcttccatagaagctatcaagatgtttcttttaatttcccctaaagcttccatagaagctactcatgttcttagttaaatgtacaatgagagaacgtcgacttgaccgatctatatataaaccatatttatgaagtgttctttgtttatgttatcattttgcctatgttttttcatagacgtacataattagtgttctaattaatgagatctaaagtcaaatatgaaaaattaattccatctgtaaaattctaaatatgaaagacatgttctaacaaagcacgtttataatttttctttcttataatttctctttttttttacaatgattatatatgctaattagccttcaactttactagaacattaatgtcaagtataaagagaacaacattatagaaaaattactttttctttaacaaaaaaaaacattatagtaaaataaataattgtgatgactagttaaaactaaaagaaaagaaaaattacagagtgaaaaactgtatggccttcttaatcttattactaacttcaagctcaagtaacaatgttaatggaaagcccttgtatacatcccaccaaatagtctttgtaaggaacaatgttaattgttttttttttggcaaaaataacaatgttaattggaagttctatctttttgtacacaaatgtgtcctacgttatatgagtaataaatagcagaatctgcatggtttcatggagagagagaacgaattgactcttaatgggtggatcctagctataagttaactttgaaaagtttttcggttttgtgactttggttttgcgtttttggtcattagtcacaccactcaccactactcacttcactagcctcgtacacatttaaacatggatattaaaattcgaatgcatgcatgcatgatccacattcagtggtgtattttgtaaaatttgtttttgacttctcttaatttatgcatacagactaaaaatattttcgtgaccgactttcgttttaaacgatcttaaacttttttttttcaaattcacaacctcgataaaaaaaaaaaaaccgaaatcgctttgaatacaaaaccttaaaaaaagaaattaattatgccattccaacacaagtttacaattttttatattctgcaatttcatgtcctcaatccgtgatgttgttaatctaacacaaatttctaatattatatttaaaaaaattgggacatgattcaataaaactagttttgctgtttaaaatcttcatatgtaattaacagaaatcgaatatcatgtcaaaaaaaattccaacaaaaatagtagagtataggccatttatttagtttctataatcccatgaaatctcctcaagatctaacctcagatatatcaactatgaaaaatatggatgactgaatatcttctttttaagaaaaaaaaaaaccatgtaataatatctatgtatattaaaaccagtagatgaaatgatgaactacatgtctaatccaatgacttagggtctcgctggtttaaacgtaacaatcatactaacttttgttttaaagtgttgttgtttatggttatgattcaattttagtggtttggttggtttggttggtttaatcaagctaatggaattggaccaggcggttatctttgattttgggattgttgaataaaccgaaagatgatgactcagagagaagccactaactgcagtggagggttttcagttttattgagataaggttttaaccaactcaagtttgtttcaacgtaattatcacattcatctttcttctgttattcttgtatctagagagagagagattccgccattgttgtaagctcaaatttgagcataactcttcctttgatctagtgaatttgccggattgattcggctccggacgtaggttagatcacaccgatctagctgaaccgagttaacaaatcgagtcttgtgttcttcttctttacttgttcgatagtgttcttgagctgagttttgtgagagttgagagattgttacaaagcttgtgaggtttaatcgaggatcgaatctataacaagtggtatcagagccaaggctattggcagatcttccgatgacgacaacgacacgagtagagattaaaacgtttaatggcgatagagatttttctctatggaagattcgaatcgaagcacagcttggttattggggttgatgaatacactgacagatccatctctaacaaagattgttccaatcgcaaagattgaaggaaataaaccagaaactgatgatgaatcttctcagactaaagaagttccggatccaatcaaaatggaaaaatctcagcaagctaagaacatcatcataaaccatatcactgatgttgttcttcttaaagtccagcattgtgtttcagctgctgagatgtggacgacgcttaacaagctttacatggagactctattcttttaagatgcttgaaactttgagcattgatcagaacgtggatgaattcttgaggattgtagctgaacttggaagtttgcagattgtagttgattgtagttgcagaagaagtctaagcaatcttgatcttgaattcattgtctgtgagttacatacaattgaaacacacaatgaagtatggaaataagaccctatgtgtgcaggatgttgtttcttcagccatgtctttagaacgagaacttgttgaagcaaaagagtctaataaaggtgcttcaacagtgttgtatactgctgaaagaggaagatctcagttcaggaatcagcagcagcagaattccaaaggtaaaagcagaagcaggtctaactctaaatcaaagctcacatgttgtatctataaaaaaggagggtcatgttaagaaggattgttttgcgagaaagagaaagatggaaggtcaagaacaaggagaagcaggggttataattaaaagtcttgaattctcagaggctttgaatgttggcgaaaagctggttaaggacatgtgtgtactagactctgcatgtacatcccacatgattgctcgaagagattggttctgtagttttgatgaaacaaagaagaccacgattttacttggagatgatcactctgtggaagcaagaggtcagggatctatcagagttaacactcacggtggatccataaagacacttaacagtgtcaagtatgtaccagaacttagaagaaatctaatctcaacaggaacgttagataaacttggtgttagtcatgaaggtgggaaaggcagagtgagatacttcaagaatgatgtcactgctctatgtggaagtttaaagaatggattgtacgttctggaaggtgacacagtgattgaagagagctgtgttgcagagaaagaaacaggaaacacaacactttggcatagcaggcttggacatttaagcctaaacaacatgaaaatattgtctgggaaaggtcttctggataagaaagatgttaaggaactgagcttctatgagcactatattatgggaaagtcaaagaagctaagtttcaatgtggggagatatgatactgaagatgttttaggatacattcatgaagacctttggggttcttcaaatgtcacaccctcactctcgggaaaacaatatttatgtcaataattgatgacaaaactcataaggtctggatattgtttctgaaaacaaaagatgagacattccagaggttttgtgagtggaaaggaattgttgaaaatcagattggaaagaaagtcaaagtcctaagaacaaataatggactagagttctgcaacaataagtttgatgagttctgtaaagttcagggtattaaaaggcatagaacatgcacttacacaccacaacaaaatggtgttgctgaacgaatgaaccgtacaatcatggaaaatgtaagatgcttgcttgatgaatcaggtctggatgaagagttttgggttgaacactacaagaaaacagtcgatttgcgagggaagaattactcgctaatccctcgcaaacagctaaacgcaagatatttgcgaggaaaacgagttcctcgcaaatggttatatgtcgcaattccctcgcaaatttttcgagaaactgttttcctcgcaaatcacacgcaattgttgactagtacttccctcgtaattacttcaacggatttgcgattcttttttaccgcctagcaaatctctagcagaatttgcgatggatttgcaagtgttctgcaacgtttttctgatatattaagacttgattagtgtctgattagccactaattacctagttaattagttgttaattagagatgattttgtatgcaattaaaagctgaaatttcataaacttgttctaaatagataaatacacatttgaagctgaaattcaaaaatttatgctacattgtttcttgttctaaagaaagagataacaaggaaaaagcaagacaatgttttcaaaatacagttgatggaggagaggatcctgttgcaaggttagctagggcagcagctgctgtctcctcattggccacctgcggttctggagcagcagacacaggtggttcatttgggttggcctgtcctatctgtgtcgaggaaccatgtcgaagaattgcagccaaagcaggatctttttcagcaagatagtcaaacaggatgtcgaagctattgatcctctcagcctgagattgaatgcatgcttcagcggcagccagcttctaagaaagtataaccgaatcatcactaggaagcattggaccactatgggctgaggatgcttcaaactgcagagatccaaccccataaatccttcctttctttcgcggagcaaccggcaaagatcacaaacactcacaaggacacaacagaaaaaccatgagaaaccaagttcaaaagaattcagacacaaagtataatgaataagctgccaagattacgagaactttatatcaaacactagagacacaacacaaacatttcagacaagtacacaacacaaacacttcagacaagtacactaaagaattcagacaagtacacaagtacacaacataacagaattcagctgccaagtacacaacataattcagacaagtacacaacagaattcagacaagtacacaacacaacaagctgccaagtacacaacataattcagacaagtacacaacagaattcagacaagtacacaacacaacaagctgccaagaaaaagcacagaagatttacctcagtaaaaatcttgttcttggaatgaacagacaatccacctgatccagtgctctccggattgtccattgagcacatatgagactcttcctcttctatcctagatgtcacttgcttgtaaatctcctttgacttcccatcgatgaaagttccatccgcttttctgtgtgtctcatctagcagctcaaggaaatcaggagttgtttctccagtcttttcacactgaaacacaaagagataaacaagttagattcataaaattgtagtttaagtaatggtaaggagagaagaatacttatcttacccgttttcttgcacgagctttgtatgaggtctggcctgaacgatgtttatagatgtctttgccatccagatcatgatatctagcatttctgctgttgttactctttttctctgactttggatcttgccaaaactgtactagacctttccacacatcaggatcaatccattttggcttggcttcatcacccttctccttccaatttcccttccaccttgacacttgattagacatcctagactttagctttgcttcaaactcaacccttactcttttgttaattgaacggtcccagttatatacttgctacaaaacagacaaagcaaacatcagactatgaaaccaaacaacaaaacaagcataaacatcaaaagagcacagaacttactgcaaacgtttcataccatcgatcgattgtagcctttgatgtctatgaccaattggcatgaggttctttgaaatctctttcaaatatgctgcggattgttgctgcaactatagagtcatcgtcaaacctacaacaacagcaacaaaacacataaggatctctatgtctttatacttctaagaaactacaatgctaagtacaaccaacctaaatccagagacttctaaggcaggaccaaacttctaaggcagaaccaacctaaatccataaacttctaaggcagaactaaccaacttacaagacctaattccagagactataagcttaaccttaccagagagttcccggaggatgctttgggtctagccttgtcaagccagcacaaccaggactatcgaggagctcttccagtgtcagattgttgagacggtcaacttgaacatcataatgattgacagaaggctgagtcgttggcgttggaggcgatggtggaacggttgaacctgaacgtgaacctgaaccttgaacccctgagatattcccaccactaacaggagaattgacatgcaacgggtcacgctgctgttgtctaacccgtacaaaagtattatccgacggcatcttgcacaaaaaacaaatcaagagttagatctgggaaaaagaagtaagatcggagaagaagaatgagttagatttgagagaagaacttagatcggagaaacagaggttacctttgaggcaaaacagatcgagtcggagaagaagaaacgcggcggtgtttgaatacagatcgaagaagaagagaggcggcgaagagagtctgcgtcgtaatcagatcggagaagaagagaggcggcgatgagtataacagattagagaagaagaagaagagaggcggcgacggaatcggatcggagaagaagagatccggcgccgaagagatcagagaagaagaagagaatcgaagaaaatttttagggttagggtttgatgcggctggtttgagctccgctcaaactaggtcttcgagtatatataggaatttatttcctcgcaaaaccctcgcatagtttgctttgaaattgcgaggaagatttttaaaccaattaaaacgcaccacatattgcgagggaattgcgagaacacctagcaagtccctcgcaacttatgatttttaataattttgggtttagggtaaaatttacgacggaagtgcgagtgcgtctagcaattccctcgcaatccttcaaccaattaactccaccattttgatttagtgtttgaatcagatctgatttagattcacctatttcgaataagactcccagcaaattaaaatatgactaaatattttaaataatttaaggtttatggtaaatatttgcgagggaactgctacgacagacttgcaaatctctcgcaaaaacctcgcattgttgaatcaatttgaaaaaacaagaaaacactacttaaaattattcggattagttattctgaatcattaggaagttaaatatctacattagaatctaatttcatctcaaaaacttcaaatgtgcatttttcccaaatacatcaatgatgaacttatgtgttttcaataatatgaatcataagtgtttaacatcttcaatatgaaatgtcatattgaaacatatacaatatgtttttgtgcatcaccatataatcaacttgtatgattatacagtcatttagatttacatttataaatgaaaatcaaagatcccaaatcacttctatgtattttagggtttagggtaaagatttgcgagatttttgcgggtggtttgcgagggttgatattgttcattgcaaagtactcgtactttcctcgcaaatttgcgaggaagcagtctctcgcaatatttgcgagggattagcaatgtgcgtccgtggtcttgcaaaatatctgcaattccctcgcaaatttgcgagggattccttcccttgcaatttttcctcgcaaaacgactgttttcttgtagtggaagcagcgtctactgcagcttatctaatcaaaagatctccctcaacagccatagatcataatgtacctgaagaattgtggcttaatagaaagccaggatataaacacttaagaaagtttggctcagttgcatatgctaacttggatcaagggaaactgaagcctagaacacttaaaggtgtgtttcttggatatcctgaaggcacaaaaggataaaaagtttggttattggaagagaagaaatgtgtgataagcaagaatgttatctttaatgaggcagcagtgtataaggatctaagtactcaagtctgtgaaggaaacgatgatggaaatgcacttgtcaagtcaattacagaaacagaaatagagaaaggggaaagttctaatctaggtggagttatagagctcgatgtcagtgattctgaacctgagtactttgaacctgaaggtgaagcaccagtaagtgcataaagtttgagtagctacaagctgactagagattgagttagaagacagattagacctcctacacgattctctgactactctcagtttgcctttgcactgtacacaacagaagaggtagaaagtgaagaaccgagttattttcatgaagcaacagaagataaaaactgggaaaagtggaacggtggtatgaatgatgaaatgaattcattatggaagaactttacttgggatattgtggaccgacctaaagatcaaaaggtcataagttgaaggtggcttaataagaagaaaccaggcattccagtggtataacctgagaggtataaagcacgcctagtagcaagagggttcacgcagagaaagggcattgactatgatgaagtctttgctcccgttgtgaaacacacatccatcagagtactaatgtcaattgtagctcaggatgatttggagcttgagcagatggatgttaaaactgctttcctacatggagatcttgacaaaccattatatatggagcaacctgaaggatatgttgtagatgaaagcaaagatcaagtctgcttactgaagaagtccttatacggcttgaagcaggctcctcgacagtggaataagaagttcaattcattcatcatggatcagaattttacaaggagtgaccatgactcctgtgtttacataaaggaggtaaatcctgatgagtatgtttatttactcttgtatgttgatggcatgttacttgtagctaagagcatggtggaaatcaacaagatcaaagaagctttaagtcaaggttttgaaatgaaagacatgggtccagctagcagaatacttggtgttgatatcatcaagaaccgaaaagaaggtacaattagctgtctcaggctggttatttggaaaaggtgttacgcaggttcaatatggaaaatgcaaagccagtgagtacacctatgggagctcactttaagctagcttcactcaagaatgaagatgagtgcgtagacaccgaaaaggttccttattcgagtgccactggaagtgtcatgtacgctatggtgggaacaagacctgatatagctcaagcagttggagtgctaagtcgtttcatgagcaaacataaagaagctcactaggaggcagtgaaatggttactgaggtacttgaaaggctcgattgacttgaagttagtctattcaaaggagagtgttttcaggattcaaggcttcagtgactcagattatgcagcagatcttgacaaaagaaggtcaactacaggttatgtgtttactgtgggaggtaacacagtcagttggaagtcaaatctgcagaatacaatagccatacctactactgaagcagagtatgtagccataactgaagcggtaaaagaagcgttgtggatgcagggtctgttgaaggatatgggagtaaaacaggataaggtacttgtgtggagtgattcccagtgtgttatcagcttgtcaaagaaaaatatgttccacgaacgtaccaagcatattgcagtcaagtaccattttatcagagacgtgattgagaatggtgatgttgaagtacttaagattcacacgtctcagaacccggctgatatgcttaccaaagtcattccagtgcagaagttctaagcagctttagattttctaaagttgctcaggtaagtgacttgagtcactactgctaaaggttaaatccatggttgtgcagattcacttagaaagaaggaaaattgaatcaaggtgaagtgttgttgtttatgattctgattcaattttagtggtttggttggtttaatcaagctaagggaattggaccaggcggttatctccggttttgggattgctgagtaaaccgaaagatgatgactcagagagaagcctttaactgcagtggagggtaaccaactcaagtttgtttcaacgtcattatcacattcgtctttcttctgttattcttgtatctagagagagcgagattccgccattgttgtaagctcaagtttgagtataactcttcctttgatctagtgaatttaccggatagattcggctccggacgtaggttagatcacacagatctagttgaaccgggttaacaaatcgagtcttgtgttcttcttctttacttgttcgattgtgttctagagctgagttttgtgagagttgagagattgttacaaagcttgtgaggtttaatcgaggatcgaatctataacataaaggattttaatttctttttgtctaattcacaatcttggtacaaaatcgaaatcgctatctctagtgtgaaacatttgtatctgagcagacaagaagtatgaaacaaagcattcaaagctatctagtgggttggaatctatcctgcttgtcgtaccctcaaggaaacacccacgagtcaatatatcccacaagatttatctaacaacatggtacatttctgtcttactctcccagtgtacgggatcattaccctaaacggcctacaagcttcaagaatttctgatgccttctccggatccacaatgctatcgtaccaatcaatgtggccatgaatcaatagaataaccacatatactaaagtctgaatattagcgtatataatgaaatatcagtttctctgtgaaaataaaataaaataagttatgctgctgaaatttagagtaaatccatcaaaaatgttttttcagtctttgtatctgggtattttgtatactttgactattcttttttttttcttagaaatatatactttgactattcacaatgtttaagaactatatcttccaataaattttgaaattttatacacaggttttgtttttgttttttgaacaccaatacatagctataaacattaattattacacatacgtgataaattagtttgcttgtgacctataaaagcttatgcataatcctatatatacgatttatatatgttaagtataaatgtttgactgttttttaattgatgaaaaaatgttttttaaatttttagttacacaaagagtggtggtaataaaacgaaagaataaccagttgttcaatatgactcaaatactagtttagaattcatttcgaaattctcggatttaaagaaaaatgagtccaaacgttaaaaactaattaatgatatataatattttgataatttaccaatttggaactttttatttatagaaaacttagtgggactcacagccagtcaccggtcagtaatgtgtgaggtattccattaatctcgttgacttagctcaaccattgtctattgtctgttgaaatcaaatttttacggagaacaaaagtttatgcaaaactaatattagtaagtgtcttgaaatattaaatattttaaaagattagctcaactcaaaaccttagtctttcaatttatatgatgaatctttcaaaaccaccacaaaatctttatttaagcttgtagatacattagacacatcatcacaaaattttcgtacatgtttgagtctatgtgatttatttaataggcattaaatagaaataaagcttttaataatttcaatcacgtgtgaagcggcgattgaattgcgaacggtgatgagatgcatttctattttctgatctattttttctatgaacaagtcaaaagtctttctaatagaaaaagggaaaaagaaaaataattttaagtaatttagtccaaaaaaaaagaaaaatctattatgagaattatgctaaaaatagttttttcttatctaaagctcctatatttgactatcaaccaaggattcaaagttttactaattaggacaaagtctttgaaaacatttcgtagattagagtgctttttttagaaaaaatattcttcggtgagatttttcagtagaatagattggtcaatattaatttatataatcccaatatatataactaaaccctttaaagaaaaaaaaacattctagatgatactacgataatttaccaatttagtactttttatttctttttatctgtttattagttaaaataacttttgttgtttaaacaaattatgtcacttaaacgcaaaattcaatttcgttttctctgtttgttttcctaattaaacttttagtagagtatatgaagtacgtaattaaccattttccaatattagtcaagtgactttgacttttttgaataaataatcttctagatgattacagtttagtcccaaattagtaaaaatttcaagggtgatttaaataaataacatgttaatttatctgatatcactgtatttcaataaaatgtgccgttttgtatttcttttgcttatgacatgttaaaacagtaaaatattgcagttaatcaaaaacaatagtctttcatgtattaattcaattttactcgagtacaaaaaagtattaatcaaaacatatgcatttccattaactagttaaaatgaccccgacttttgtctatagaaatataattttatgattgattgacgaggattttgttataggttgtgttagtgttttcgttatgttatagtggatagtccacattgttgacacaaattatatgattattaaaattctaatttatgtatgatttaaacaaacaacatgttaatttatctgatagtaagtgttactatcagaaaacacgaaactttacaccttaatatataatacgtgtttgctaatttacccaataacaacttatcttactaaatatagaattttgctaggatacgaaaacgtattttaatggtacattttctccaatttactatattttctatcataatacgtcaagtaattctttaagagaagaatcaacctaattttttaagaatatcagcaaaccgcaagaagtggctttaaggaaaaaaacaacttctttaataaatcatacctcttcgttgacaaaaaaaaaagaaaaaaaaagcacacaactccctctcgtaagcaacagttgattagttttactcttttcgaattgcttgatccaacaacacgtctgtaatataaaacaaattgttgggtcgtatgatatatttgttaactttggacaaaaaaatgacatgtttgttaataatataggtctatgacgtcgacactgacgaaaaacgaaccaaaacaaatcttcacaaatatctttccacgagaatctaagatttaaaccgatattattatgtagaagcagacataaaacaaatatagacaacaatattgtctttatataacaatattgcttattaaaaaaaaaaagagagttataaataatattagtagaaaaaattgacaatatctgagtccacgtcaaaaccctttttgtagccgaagcatctggttctctatcctcgtctctaaccacatactagacaaagtatctctcatatctctctcttctaagatatcttcttcttcacctctctatatatggatgattagatatggtacggaacaatcactcacacacaaaacacactctagatataaaggattagatacgtaacatatcctttttttggttactagggtttcggaaatttggatatcaaattttaacatcaagcaaatcatcatccgtacgtactcattcatacttttgtaacaaaaaaaaaaaacaatctaagatatctatcaagatcttaagatatctacatttatagagatgtttcgttttccggtaagtcttggaggaggtccacgtgagaatctgaagccatcagatgagcagcatcaacgtgcggtggtgaatgaggttgactttttccgatcagcggagaagagagatagggtttcacgtgaagaacaaaacattatcgccgatgagactcatagggttcatgtcaaaagggagaattcacgtgttgatgatcatgacgatcgttctactgatcacatcaatgtaagcagatggttaactcatcgcttttgttttctttgttttttttttattatctagaagttcaagctaaaaattctacatttccgatatgcgaaacccacattagattaaattcattttttttggagaagagatcgttcccaacgtgcatcaaacccagtacatccacatgagaaatttaccactggaccaacagctcgttggttacttcattgttttccttttcgtcaatatcatttaattacttcggattttagttagtaatattataaaacaataatttcgttatatagatgaaaactttgttcattgaaatgtgtatgattattgtaaatagattggacttaatcttctcactgcgaatacgggaagcgacgagtcaatggtggatgatggattgtctgtggatatggaagagaaacgtacaaagtgtgaggtacacttattattcaattagtatagatcatttttgagtaataataacaaaaaaaagacacaactagtgtatttatcgcacgaaccaaagaaaaagagattgtcaaaatccaacaaataaaaaatgattgtcaaaaaccatcaagagtgtatatttttgtgcgtctgttacgtacgtaaacaattttccgcttttctgattcgtcagaattttaaataatatctgatgacaaaaaaaataaaaatatttttatgctaaattttgattatttttactgttcatcttcattttgtcacataattaagcataaaaagatattttctgattttctctacaaattttttatttcttaagaattagtaaaaatataccgttttcgtagacttagacattctatttttatatgttgttcgtatcggtccgtaagatccggacatgttagagagatttactctttcttactagaatgatttaatgtctgatacatgatttttttgttttttaataaaatgaagaatgcacaacttcgcgaagagctaaagaaggcgagtgaagataatcaaagactaaagcaaatgctaagtcaaacaaccaacaacttcaattccttgcagatgcaacttgttgctgtcatgaggcaacaagaagatcatcatcacctagtaattaattaacactctaatacgtcttaatcatttatttcatataattagttaaagattttatacccttgtttttcatcaggctacgaccgagaacaatgacaatgtaaagaaccgacatgaagtgcctgaaatggttccaagacagttcatcgatttgggaccgcattctgacgaagtgtcgtccgaggagaggacgacggttcggtcgggatctcctccctcgcttctagagaaatctagctcacgtcaaaacggaaagagagtgcttgtaagagaagaaagcccggaaaccgaatccaacggctggagaaaccctaacaaagttcctaaacaccatgcatcatccagcatttgcggtggcaatggcagtgaaaatgcaagtagcaaggtcattgagcaagcggccgccgaagccaccatgcgtaaagcccgtgtctcggttcgtgctcgatccgaagctcccatggtaatactaattaatcttcctctctagaatttctatgaagattgatctctacaaatgtttttggaggttcattaacatcaatgacattgttttacagttaagcgatggatgtcaatggagaaaatacggacaaaaaatggcgaaaggaaacccgtgccctcgagcttattaccgttgcacaatggctgttggatgtcctgttcgcaagcaagtacgttacctaaacaattcacacatctaaaattatgtttgaaggtgatcaatcaagtgtaataatttagagaaaaaaaaaataatgtattgtaacaaactcatgatgacctaacaggtgcaacgttgcgcggaagatagaaccattctcataacaacctacgaaggaaaccataaccatccattacctcctgcggctatgaacatggcttcaactacaacagcagccgcaagcatgcttctctcaggctccaccatgtcgaaccaagacggtttaatgaacccaacaaatctcttggctcgaaccatattaccgtgttcctcaagcatggctactatctcagcctctgcaccattcccaaccattacattagacctcacagagtcacccaacgggaacaatccaaccaataacccgctgatgcaattctctcaacggtctggtttggtggagttgaaccaatcggttttgcctcatatgatgggtcaggctttgtactacaaccaacagtctaagttttcgggtttacatatgccgtctcagccgctaaacgctggtgagagtgttagcgccgctactgccgcaatcgcctccaatcccaactttgccgcggctctagctgcagccataacttcgattatcaacggttcgaacaatcagcagaatgggaacaacaataacagtaatgttacaacgagcaacgttgacaataggcaataacatttttttataagttttagttagggactttttatcggtcgattttgttttgtttttcttttattacattattttttagttacggcttttttttgttttttcttttctttcccaaacaacaagtattgagagcaattcccccccccccccctcttttccttctgtatgatcgacaattgtgttcagaaatataaaattgcttaatttttccagaagctattaattcttatgaagtcatcaaatgcgcatctatgtgccattaattatgatcaaactcgatgtattgtgcctaaaacggaagctcaacaagcaaatgctttaggcattataaatatattatgattttagggcatcaaatttaagaaatctccttacagtgtagccgtttgtgtaatattttattggtgggtcaataatattttttgctttagggagcccaaacacttagactctgaacatcggtacgatgttttatttgtggtggatatatggaactgctattaacgtacttactcactctaaaattagtcgatgctgacctcaagagtttggcttgtgaaaagttgatgaccagactaaatcgatatgtcacttgtcaagtgtggcattattttaaaggttggttaaatatataatttaagtgaaagattggacattttatccaaaaaaaaacagaattagactggattttgagaaagtgaagaatgttcccgcatacgcaaatagaaacatagttgagaaactaggatatctacatttgtattataaaataaattatactatggctttgaatgggtccatatgacgtggattggacaatgcgcatatcaatattttaataagaaaaatgtcggaatatagtatatatggagcaaacaatatgttggtataaagtttatatatgatgatatggagtttttggagagtagaatgaaaaaaagtcagactaacagttaatttataatggtatcaaattttatgctaagtgtgtactagtatgaaaatttttagtctgcaatagatacttatccttaatagtgaacggtaaattaagcagaggtttttacatatttggacatttaactctaaaaactctgaaaaaagcactttttgttagggtaacggagatggacatattctgctataagaaataacggttttactctctatcatcttcttctttccttcttttttgtttttgatgagtgaaatcgaaaagatagtatagggattccaaatggatcccaattaaatttgtattgatgagtaaaatcttaaccctaatgagagtatagggaactcaaatgcttcaatcatagacacatatcgaatcaattatgaattttaattaaaaatctaaattatttgagaactttggatagggagttacttggataaacttgatccatggagttctttgaatcccttatagatgacaacatcttatcaatagagacggccttttcattctcacacagactcttatctctcgtaacaaataatttgggattattttaaaaattacacttaaaagctgatcctaatttcataagaaccataattgcaaaatcaaattagaatctaaatacaaaccaccgacgaattaccttattgatttctttgagggaaaatgaagatcatgacttgctatagagacaaaggagagaaaaaatggtaaaatggtcactcaaatgagagagaagtacctaattctataagaatattgaaaaatgatatgagagacaatgacacaaagttttgaaaaatgatatgagagacaatgacacaaagttttttgtgctttatctataattgatccaaattaagcgtgaactaattcgactttagtatggtctgcatcttactacacaacattcaaaggctatacatgttttcaatcaaatcaatatacattcaaagcctatatgttttttaatcagataaacagccagtagtcacatcttttacgtgctttcactagtacttatacactctaaactatatgcatgccttgaatggggaatagtatttagacactaatttaggggttagaatgaaagaaagaaaacttgaaggggttagatgagcaaatatgaaaagttaaaacttcaaggaaacgtatgcttatgggtcccacacagcgtcaacaacgtgaaggcgtttgcttgtgccacaaatcaaagcaaccttatattttccatttgcagcaaacaccaatcaaccaaagtaacaaaccatctattattaattattgtgcaaaaaaaaaaaaaatccttcgcacgttttaacattttattgtgaacatttcagacatttagtgtttttctatgtgagtggagataaaatttttttttttttttttgaagaaatggtataattggggtggcaaagttaatttaaagacgttactgtaacactgtttaagaaaggggttcaatcatattgctctttgctaagctggacctaagcatgggttcaacgtgaagcgtacctaatgctaaacaaacccatatctacggatattttgctaagtataattctcatccattaaaaacagttagacaaataaaatatattgtcttaataaataaataaatgaatgagacaattcttctggattttaaaacaattctttttttgaatcagacaaatatttaaaaattaagatgatagatttaaaaatttcgttgtttatatatatcttggttttaaacctatattgcttaagatcctacttttacactttcagttattatatacctttttaaaaatatttttttattaaacttactatgatttcacttatcttgtagatttttatttagtactaagaaaagttatttatattatataaaatgaataaaaatttagttgagtaaaagaaattaatacataaggttctcttttgaaaatagacatataaggctcttccttgcacacttcaaatagaatgaatttgatgtggaaaacagactaaaccaagatatcatcctagaagatatcttaactatgtacttaatagaaaattgaaaagaaaactttatacttatgcaaaaaaattattaacttttacttaagagaacaattgggatcaatatgaaaataagatataacccaagggtcgataaattaaagtgaattaatatgaaaatgaactttatccttaataaacacaaaacgaattttgctgatctgtctaggtccacgcatagcaagcaaggtttcataaacgtgacgcttgcttatgaaactaactcacacttataactttaatttaattccttcatattcttcaaaagtttccatttacaagcaacaactaaactaattgacatttgacaataaaaagctgaactttattatgtatctctaggttttttccttgagagtttctctctttgaagtcatttacgtatatatatataaacccttgcaccattcttcttcgtcttgttaagcttttaagaatctctactcacattttctctgtgagtgttcttttatacttctttgttatttccaatttttctttctttcctctaaaaattttaggaactattgaatcatttaatttctgtttgttgataaaatttcgatcaactgttctcggcttaccgatgcattttttgtaaaaccgtctttttttggtgaataaaattttaaattcatacaaaaaaaaaacatatttgatactattttagctccattgtatctgaatcttcatttgttaatttttttgtttcctctgttctcacttgaattttggaatattttctctaggttttaccttatattcttcactttaagaactatatgaagatttgattggaagtaataatattcggtgatagaatctgagtttgtttgattctggtgtggggcttatatctaacttttttctttgtaccaatacattttcaattttacatttttgattagcttaaaatgtgaaggataccttgtaaataactattacactattgcttgtcttagtctaatagtcttcactaatattttgtgcagtagaagtaaatattataaagagttgttgtttgattatagagagttgttgtctattctttaacttgatgtgatgttgtttttgatgacaggtaaaaatgggaactaggttccaatcattcttgctcgtgttcttgctttcatgtttaatcctcatatcaactgcctcgtgtgagcgaaatggtgatggaacgattagaattggattgaagaagaggaaactagaccggagcaacaggctagcttctcagctttttttgaaaaaccgagggtctcattggtctcccaaacactattttcgcctgaacgatgaaaatgcggatatggttccgctgaaaaactatttggatgctcaatactatggtgacattaccattggtactcctcctcagaagttcactgtgatctttgatactggtagctccaatctctggataccatctactaaatgttacctatcggtacgcgttagtttgttcttaatgcataataattctgaaaatcctattgtattcttactcccaaaagaacaaaacaaaatatctatgtttaatgttttttcaggttgcttgttatttccactccaagtacaaggctagccagtcatcgtcatatagaaagaacggttcgttctctctgttcatcttgttatttgatactcgagcttcggtactttgatgtttcttgataactattcaagaaagggatacatttagcgccggtcttttgatatgtttgctgataggttttgacgataaaactcattgtcattataggaaaacccgcgtctatccgctatgggacgggtgctatttctggttactttagcaatgatgatgttaaagttggtgatattgttgtgaaagagcaggtaaaacgattcatccgcttacatatttcagaatattcatgtgagttaatatctaactgctacatctatatatcaccacaggaattcatagaggctactagtgagcctggtataacattcttgctagcaaagtttgatggtatcctcggtttgggtttcaaagagatttctgtaggaaactcaactccggtttggtatgaaaacgtttttgatctataatctgatgaaagaattgttgttgcaattctgaatgatgaaatttatatgatgtgtgtaggtataacatggtagaaaaaggtttagttaaggaaccgattttttcgttctggcttaaccgtaacccgaaagatccagaaggcggtgagattgttttcggtggagtcgacccgaagcacttcaaaggagagcatacttttgttcctgtgacacataaaggttactggcagtttgacatgggtgatctccaaattgctggcaaaccaaccggtaagtaagcttttgagatgtttcagtttcaacataaatgagtccttttacctatgatatgacatctgacttctatgttattcaggatattgtgctaaaggttgttctgctattgctgattccggaacttctctgctcaccggtccatcggtgagaatcatttcactgaaacttttgtagattgtacactacttagcacctgaaacatgctgaatatttatatttgcttgtttagactgtcatcacgatgatcaatcacgcgataggagcacaaggaattgtaagccgtgaatgcaaggccgtggtggatcaatacggaaaaaccatgttgaattctcttctagctcaggtttaaatcactggtcatgacaccattcacatttttataagcaatacaatcttgaattttacatcacttgacttgcaggaggatccgaagaaagtatgctcacaaattggagtctgcgcttatgatggtacacagagtgtgaggtcagtactgacactatccagtcaaaacaaatatgtcaaacataaaactgattcatgtctgtctgcagtatggggatccagtcagttgtagacgatggaacatcgggtcttttaaaccaagcgatgtgcagtgcttgcgaaatggcagccgtgtggatggagagcgaattgactcagaatcaaacacaagaacgcatactcgcttatgctgctgaggtgagtttcgagagtgtcttgaaagccttattttggacataagcatgttaagactctaatctctgtaaaacatgtatagctatgtgaccatataccaacccaaaaccaacaatcagcagtggactgtgggagggtttcgtcgatgcctatagtcacattctcaattggtggcagaagctttgatctaactcctcaagacgtaactactctcatcagcttttccttaagttttcagcttacaaggagagtaattaaaaccttttccttcttcttcttttggtcgatcagtatatattcaagatcggggaaggagttgagtctcagtgcaccagcggtttcacggcaatggatattgctccgcctcgtggacctctctggtaactatcatctacaaatacaatctactaaccaacaaactcaaatgggttttgctcaaaattttgtacatcgtgtgaaaatgcaggatcttgggtgatatcttcatgggaccataccacacagtgttcgattatgggaaaggaagagttggattcgccaaagctgcttaaacaatatctcttctttaataccctcgttttttatatgatgtttgtgaatgtgtttgtaataacttaaaacatattgctatcctagaatggtatcatcttaatacagatttttatttggtttcagagctgtttgatttgctttaacttacagagtactaagtgatcataatgagtcccaaggcttgagttctctgtcacgatccatgtgtttcctaatcacttagcctttgccaaagctagtgtcattgacctcgctcgcagggttaggaaaattcccctgaaaaaacaaaagaagaagaatgtggagattacaaacaagtttcagttgagtaacaacaacaagaactagctgcagcaaatgattcattgtcttaccaaaagaatgcgaccaggctgtgcaagatgacccggaagtgcagtggcacatacttgtagttaatccatcccaccaccgggaaaaactgtgattgatatatagaatcaatcatccagcaattcttgttatgattcaaattctcttaaaagagcatgaactatattgatgatatctatcacttaccgtccatgcagtaagctggaccgttggataagtcttcttgatcctttctctaacaagggtccagggagttcctgtttcactcaacattgcagaactcttaataccatccacgacggttcgtgttttacaaatggagtgtgaaaaagggaggaacttactttctatgactactccataatagatcatgaaaagcaaatggttcaatggtgacaatgtcaattgctccagaattacctaccactcaaacacactgtttaagaaaacccccggatcaatctcgaacatacaaatcatcgaaaggtatcgaacattgttaccttctttgcaacagtctgtgtatccttcttccctttaaaaaacttatctaaatatgtatgaaagaaatgccctgctggtccaagaaacccaccagcaaatatctgttggagaaatcaacacagaactcaaatggtaaaacatatcaaagaagctaggactggcttgaacttaggactctacaagagaaagattcaagctttaccactttgagaagaacccttctcagctgaatcttctgtatgccagagagcttctgtgatacaacatcgctaacaccagacaaaactccagcagttattgcctacaaatcacatgaattccaactacttgtaaaacagagtcaacgatactctcagataatcagattatgaaattgggttaggttaaaaaacaaaactttcaatcgaaaaacaacgtcatcgtctctcaatcaatgaaactaaacctaatctcaagaaaacgaaaccaccccagaaaactacatcaatcgcttcaaatcaacaataggagaagaaaagtttcaacctttgttcttaaaggatgttgttgaagctgtgacaagtaccgttgcagagtcgtcttcttcggtggtgaagatcccatttttttggattcttctcttcgatactctctctagtgttttgtcatttgtgtcttaagcaatttgaccaaattcctacctacaaaacaaaaccgaaccggtttaatcaaaccaatataaaccgagccggtttagatgtaattaagactcgttctacgaggatggcgggtaaaattgggaggctagctttacggttagaccaaaaaccgtcacaggagaatctatcaaagcctaattggtctttggtcaataattctctctttggtcaattcaattccttaaattttcttgttttgttttatgcctatcatcttaaacctatatataacaccacacataacatttctctcttcattcatcaaacacaatcacaaatctcctgagagatattaagaaaccaacataaccaaaaaacctatcaataatggcttcattgcaggtatcaagattagttctttcgtcatcttcttctagtacaagacctaaagcagcagtttcaatcccgaagctaccgaaatttcacgtctcggttccgaaaataccgactttatcggttaaagaaccgagctttgagtttgtagaaagtcttcctctttcgttgaaacaaaagagaggttctgattctatccaaagaactcgtctcaatgcggttcttgaagaagttatggataggattgagatgcacaagaacatcggagatcaacgtaacaattggaactctttactgctcaattctgtcaacatgattactctcactgccgctttgatggccggaatagcctcggttaacggtcacggtgtagattctgtaaccgctgtgaagatagcttcaacggtgttgttaacatctgcgacgggttttgctgccttgatgagcaagattcaaccttcgcagctagctgaagaacagaggaacgcgacgaggctgttcaagaagctgagagtcgaaatcgaaatgtttctgagagaaaacgaggagatcgaagaagaagatgttaaggaagtgataaagagagtgttgtctctagataaagcttatcctcttcctctgatcggaacaatgctcgagaagtttccggaagagtttaaaccggcgacttggtggcctgaaaacaaggagaaaaaccctaaaactagtcttgcgaatggatggagtcaagagcttgaggcggagatgagagaagttgctcatgtggtgaagagcagagacgcagaagagtatgagaaattaggtcacgtggcgttgaagctaaaccggttcttggctatctctggaccagttttaaccggagtttctgctgtaagctctgtctttatcggtcaagattccggtttagctggaatcgtggcgatgacttgtgcttctttggctgcggttgtcaacactttagagcatggtggtcaagtgggaatggtgtttgagatgtatagaaactcagctggattcttctctctattagaagaaactatgaaatcgacggagaagagagagaacggacaagtgtttgagacaagagttgcggtgaagctagggagaagcttatcagaactgagagatctcgcgaaaagatcgaatctctctcaggttaaggccaaagaattcgctagcaagcttttctagtttttcttagagagaacattcttcattcttttcttttttttgtatagatgaatttgttcattcattctttgttaccgacatattatattagcaaatttgatttacttttacaaagaaatttgtcttttgatcgaaattttaaactagagtttgaatgaaacatgaatctttgtcctgatcttgagcattttaatgaaccgaaatgatacgaccgattcaaaacagaaatgaaattattcaacgaatttgacccaatctaaaattaaaccgattagggtaaagaaagttcactaaaaaaacggactcaatcgaatttttaatttaatttattaaaccaaatattttttaatataacatatcctcaaaaagagtttatatttcactaaagaaagtttactaaagatgaaattaaagaatttaaaataattatttactcaactaaattcgggtataattcggtgacaatgtttccataccaaagtaaccaaaataaacctaattatccgaatatccaccccaaattacatattttttgtatcttactctatccataatcttttaaattttggtaatttcgaacctgcgacttaacatctgttattgggttctacggaagtcgttaccggttaacggtaaaatataaatcgtggttttttagaccacttttttttgcttttctaatttcacttaattttgttaacgccgttaacgatttccgtaacgcccaataacagatgttaagtcgcaaattcgaaattaccaaaatttaaaagaccatggatttaaaagacaacaaaaaataatttagctatttttattccaattttaaaattacaggtattaaacggccaaataaaaaataaaccgcggtttttaggcttttccttttaatatgtattctcaaaaagaatttatactaaagatgaaatttaaagaatttaaaataattatttactcaactaaattcgggtataattcggtgacaatgtgtccataaagtaaccaaaataaaccgaattatccgaatacccaccccaagttacatgtttcttgtatcgtactctagtttctctagcaccaatgcagatgaggtcagaaaataatggaatattcaccgaggatacaagactgtaatcgagacctcatccactgaaaacggatctttgtctttacgctcactcatggacctattttcaggtttcaccgagagaggcagagtgacgaaagcagcttctgtaggtttaggtattgtaaaagtaccgtctcttgcaagccaagttattacagagttcatggttggtctctttgctgcattctcttgaacacacaacaaaccaatctgaatcaactttatgatctcgtttcttggattctcgtttaagtaaggatcgattatactctcaagctctccttctatccatctcttccatgccttatatcaaaagaaaacattctttataagtcaagtgatataaatttcgtgtaaacaattatatttttttctttagtatgtttaaaataataacaaattattgtgcaaaataagtaaatatatacccacttttttgcattatgaattatttacttgtaattttatgcaaaaatgcaaatcttgggtttttgcgttttctaatacaattatgcaaattttcttgattgacaaatttcctgcttaaccgcattagaaaacgtcattatgccattatgcgtgttaccaatcaaagcctaaaagtgagaagataaataaaatgtgatcaagattcaagaagcttacaaaagcaggaagtccttctgtttcaaagttcttatttttttcaccacttatcatctccaaaagcataacaccgaagctataaacatcagatttagctgagaattgtccatgtctcacgtactccggagccatatatccgctgcatgaacaaaaatcacattagtatccatgtctaaagcagagcatttatgtgtgaaatagagcagacttactaggttccaactactctgcttgtctctcctcgagtctcatccatgttaaacaacctcgccatcccaaagtctgcaactttagggttcatctccgcgtctaaaaggatattgcttgccttcaaatctctgtgaataatcctcaactgagaatcttcatggagataaagaagtcctcttgcaactccttctatgattctgtacctcacatcccatgtaagaagccaacgtttgtcttcgtctacatattttgaaagaactctttagtctgattaacaagttttgtgtacattggtcatgtaaaggcttaccaaagataaagtgatcaagacttgaattagggacatgctcgtagacaagaatctcttcatttccttcattacagaatccaagaagcttaactagattcctatgttggagtcttgtcaagagtaagacttcattcttaaactctagttctccttgtcctgagcctccagctaatctctttaccgctatctcttgcccgctcggtaatatcccctgagaccggtataagatcactgaccaaaatctaaagattttgataacactttacaaggtttgatgaaatttcttaccttgtagacagatccaaacccaccttgtccaagcttattttcaagggagaactcattggttgcaattaagatcatgccaagatcaaatcttaacgtagcttgaccatcagaatcagaattctctgcacatattttgaagcttttttcattcaaaacaacactccataactttccaaatgtttactcaaaattcttgatactcactattgatttcagtataaatcctcctccgcatccggcgataagcaagcacgaaagcgacaaacacggcaagatttatgcccgtagggaaaacaacaaccacaacgctccatggttgaaacattcttcctgaagaaaaggttaatgtcaagtcaattcaagatttcatcaagaaaatcaattctagtacctttcttgacccgataatcttgtcgagtttgaggagatcgaggaggcgcgggaactctctctaggttatcgaaagctcctgcgaatctgtaatcatcccatcggaaataacaactaggacgggcaactgttcctccaactctgtcccagttatgttcttgattatacctaacattttctctcagacaatgattacagtcactggaagataaatcaggtgtgcattgcatcaacatattaacctcaggagtgtctgtaaactctgcacttgagactccataatacttcaataccgaagactcatcagctgtggacgcaacctcaactgttcgattagccctggcggcaaactcttggctgattcgggttagattggaagaggggtcaagactcgagtgaggaacattccctattggctcaagctttagtttgccaaatctatggatatttgagtagcgtactagacaagaaacgtttgcatcgttttcggaatcccagtgatatgcttctgttttgcctcggcattgtgttaacagagtcctacttgctctatcgacgcagcgacgacaagcttgaacttcgtagtgttttcgacatagggcaagagcgtaaactccgtctagcgaaacgttgtagaaaccacgttctcgtatgacgtttgaagcaagagaaggcaagagagattcgaggttttcaacgtagcttgtgtttggagagaagtcttcgtcgccgcagacgaaggtagtgtgaacgccattgatgttgaagagaagaaataagagaagaaaacaagggatgtggaaaagattggatctttccatttatctattaacgtttccttattaaaacctattgtttggctttaaataaacagattttgatttgtatttattctcttggagaattgtggatcaaatacgaagagacttttctatcacgaacacttgacttttagggtgacgtaaggagcaaggcaaaaagacttttcttccctaaattgcgcttacgtaaacgatacgtcgaacacttcgttgtcattatgccttaagtggcatgtaaatgtcttcgatagtaacactggaaagagcgacgtcgtttccgcttccaaatagtttggaaactacaagggaatgaatatgaaacgagtcaaggcctagtacgggtttcatatactgtcaaggatcaaaggacaagtgaaagtcaaattaggtgaccaaaaatggtttcaactttcatgacttattaaaaattaagaaattttcacaaaagtggatgaaattttttttgctctcatcgtttggataaatgagagttggttttcacgttttcccttttgaaacattttgtgactgaaatacccttaatagaatcaaccaatcgcacagttgcagttggttttggtttagttttttttgcagtttggttttgcgaaaaaaaaaaaaaaaactgaaacgaagaaaacgagaaagagacggagagatccgagagaaaagtagaaataatttcgaaattcattcatccactccttcatttttcgacattaccgttcaaattgttgggtaattgatttgaggcatcctattgaactttaaaattgagaaacaaatttcatgttttcagagatgaacaaaatacaaaaaaaaccaaaaattcaaacactttagcttttaaaactaaaaatactctaggtttacaagatttatttgtaaaaagtattcaaaatgaaaaaaaaaatgagattttgaaaaaactggtaaagacggccgcaaaattaggtttgcaaaaaaggatacagaggttgaagatgactgaaaaattacagttataaccttcatcgaatttcttttgtgtacgtatattcaatttacaatgtacgtacacgaacttatttagtggaacgtatatggtacgatttctaataacttaagctattttattacatattcttatatctcaataatctccatacatacataataattaaataaaaatatatggtgaaataatatttgttcctcatattgaaaaattatgtacgtatatgtgcaataatgtacgtacatttttgttggtaaattaatgtatgtacatgtgtagtaatatacgtacatctttgtttgtgaattaaattattaagaaaaatttattgattcaataataaaccgatattgacaatgactgagatatattctaagactttcatacgatgtgattttgaaacattctgaattcctgacgacttgagcagtcaaatgtcatggacaggtatcatcaacgcatactatctccaatcttgtaggacatgacctaggttgcttatagcaaaaacattgtttgattgcgagataagacattgtttgttgtatgacttttctgttcttaaaaatactcctcaatctatagtgtacgtacattggtacaaaccatgttgacacgtacttcttggagtcacagctggtgtacggtcacccgagtgagaaatgttatctttgttaggtacacgctgacttgtgtacgtacacgctgccaacagccgactgaattcccctggacgttgaacagtcagttgagtgaaaatgaagtcctcctcaacattccctattccatattcttctacaattacatcgttccacttgttgtaatcataatcttcgccactactttcactaccatcgatagtaggatcgagggtacttctcccatagatccatagtcaccctgataatcatcatacccatcaccattttcgttgtccccctcctattcatcttcatctgttttaccgtcttcaacgtcgtcttgctcatctagcgcctcattattttcatcaacatttgaaacactatcacacacatggtcactttcagcatcgtcaccatgagtcctagagacattatttccgagtgtcttgacggttgtaatgaaagagacaaacaagttaagaaaaagatacccaccacgaatcaaaaagaacgtatctaaccccacttgactgtcaatgtagacaggagggcgtttagtatctatcatcactgacatctctcccggcatccagtaactaattatgggattgatctctgcggacttcaaactgaaagcctcgcttagtgtacgtcatattttccttaacacgtacacatcgaccaaacatgtcttcctctggttcaaatttccattcttcttctttgcatctccactcaccgaccatagtaaatacgggaatatccattacccaactgcatcataaattcaggagaaacccattaaatgcaactgaaaacatgattatatctacaaaaacaaatagaatttcgatatacacacttataaacataaatatctactcatttagcattttcaaccaacaaaataggaaataaaagatttctgggtttttctataaaaaacaaagttgatttcgaatacaatgaagatcatagtgtgttataacaaaaaacttcttaaaaccttcattagttacacgataatgcttgtcttggctccaaacttcgtaaataaacaagatcaacccttcttcagcatcacattccttcgtaaaataaattttgtttctgggttcatctttaattcaacaattattatctcaaatattaatccaaagtaataatgattttgcattaattgtgacaagagtcacgtctaaactttttgggcattaaatattgatggcaaattgtttttcaatgttagtaagccccccttttaactgtacaaccgcacaaatcaatgtttctccaaaatatctttaaccaaaccggaatagtgtacctaactaaatcgtctaacttaaccgtacattcaaacaatatctagttacgctggtaagggtaaaatggtcaaatttcagctgaaaagataaaacatgaaaactacctttgactttgccaatctctgaaaataaaacatagtcaaagggtgtgacctgcaaattaccttacaaattctccttctcctttttttttttttaatatctgaaaattcaagtccaaagactctattttttcccgaggcgggatctacagtaggttaaactcatctcttttagataagagatctctttcaacatgcctcgaaccctacacctccacttgagagatttaccattggactaaccgcacgttagaaaaaattcaaattctcgtttaacaatgcgttgaagacaaaaagtctatacgggataaaaaactatttaaaatgaaaaaataaatcattaaaaaaaaggatatcttagatcaacatcacaatttttttatttagatttgattatcaattttcttttttaaaatcacctcatcagaatttatcaagaaacaattttagctaggtcacctctaataagtgaaatcattaaacaacgatataaacaattatgaaagtgttactccaaaattttattgtaacaagtactagctattacaattaaattttaagaatatgctaccacacctagtcaagtcaactagtacccatttctcacgtcacatattaacatgcaatgacgggttataaattaatctatcctataatgagaggaaaaaaaaaccattttaacaaccttatcaatttgtgtaaatgggaaagagttgtgttgtgactagttccttctcgcttctccttctcttccttcaaaccctaaaatatgttcatgccggtttcatttgctacggcgactttttcaatgttaactacggcgtcagtcgaacgtatctcttctcttctcttccttctaacgtcgtttctaacggcggtttctacaacgcatcgtttggcagagattccaaaaacaacagagtccacgttgttgccttatgcagacgaggctacgagaagcaagcttgtaagacatgtctcgaacatgtgattgaagacacaaaatccaagtgtcctcgccaaaaagagtctttctcgtgggtcactgatgaattcgacgacgtttcttgctctctacgttacaccaaccactcaactcttggcaaactcgagctcttaccaaatactattaaccctaaccctaacagtatagattccaaattcaacaacatggccatgttcagccaagaatggattgcaatggttaaccggacactcgaggctgcttccaccgctgagaattcctcagtccttaagtactacagcgcaacaagaacagagttcacacaaatttcagatgtttacgcgttgatgcagtgcgtgcctgatctatcgccaggcaactgcaagagatgtcttagagagtgtgtgaatgactttcagaagcagttttggggaagacaaggaggtggggttagtcggcctagctgttatttccggtgggatctttatccgtactacagagcttttgacaatgttgtaagagttcctgctcctcctcctcaagcttcttctactattatcgattacgggagagacgagaaaagttttcaaggaagcaacatagcaattattgtggtcccttcagtcatcaatctcatcatatttgtggttctaatattctcttggaagagaaagcagtcacacaccataatcaatggtaaagtcttttaaaataagcaacatatatattccttatcttactaagagtttggttttaaacttgacatgttttatttgatgacgtgcagatgtttttgattcaaataatggtcaatctatgttacgttttgatcttcgaatgattgtaactgcaaccaataacttctctcttgaaaataagcttggccaaggtggatttggatctgtctacaaggtaaagaaactagtaagaagagtcctaacaaaatcttaagatgggtcagtgatctttaattatagcatgagaattcgttttcagggaatattaccaagcgggcaagagatagcggtaaagagattaagaaaaggttcaggacaaggaggtatggagttcaagaacgaggtcttactcttgacaagactccaacataggaatctggttaagcttcttgggttttgtaatgaaaaagatgaagagattcttgtctacgagtttgtccccaattcaagccttgaccacttcatattcggtgagccttcgcgagacgagactttgcatctttgcatgttacactacttttagaaaacaagaaaaaaaaactgtttctttgagatgtgcagatgaagaaaaacgccgagttctgacatgggatgtgaggtatacaatcatagaaggagttgcaagagggcttctttatctccatgaagattctcagttgaggattatacacagagatttgaaggcaagcaatatccttttagacgcggagatgaaccctaaggttgcagattttgggatggcaaggctgttcgatatggacgagactcgaggacagacaagcagagtagttggaacatagtaagtaagctctgtttttatttttaaagattctttgatcagcatcactattaatatgatttggttaatgcagtggatatatggctccagaatacgcgacatacggacaattctcgacaaaatctgatgtttatagctttggtgtcatgcttctagagatgataagtggtaaaagcaacaaaaagttggaaaaagaagaagaggaagaagaagaagagcttccagcttttgtaagcttatcacttatgtcgatcatctttactcttcttcttcatcttcttatcgaaattttaaaaattatttgcaggtgtggaagaggtggattgaaggaagatttgcagagatcattgatcctttggctgctccgagtaacaatatctcaataaacgaagtaatgaagctcattcacataggtttgttgtgtgttcaagaggatatttccaaaagacctagcattaattcaatcctcttttggcttgagagacacgctactatcacaatgcctgtgcccacgcctgttgcttatcttacgcgaccatcgttatcacttggtcattaatgaaccgtcaatcatgtatgttttatacctatttgtctctctctgtacaatgaatgacaaatgttgagaaaagagatgccgtgtaatgtaagcaaacttatgtttgatttgtgctaaacttatttatattaaatgaatatttgatatagccagcgttttggataatgttggaaattggactgaaacggaggaacgcatagatgaaattaaagtccaatttctatgaaagttcacacgagcagaaacaaaaactttgatctaatgtaagaggaaatgcgtgcggtaggggttgcgtagtcataaagaaaggacattgaacaaaggcacatttttaaacttatatgtaagagcatcatgggctcttaaccatatttagaatttaaatattgcacaatcaaaatacccctcatgagtttttatttttgacaactccaatggtagaagttctaatgaggctcttaaaatttaaatttttgaaatttatatgtgtttgtgtaacaccccgatttcaggaatatggtggtgcatacggtgaaatttaaaataattgatttgaccatttatattaccaaaatgcatttatcttttcgatcaaagatgttgaaaatgctcaagtaaataacatttgacattatattttacttttttcatgtttacaataaagcttcgttttgtatgatctgaaatataaaattttctctatatttataaccaatttactatagactaaatatttttaaattacaaataccgaatgactaatccataaaactgtgatggacaccatatataaagctatattggacgattgtgggtgttgttcattaaattgatgatttccactatgtcaaacctttcctccaaatttaagaatgacaaactatccaaaattattttcaaagatttttgaaagactcactacgagtttctcagaaattaacaattgttacaattttcacttcttttttcttcctgaattgtcacattctttatacagtatatgagtatgactcgtagaccaagcaaaggaagacttttttggtcatgcatgcgaccaaaaacaagtacttacataaccatattgaaaggacaatattttcaatacttctagagaagaaaaaaacccttagttcatacgaagtgattaagaaatgtttaccctttctctacggctatttgaatttgaatggccatctttgaagtcaaccattactcaaattttttcatgtgtactcaaccaaaacccattctctctcatgtcacctaattatacacatatataaacatttattacctcattaacaaaaaaaaaaacaatgaacaaaaccctaaactccattgcttaacaatgataatgaagaactctgctgcgatcttccttacttcttcccttattcttctccttcaaaccctccacggagttaaagccggtttcatctgcgtcggaagctccttccccaccaacagtagctaccaaaaaaaccgtgactctctcttctctactctttctgataaagtcaccacaaacggtggattctacaatgcttcactcgatggagttcacgttgttggcctctgtagaagagactacgatcggcaaggttgtatcaactgcgtagaagaatccattcgacagattaaaacaagttgttctaatcgtgttcagtcgttccattgcaatagtgacgatagagaacgtgtttcttgtcttgtacgtaccacggatcaatcaacttatcggatactcgagcttggaccagctacgaatgacccgagtcctgttgctatcgacacattcgcaaagaacatgacccttttccgccaagaatgggaagcaatggttgaccggacgctcgaggctgtaaccattgacaattccacaacggttctcaagtattacggtgctctcaaatcagagttcagtgagtttccaaatgtatatatgatgatgcaatgcacacccgacataaattcaggcgcgtgcaagagatgtttgcaagcgtccgttacatattttagagaccagaattggggcagacaaggaggcgggatttgtcgaccgagctgtgttttcaggtgggagttttatcccttttacggcgcttttgctaatgtaacaagagttccagcgcctcctcgagctttgattcctcgaacagaagcaatctccatcactcgcttgaaaggtgtgaaaacaaatgagttgtttaacattttcacctgtgaaattatctgagattctcatacaaatattaaaaaagagaagccataatcttgcaggaggaattatcgcaatatttgtggttcctatcgtcattaatcttctcgtctttatcggtctgatcagagcatatactcgaataagaaaatcgtacaacggaatcaatggtatgttgtcagggtttgcaataaatatttgtgatgcatcattgctcatagtttttttttttttttggtatgtgcagaggcgcaatatgattatggtggtcagtctaagctacggttcgattttcgcatgatcctaacggcaaccgatgatttttcctttgaaaataagattggccaaggtggatttggatctgtctacaaggtaaataaacttgagaaaaattactatcaaattctttagatgtgtaagcaatcttatagcacgataatcgggtttgcaggggaaattaccgggaggggaagagatagcggtaaaaagattaacaagaggctcaggacaaggagagatagagtttagaaacgaggtcttactcttgacaagactccaacataggaatctagttaagcttcttggattttgtaatgaaggcgatgaagagattcttgtttacgagtttgtccccaattcaagcctcgaccacttcatatttggtgagccttttttcactttgatgtttgtgtaaaaatttttgaatgttctagtcgctggttcgagtgacacttgggagatgaccatataaaaatattcagtggtttagtatattgatgcttctttggtaatatgcagatgaagagaagcgtttgcttctaacgtgggacatgagagccagaattatagaaggcgttgcgcgaggtcttgtttatttacacgaagattctcagctgaggataattcaccgagacttgaaagcaagcaatatccttttagatgcatatatgaaccctaaagttgcagactttgggatggcgaggttgttcaacatggaccagactcgagcagtgacaagaaaagtagttggaaccttgtaagtatcctctgtttttactgattcttttagacaaaacaagatactctgtttttttttaccctaaattttcgagattcttggaatcagaaactaatttgaatttgttttagtggctatatggctcccgagtacgttaggaacagaacattttcagtcaagacagacgtttacagcttcggagtcgtgcttctcgagatgataaccggtcgaagtaacaagaactatttcgaagccctcgggctccctgcatatgtaagcaaaatccagtcttgtttactactttagacacaaatgaatctcaaaagataatttgagtataaacttatggtgataatatataggcatggaagtgttgggttgcgggcgaggcagcgagtatcatcgatcatgtcctcagtaggagccgaagcaacgaaatcatgagattcatccacattggtttgttgtgtgttcaagagaatgtttcaaaaagaccaaccatgagtttggttattcaatggcttggaagtgagactatcgccattcctttacctacagttgctggttttacgaatgcatcgtatcaagctgaacatgaagctggtacattatcactaaatgagctttcaatcaccgagttaagtcctcgttgaaaccaagatctctctgtcaactcttatatccaagttttattcacctaaatttcacgatataaacatatgcacaataaattaagttgttattcacctaaatttcaatttctgaccaaggagatggaagatatgagaagcatatgacagtttggtttgcaacaagataaggagggtagttactactaaatatttttcagtgtatgtatttttaaaaacgttaaactttccgatgcacttgatgtaaacacgttttttcgaataaattttacattctattcaaaaaaaaaatttcaatttctgatcatgggctgaccattggacaagttttcagaccatgtccattaaggaccaacaattaaaacccatgaaaaataatggtccaagtggacatgaccgttgggttttagacagtccaattgacacttctacatatatgtatgtatctaaatggggttccaactcgaaactcattatcaataagtggattggtttatgtctcttatatactgttcaagtctcttcttttcttcccagcattccaatgtgagatatttctccacatctactaaaatggatacataacataacaataattcaaaatattccttctatacttgagagtaaagaatcttggtcttccatgatacttccacgcttcttctttattttgttagggttttaaatttatatgctaaaacaagtgttcaaaaaaatgctaggcgctaatcgggcagtgatccaatgcctagcgtctagaacgcttaattgaagcctatatgattttaggcggttaaagcgtttatagcctaaaacattatatatatatatattattatagataaaaataatttaaaatatgcattaataaaataaaaatattaaatttataaacaaaaattagataaaacgtacatttaagagaatcttgcaaaacctgccatattcccctcaaaatcttacaatccctatcatattcacagtcagcttacagaatctaccacatttagctacacgtggaaattcgtggacgaaattacccttaaggtgggtcagtgctctgacttagatggcgacagcttcgtccagcgaaaagaggcagcccctgttccgtaataaatgtttccgtttccgattggatgttatgtggatttattttttaaaaatggtaatataggggttagtcactttaattgtttattaatgttgcagaggaaagatgttgtgttgaacagaacaaagtggtaaactggggaatttgggaggtgttgttgaagacacaaccatttattgcggacgaggtaaaatttattatctggaatttctgtccttcgattcgctttagtttggtagttctatttgtttgtttggttgtgataaatgcaactacctcatattccaaaatggtatatttgttctgtttgaagaacagaaaaggatggacgaaggagttatggtattggtcggtggctgggaatgcaaagacaatggggagtggcgtttcaagatgtcggataataagtacgggaagtgggttgacgtaagcgaatgagatatgttgactgaaattgtatcaaaagttgcaacaacgtttggactagacaggaagaccaaatttcagctgagtttttggttcgaaggaggagacactgtctacacgcatcagaaaatgtcgcctgtctctgttgacaacgaaagctcgttgaagaaattcaaagagaaaaggcaagaaaaaggaggtttgaacatgtatctatctatagacgatgtcgacgtggctgagatttcgtcccctgaaataaggggacacaaagacaataatgttgtagaggtagaagtggcgggatacatgggcgggcgaatggatgatggtaatagcacgcatgcaattccattgacttatgaggaagacggcttcctagaagaaataattgtgtgtgaagaaacttaaagaggaaggctagtttactagagttggcctgcgcaaagcggggacgagaaaaggaagtggatgtagagttggcaactgagacaagaggatgggcatcagactcagaagacgaatcgttaagggaggtatcagattcagaggattatgattttgataatatgagggatatgattgatacagattacctgccggattgggatccttggaaggattggaggaacagcacattgacaagttttgacggttagccggggacacaaatgtgtggaacaactttgggggataagtcatctaggcccaataatatgggggacgatatactgctttgtggcgggggacaaagccgggttgaccttgtcgaagtggaagttattgagatgaacggaatgggcgatgagagtgcaaaatgtcgattcagctggggcaaagtagaatgagagctgaattaccggatacgcaagcgacaacattggaagaatcgttagacaaggactgtccaagatgtttggacaacgtgcatggacaaagcctgcaaggggtaggtatagtggacgttgaggttacaacaatcccagacgctgatgcacaaggtgatagtgagaatggaattgaggataatgatgaagaaaatacgagaatgtctatataattggggcagagggcagtcccaaatatgaggacagattcaatgacagagacgttggatacgtgtttggtccctgaatctggagaatatgtaggaccagtggacgttgtagtgacatcgttggaagcaagtgcatctgaagaggaaggacaaagtgatgtagaggttggtaatacaacagtgggggaaatgataatacagcaagggcactggcagaggacatgtcgagaagattaacagacggagagactatatttactgaattagcaggggacgagatgttgatgtgtagagatgccgttccgttcaaggacaacgcagccggggttgcttccgacaaagctaatatgaatcttaggaagggtggcgatgcaatatatatcgggtgggtattcaacaacaaagtcgagttgcataaaacattaactatgtactctatgaaaaggctattcaatttccgtataaaagcgtccgacaagacacgagtcattgcggtgtgcgatgataaaaagtgtgattggagggtatatgcaacgtttcacgagaattctgaaaaggtggaaattcgtacggcgactctaaagcatacttgtgatgtcgaggcgcggtctaagtatgggatgaaagcaacacgatcgatgttaggtgagttgcttaagacaaaatatacgcatggtaagaagggaccaagggcctgtgaactaccagaaatagtattggctgaactaccatacatgaaggcttggtacgcaaaagaaatagcaatgaaaaaagctcgtggtagtgaggaagaaggttataagtttttcgcagacatgtctccacctgttgaggacaactaatctaggtacgttgtccacagtccatacggattatacggaggaagggaatattcgtttcaaatatcttttttttttgcgtttgggcttcgattgttgggtaccagtatttgcggaaagttattgtgatagatggtgcacagaccaaagggaaatacaaaagctgcttagttgctgcaagtggacaagatgaaaattaccaaatattcccattagcgtttggtattatagacaatgaaaacatagcaggttggcagtggtttttcgaatagttgtcacagtttatccctgatgaggaagatctagttttcgtctctgacaggcatgcggccatttatgttgggcttaggacagttcactctcttgcgaagcatgcgtgttgcacagtacatttgttcaggaacgttgtccataatttccagtgtgagggacttgtaaaaatggtctccatggcagcgagatcttacactgtgggagatttacgatattggtttgaagaaatacagaagagaaacattcaatgtgccaagtatttagtagagataaagctatctcacaggacactggcgtacttcccgggtatgcgatacattgtgatgagaagcaatatctcggagtccctaaatgctgcaattcaaaaagccatagatttcccggtagtgaccatggtggaatttataaggacaatgttgatgcgttggttttgcgagagacgacaaactgcagctaaaacaaagacaagatgtacgccaaaaatcgaggatttgctaatagatcatcttaaattagccacagattgtgcggtcatagcagcagacgaatggatctatcaagtaaacgacagttttggcatgatttttactgttgaccttgagaaaaagacatgtacttgcagagtatttgatgtgctaatggtcccgtgttgtcacgctttagcagcggtgggtgtaaggaacgtggacatatactccttgatcggagactatgccttcgtgacagagtggcgtaaactatagcgtgaacatattctacccccgccaaaggaaaaggacacagaggtcccgaacgatattagtctagtggttgtatatccaccaaatacaagaagaccagttgggagaccaaggaccgttcagataccatcgaggggggagccggtaaataactaaactcttagcatagttttaagtcctccgaatctatcataaccaaacgtgtcatctacttgtagggcaaaggatggaaaaagaagaagacaagacaatgcagcacatgtgggaaggatggccacaacagaggctgggggaaaaagtgcatcgagcgcgtgttaacgtttttttgtagtttttgatgtttcgaaaagacgttttttggtccatataagtttttggttttggtctccagattttaatacagatcgggggtgtctttcgggaaggggatgtaattcagtcgaacgattgctttttgtaatgttaacttatgatgttgactaccaactagtttattgtaattgctacatatagaacaataattattatattagacagtggaagagtaaaaacgcagaaagatgcattaaaagtgctggaagcaaagtaaacgtgaagactgaaagcgctggaagataatcacagtacccaccaatcaatacaaagaggacaggggttgcaataattgcatttcttatattctgagtatcgacgagggggatcaatcatgtaacacggccagcttatccagttcaagccaagttagtgtggcgcaattatattgatattggacataacactcatagccacacaatcggcgttgcggcaagagacaacattgagtttaaatagattcatggcggtaatggcatcatttggtctattaaccgcaatatggtagagacccttcgtaaaaagtattttgggggacggatcgggtatataggcgatcatgtccattgcttctttgattaacctttcaaatgaagccagcctaatgctctctaagtagcaagcaaccggattaccagcctttacacatcgtaacagaacaagtaaatgggtgaaccactggagactaattgagaatgcgcttcaatgagggccagggatgtctcccgcgaaacggatggatcaagtgctagacgcaagccagcgttgccagagacaatgaggggacctaagtgttggtaagataactttccaacaagaaggacaattgaaaccctaagatgttgaggaagcgattgccagtttaccaaattgtgatgtttgaagtatggtttagtttggatttcacacagaaagaagaactatatatatagttgggattaaaggagaaaataaaatggatgcaattagtaggtatggacaatgaatattagatgtgacaaaaagctataaaagctacaccattaggacaaagcaaactctgcaaagtacaaaatttaattaaacggtttatagaatttagaatattagttgaggaccataaatatgaaaactaaatgaatgatgaagtgacaagacaattagccattattaggcaaatggggacatggaaaagtaaatatatagactaaatattgaaaaatcataaaacgaaatatataaaaaacttatcaaatccgaaaaaaatggacacatactcatatggtccacatcttacagtacggttacataattagtggacaaaataatcaaagataaaacaatagttctgtggaaagaaaaagatttaatagagctctagcaatgaaattatcgctacatataagtgccaaggacgaaagcgacaatggggacaaggatcacgaggacgagaattatatgcgggggacaagaatggacttggtcgatgatggtacgaggggagcgttcgagaagaccaacttgatgctgaagagatttgatttcttgctggtagaggtctaggcgatcccacatgtacggaggatcaatgcgttcaccattagacccggtaactacgaacttaatgtgttcatcctgttccctgacagagcacttgagcgctgcaatcttgtccaccaatgactcgtccaaccatttgacaagatgacgcccaggtcgggccttgaaaaagatagcaaaagcaggttttatacgtgtggagatagaaatgaaaaatgggggttaatgggcatacctctctcttctcgcactggtagaactgtctgttgtcctcagaggacgaactcgcaagaaccacaatcccaccacaataacagcgacgtggaataccaagaatgggcgtcgacggttgggaagggtaaactagtccatatgacgtcggagattctgaatgctgagaagattccgatggttgtgtataactatgaaggcccatgttacagtggctgtggataattttgaacaagttaaaaggaaagtgaataattaatggggttggaaaattgagaaagtggacaagttatccttcaaaaggtttgaaagatttgaaggataattaatttagagagataaaaggggggggggagaatttagagagataaaaggccggggggggggggggaagaagaacttcagtaacctaggcacctaataatataataatgttaaaaatattaagttgatgtgatgtgacataaaggtaaaatcatagaaaagcgtaagggataaagattagtagaaaaaattgtggagacagttgactgagactgttcttagtgggaagataccccacaatagtccacgaatgtgaagtgtattgcatttgcatacttacaaagccacaacataattgttgtcccctctaaatatataatgtccctccccatccgttgataagtgattttacctccacataaaatattttacataaagataagagttatatatggaataaaaggtagtaaaaagttaagtctccaaaaaacatacaagttcggaataaaagtagagtcactaaatattaaaacagacataaattctaacatggacatcaaacacgaagagcttcaataaactcctcatagatgtctacagcaaatctcatcctgagatcttcaacggactcctcagttatggagtcatggctaatggcctgaaaatgaagctcaataaacttcacaacaagcgggccactgtcatctgcatgctcagtttggaagacctcagggagacgatcataagcaaactcaaggggcacttcatttgtcctcaggtcttgggggacaagcgactttataataagcggaatcaggacaataaaaggtttcatcaaaaccgtccatctgtttggcagtcttcgagtcagcgatagggtctagcacacctatggtaccctctttctgatttatgacaatggaaacgcagtgaccggcagtgagatgtaaaggagtgtacaagatgtcgacatcagcgaaccaagcctatcggatgctacggccagggacgatacctttcacatagtcccagatcttactgttccacgaccagtcagatttacttttggccttcttataacgtggatagagctcaacaaagttaagtgcgaacgaagaatctagtataacagccatactctgtaccaactcatcgccatacctccgcgccaacaggcttagcatagcctcgatgtattggattacataaagacaaccagttagatctgagtaaattttaacatattcccaggtttagcattgatttggtacatacctcctggtggacagcagcctgaggagtgtgcatgtccttgaaaaatgttttagggacaacatgtccctcgataacgtacttcctgaccattcattcataataatgattaatagatacgtagaagaatattagttaccaaaacaataattcagcggaaaacttaattacctttggcgataagctttgatagtggacaaaaagcttttccgaacctcatcgtttactttggcaattgggtgcaaatcatcatggggccctttgactactgagacagtaactgtctcacaaaaacgctggggttttttcttgcccttctgggaggaagcatagacttagaagtatccccttctccaacctctctttttcttttaatcctagagggaaaagtctctgaaattgggacaccagcatgtgcattaccctataagacaaagatttatgtcagatccataaaagacaacaaaagattgaaaaaacatagatttatacctcttgatcggatagttgttcagtatcaacttttgaggattgaagaagctcttctggatgtatagcaacagtaataacaaaaggtttgctaatcgcaataaaagatataataaggattaaatgaggaatacttcgttcatggtctgatcatcttgttgatcaccggagtcagaccttccttcactctcatcatcaccctcgtccccttgttttggatctccatccccttgatgagtatcatcaccctcgtcccctcgttggggatctttgtcccctggattagtatcatcaccctcgtccttttatttgggatcttcgtccccttgaagagaatcatcaccctcgtcctcttggtttgctccgtcatcaaaatcgtctccggattcagagtcactaactaagacagcctcatcttgaggcgttaggaaatcgttgggctacaagtaaaaagaaagaattaaaggtaaataagattctcaagaccaaaataattatttataaaaaaaaacacaactatctagaaacttacgttgtgatcttcagtaatattcacattatcagacttcccatccatttcctatttaaaaatgttatgcaaacatttacaatgttatatgataccaaaaaagaaataaagggacaatactcacctcgtctccaatagcagcgtctccaagagcagcgtcctggtcttccgcttctgtgtcctctggtatggtctgcagcggcgtttgaaagtcttttggctaaataagaagtaagcacaattggttaaagtaaaaggaaattctaacgataagtaatagatgccaaaccattaaacttacattgtgatcactcgaggatttcgaggacgatggaccaccagaaggatccgaacaagtagaaccaaactttccagcctgcggaggaccagaggaagatgcatgagattggttgatgttcttaataacttcagacaatcccccataattagaccaggcttgctgctgcaatgcattcaagagttgagcatgagtctgtccacttggggcagggttcttgcttgacgaatcagcgattcgcgagggcatattactttgtctctcagggacaatcttggggtcgaggttcttcgcggggtcactaatttgtccctcatctgctatgtccttttgggacgcagccttagggggtggagtgacaattccatcaccactagtggactttggagactttccaccagatttgggacttggaaacttgtcaccatggcgcaaattgcttattatctcgtctaatagttcgtcctttaacaaagaattctctaagataaacataccagtaaggtccccaaataattcaaccttcagttcatccttcaattcacgaaatttagaattaacctgttccatgatcagaccatggagaatatcatgtccatcagtcctcggtggtggagtactgaactcttcatgcaccttccctttacctttagcagagggcccttttggggaccagatggaccagcctggaaagaatcagggatatccgatggtctgtgtggaggcaccttctttgcctttcgagcattgtcttctttaggatggttctcatcaacgacgatctttggccaggttcgacaaccacctctccagtcagattgttggaacttgtatcggctaccaatgaccctttccatatagtcaagcgtcgggtcttcaacttcatcgatccagtagtcgttgatatttgggtatggtggatcatcaatgggcaacaacggagaaatactcaactacattgaagccgaaacaatttatcaactaaacaaatcatcaaaggcaaactagtgagagactaataagaatctaataaaattaggtccacagattaccctaggaattagctctgtctccattatgttggagttgtggtaagtcttcaacggaggcaaactggtgagagacgtctcactgatagtctgcgtatcatcggggtttggaaggtatctttccaattcagggataacgttaaagacaaaaagttggaagacaagagggaatccatgtgttgaattgttagactgattgaacttcgtgattagtcctgggagattgctgaccttggatctaactttgtgagaaggaaggactctcgtccccagggatacgcctcaaaagcctccaagtccttcaccatttcaacgacttatttagaaacttttacaggttgggaactacagatcaagatcccctcaacaataactataacagcgagacaaagccttctccaaggttccatcctctcttctttaggcttcagcttatctgtcttcaaccatttgaatatatccttgatgaggacgactttgtgttccttacctattaggacattccagtaaggatgtctcagatttatgggttgctgcgacttcaatatgtctctccgagaggggtaaggaccacaattcaaaccactaagaatggcaaactcccttaacaaaaaccggaagggctgaccggcaaaaacaaaccaaatctcgtgttttttccttgtgtagaggcctctacacaacatctggtggaccagtttcccggagaaagaacatttacggacttcaaattgaaaaaagggactaaaacaaggggcgcaaatgtagtttaactccttcgtcccatctagaatatcgacgagataaagaaggtacttaggcttagagtatgtatttatacgcccattcagcggatagcagtcagttgcgtaaagtctcttgggaagtctttcccgattgaattcagggatgcgaggaattattggcggatcagagctctgctcagcggttgatttggcagagagaaatggatcgtcgtcgtcttcaaaggacaccgaccgcctggcaccgccaagcgctgacttctgtttcgctttgctggtggaagacctcatctgcgttggggtaaaatcaaacaattatcaaatcagttattcgatgtgataaaataattaaacacacaggaggacgaaaaaccctaaaagctgtaatgggggacatttcgattaatcggaacaaactcaatcaaccggcttaattgctaaaggttttcgaactttctgggtaaatgaatcgcacaggagaggacgaactatctaaaatcataatgggagacaaactcgatttttcataacagaccagtaacaagggatttgctaaagattttccaaaaatacttcactgaataaaatatgaagacatgattgaagatagcaacatgcagaaacttgaaatgaccttaccggagacataatccgatgaaagttatcggtgaaggaaagggaaagtatgagagagatagacgaaagagagagagttaactgttgttgtttttccgcacggtttacaatgaaaaagagataaaaggtattgtaaaaagacgcagttgttgagcgcgaaaactgctcagtaaaccgtgggaacaaaatggacatttcacaaccaaatgtggtatgagttgtaatgcccgaagaaatatggcagattacataacgattgggaaaaatatggcagattttataattttcctacatttaattcatatcaaacaacatttgaacatttaaaaccatatacatttgaacatttaaaaccattcaacgagaaatcataataaagccatcatctgaacagtgccaccgaattagtgtttctactttatccccatcaactcaatccaatcattcactatgacaaattttggattccgattcttaaaagaagaaaaaaaatctaggttaagtttcgacgtgccgcgcgttaatgaacagacaagaaacaatttaacatgtcaatcttcactaaaatttactttcggattcgagacaaacctgagagaagcgaaacagatcaaagcttgctcgggaggaatggacgagaggttgaagaagcggtagcggcagcgcaaataaacgaagaattacaacaatcaacgtagaacaaacaaggactttcagaaaaggctcataaataaactttttaatggaccatattgtgtggtaagaagataaatatatcttatcaaataaaatataaatttactaaaacattataacacaactatacttatttattttatagaaaagaaattaaaagtaaagaaaataattataaaaaaaatgtatatatcttattaaataaaaataggaataaaggtagagaaatttggatctataaccaaaaaaatttaataattaagaaactaacctaaaaaaaaaagctgttgtgatattttttgtattttgtatattaagaccactttacccttctcacctctcacctctcacctctcacctcttatctctggcatctcatctctttttttctatatcgccttcattaaaacagaacaaaactatagttttctattttactttcaattttgttacattctatttgctagaactaaggaaaacaaatacgaagactcaccagatctaattgaatattttctggtttgatcaatatctccttaacacaaatttaaacccaaaatcgaatcgatttcaattcgatttaagaaaggagaaaagagattaagagtatataaacatgattttttcagacttctaaaaactgaaacttgagatgatttcatttagtttaattatttttgtttgggttcatataaagtatcatccttagggtttaatttttttaaatcaatagatgtttgtaattagaatggattgagataaaaaaaagttaatttttctggaaattttttattgaattggggagaagagaagaagcaacgaagaagatgatgaaggaaaaaggtctgttaaataagaataaagtggatatttcccagttctcatatgttagtttcttaatttctagaattatagtgctattttcttaatttagtgttgaaaactagttagttttccaattcacccataaaagtattttcagaaaaaaaatatagaaaaaaagaaaaaaagtattagtgtacttggaacctaatattattcattatcaatcatggaatttttactttacaccgaagtcgaaactctactctggacgataaagtgtatgattggtgccgacaaccaagatgtagccttttttatatactgttcagacctggtgaagatagttttttcctcaaccgaatagtcggcgttttcagcatatttggaggattttcagagcgacaaggaagaattcacaagcttctctttatctttaattttttgtaatgcaaatgttaaaacggacaatttggcacgaaaatttgtactaaatcgttttatgtcacttatgtaaacaatattccgcaagattgattcttttgagctcaaaacaaaaccgatgacaaaaaaaaaaaaaatcatggaatttctaagaaccgtagacacttacttggtcaccgttgccaactacgacgaaatatttataacatttctaatatgctacttgacaaaacaaaaaaggctacttgaaaatcgctaatttttgtttttcttcctcactagtcaatatcacttatgaaaagttatttgtaaatttgcaattactttccaaagtaaggttttgtgagtaaaatgtatgttttgataggaataaacattctcaatttactaagcagttatgtatactatagttgttttaaacgcacaaatgaaaacttgtcaaatgggattgataacaaacatatcatactactttctttctatcttttgtcaatatcgtattactttatgttaaatatatagtaaaacttctcgataaattaataactatataaattaataaattcttccgttccgagttgagatcaatgtaaaaattgatacaaatcaatatattaataagataataatttttttgaaaatcttatataaatatatggtctcatttaccttttagattaaatttttgtaaaaagttacaaaatttgtaaaatctctctataatttaaatttattaattaatcgataaattaatacctttttaaattaataaattttctcggtttcagtattattaatttatagaggttttaccgtatttcaattatatcctaactatacaacgaaaacacataaaataataaaatttgaacatgaacatctctgtatacatatatggacatgagaacctacgcgtatgtccgagtactttcctagtagtaacaaaatctgaccaatacaccattttgtcaagtcaagtagtgtgtactcgttgtctcaagtcaccttataatatacaaaagctctatagtaattgattatcctcgtaacaataacgtatgatcaaaaagatatggggaaatactctgttttgatgatctttatcgcttcttctcttcttattgtccttcaaaacgtggaaatcgttaacgccgtcggatgtaccggaagcttcttcaacggtaatagcagctacgctcagaatcgccgcgatctcttctctactcttcctaataaagtcgtcaccaacggtggattctacaactcttcactcggcaaaagtcccaacatagttcatgctgttgctctctgcggaagaggatacgagcaacaagcttgtatcaggtgtgtcgacagtgcgatacagggtatactaacgacaacgagttgtctaaaccgcgtggattcattcacgtgggacaaagacgaggaagacaatgtttcttgtcttgtaagtacctcaaaccactcaacttttgggaacctcgagcttagaccttctgttagataccaaagtccgaatagtatcgagccatcgaaaaacatgactcttttcgaacaagaatggaatgcaatggctaatcggaccgtcgagtctgccacagaagctgaaacttcctcggtacttaagtactatagtgccgaaaaagccgagttcacagagtttccaaatgtttacatgctgatgcaatgcacacccgacataacttcccaagattgcaaaacatgtctgggagaatgcgtgacgcttttcaaagaacaggtttggggaagacaaggaggcgaggtttatcgtccgagctgttttttcaggtgggatctatatgctttccatggtgcttttgataatgtaacaagagttcctgcgcctcctcgacctcaagctcagggaaacgagagctctataacaaaaaagaaaggtaaaacattgatttgagtcttatttaagtttgttagtatgataaagatgttcttaggctaaaaggggtttgatgatttttaggaagaagcattggatatggtggaattattgcaatagttgtggttcttactttcattaatattttggtgtttattggctatatcaaagtctatggacgtaggaaagaatcatacaacaaaatcaatggtaagtgtacattatttcttgcttcaatcaaccacatgatgtagagagtaagtcttatatcttcttgttttttcttttagttggaagtgcagagtactctgattctgatggtcaattcatgttacggtttgatcttggtatggtcttagcggctaccgatgaattctcatcggaaaatacgcttggccaaggtggatttggtacggtctataaggtagtactaacatttgttttactaattatgagttcttgattgatcttgatctttggtgaataacaaatcttgtggaccggtttcaggggacattactaaacgggcaagaggtagcggtgaagaggttaacaaaaggttcaggacaaggagatatagagttcaagaatgaggtttcgctattgacaagactccagcataggaatctagttaagcttcttggattttgtaatgaaggagatgaacagattcttgtttacgagttcgttcccaattcaagtcttgatcactttatcttcggtgagacttcgaaagacagctgccaatttggatggttttagaacttttagcaaactaaatgtttctttgaactttgcagatgatgagaagcgttcacttcttacatgggagatgagatacagaattatagaaggcattgctcgaggtcttctttatcttcatgaagactcgcagctaaagattattcaccgagacttgaaggcaagcaacatacttttagacgcagagatgaaccctaaagttgcagatttcgggacagcgaggttgttcgactccgatgagactcgagctgaaacaaaaagaatagctggaacccggtaagaaatatatcaaggtatatttaaatgctctgttttgaaaacagagtccatgaattaatgttattggtttgcatatatgcagtggatatatggctcctgaatacttgaatcatggacaaatctcagctaaatctgacgtttatagcttcggtgttatgcttctagagatgattagtggtgaaagaaacaatagcttcgaaggagaaggacttgcagcttttgtaagcttcttcacatatatatatttttttgaataccaggaggttctgggccgaaaccacagcatgtaatattagtttcgtcccaagcgtcactcgaaccggcgacctctaagtttcttcacatatcagtttttgtttttctaatcttcaaaaacttttggtgtaggcatggaaaagatgggttgaaggaaagcctgagattataattgatccgttcttaatagagaaaccaagaaatgagatcataaagttgatccaaattggtttgttgtgtgttcaagagaatccaacaaagagaccaacaatgagctctgtaataatttggcttggtagtgagacaaatatcattcctttacctaaagctcctgctttcactggaagtcgatcccaatctgaaattggtgcaatgtcaatgagcgacgatgtcttcacggagttaagttgtcgttgagttaatcagaatgttggttccaaaagggagttatcgttagttcaattagctaattcaaatgtgctttttaaagtatatgttgtgtatgtcatctaatagtaatacttttaggtattttgagtgaatgtaaggagatgaaaaaattgtatgaattatttatacatttttgttttaaaactaccacaaattgatattatagaggtaataaaataaaataaacttaaaatgttgcacagataaatataattgaaaaataaatagctgaaaatatatttttaaaccccagctagatttaaaatttatattttagagttagtatatataaaattttgcaaattatatctatttataagatatttctatttctcgtttataattgttattaagtaatagatatcacaagtccacgggttaattgttaaaatattgaaaatttaattcatattgaaacgacatgttagtgacatttaaaattttataaatattgattcaaacttgtctgttctgtaatataacccgtacgatgattttttaaccaatctcatgatttgttttctaaaagtagtaatttataaaatttaatgattatttattatatttgaaagcttacaaattgtatcatttctaagacattgatattttatagtttacaatagttatgtagtaaccgtatatcacgagacatttttggttttatacaatcttatataagttaggttgtttagatatatctaatattggtagtgttcttatatatcttactctgaacataaatattaaaattaatttttgttgataaaaatatattataaggaattttcggagtattttgacatcacttcctataaaggtatatatcaagtaactaatatagttctccctaatacttttcttctacttatatacctaaatgacgaccaaatatttcaaagttgatttcaattttatctgaccaataagaaatcttttctgactcgttttcttaaaaatattttttaaaaagagtgtctttctctctcaggcacggacatcgaagcacctcttccgttcacgtattccgatatcggcgtagcttttgttcgccggtgtcgagaaatatctagtttcacccttcatcactttgtttttaattttcttgtcttcattttcacgattttttcccccaatttgtttatttttcttcaaatttctccaactttctcgaactcactagatccatacgttttctcaataaccagcgaccaaggacaaaagtattttctggcgaactccctcctcctcgctttgctcgcaacctccttgacggcggaccagaagaccaccgccgaagactattttggatctggacttttgttcactcttggaaactcttcaacatggacttcgttgatggcaagagttctctctcttggaccatcagatgtgccattctcgatgtttttcgacgacgcatggtgattccttattcagagtgataaatccttctcaaaaacccatgttttatttgttcaccgcctccgccgcagataatgtcaatagctttctaccaacgaatcttattacattgaaggagcataattcatcgcaaatctatccttctgctttgatcaactgctgcactctctttccaccttggtcagcaatcacgaaattagggtttcacctaaagggatttgtccctagattcggcacattaacacgtgtgaagcccaagcccaacaacgttatattcaggtctgtttcaatttgtattttgacaatctttggtcgacattatgctcttgatggtcgacgactccatctcagaactaattcaccttcgttgatatagattaacaagtatcttttgagaactctggcttatgattcatctatggttgcgacctttgttcccaaatccaatttgttggatgaatgaatgttatcatggaaaatctatgcctaagtttccctctatgataataccatctaacaatttcaagtaccatccaacttccaccatgactaagtttcggatcatgttctttgaagaagattttgtttgtcacaagagagatctcgagtctctgagttgtgtcacaaagcaatctgtatccgactataaagccatagtctctcgaatcctagatgatgctctactccctatagagcttctcgtgccggcgagaatcacagctttgatttcttcatcaacatcactatgtcgatgcacactgaccaccatgttttccatcgatttgttcgtggaagatcgttcgactaaccgtgatctcacatgtgataaaacacaatctagtctttgtctcaaatctctcgtggaatcattgttgatttactttatctattttgttttgacattgaggaatgcctttctttttgttgtcttaaacgtttggagctttgccttttatcgccttgtagttggattatttgaatgagtgaataaatataagaggaatatttccttattaatcagataaagtatcaattcctaatttctgctactctacttgattcttattttactctacatagaaatataagaaagattttttttaagaaatacaatctaagcaattttccttactattttcactttaattctccaaagaaaaaaatatagaaatacatacctaatatagttcttccaaacatatttcttctaaatatacacctaaacaaaatctaatgcaaccaaatattttcaaagttgctttcaattttatatcatagatgatgtgatcatggaactcactattcgtatgtcgaattttgatctttctcgacttatcaaaaggcttttccgcatccttttgtggcgtcattcaatccatcatctcgtctttgagtcgtgtgtcgtatccatttcgagaatatccactccagatctttgaagtgccgaaattaggattgattcctcaccatgatcatatcaatagcaaacaaaattgttctacatctttttttttgggtcaaatgttctactacatttaagtaccttttttataacaacatttaaatagctcttttggtgacttatttgtgcttcaaagcaagcttgtttgttttatgtttgtaccattttgcgaccagtacataatatttagtagttttacgtttgtaccatttaacgacatgtacttacatcatataatagctatattggtttgtaccaaataaaatataaatattcttaggaaaagcaaaatcagcaatatattgagaacttgtaaaacataattaaataaatttctaaatatatttgtgtacccatataatggacgaaaaatcacattatagcatattataagaggactaccataatattttatttggtttttatttttctatctcattatgtatatgggataagcattaaataatatagagatcaagcattaaaaaaaaatagaaagcaaaattgtcttagtacttgcgcccaagagtgagttcaagggacaattcttcttcgccaattgcaccaccacaagcaacaacaacatcattatctctgtttttattaagtctcacctagaaaaagtatatatttatctagtttcatatgcctcaaatctacatgttgatgatcattcatgatactaatgtaagaaaaaaaagaagaagaagaaaaaatacacttgaagattgatagagagacttgttacttgatcccaaaactggagttatcttctcactaatatccaattgtaccctacaaaacaattgaaaaaaaaaattgttttatttaccaaatcaaaaatcgattatacaaaaacctaactcaatacatgaacataagaacctttgttgattttggataaattgggtagcatctcgagcactttcgtagatttgaatgtattgttgagattgcctcctgctcatttctcgcatcattctcctttctgccaaaggattgagcatgcataattataaatgaaaaggatataaagtcactatgcattatgttgaacatcaacatactaccatatacaacgttacactacaaacataattattaaatgttaatttaaatgtaagataattacttataccttttctagattcttctttcttcttgttcctatacatctaataaaagtaaaaaatatatatttatttcattacatactatcttaaatataaatatgatactctacattaatgcatatacatgttatgtatatagacgtatcttatatcgctaactgattatgtgtataaactataaagacctgaagatggcttttcacatgtgaaattgggaggtttttcacatccataaaatccaaaataaccttaggagttgcccctgcaaatttaaggagaatattgatattaattatagttaatctaaaagatgatatcaagaaaaatattatcatgtgtaatatataataataaaaaataagagagatgaggtatcttaaaggaaaaataggagattgtttattttaatggcgattggtttttctctcaatttatttagaagaattgtctttattttaattttgcgatatggaaaaaaattgcttacttctttcgccaccaagtaattcaacaacttgaataaaaaggagattaagatcatctgtccaacgccaatgcggcacttttgacctagtgtacgatctaacgatccgtcctctcattgttcttctgtctcttgtaaaactcttagtttgataaaactttagactacatactgataatttatataaaaatatatttatatattttccccaaaaataaccttaaaaaaaatatttagtgctagtacatgtttttgttgtcacgtgtaatttttgattttactattctctaaaaataaatataaaactgcattttaagaaataattatcttctgacaactccaaattttcttttctctaataataatatgcataataaattttaaaatctaaaatgaatacttaccagatttattttatttttattctaaaattaaatctatatatgctgaatatttgtaaaaataaagtaaaactcaaaaaaacaaacatattttctctaataatagccttgttattaattattattatttttaaccaaaggttataaataaatttataatcatccaaaaagaactttgaattatatttattttgaattaaaattagattttcttaaaaaaagctatgaatacaaatgagttgtaggtgatataaaatataaatgggagatgaaatcatttttcttatagaaatggagttacattgtagaatcgttgtttgtggaaaatgttcatcatatttgtatagagtactgcaagtagatgtgtccaaatagttaatcatattattggtaaaggtaaggctaaagattgtggaaccttgtttttcgtaaaatttatgaaggttgtttttgtggggaaaatatggtatgatgatgatgatgatgacggtggcgttaataatatgatgatatgatagtatgaagataattatgatgtgaaaaattataatcttatgaaagtttttgtctaactataaaccattacatattattgacaaggcaggcccaaagtgcatagctacctaaagcatgagttttttttttaaaacccataacacttaaatataaaaatattcaaaaaccacaaaatattggctcaaactcaagacttcatgttaaccttaaaacttaactttgtcactgtgctacatataattttcccgtatttgatgtcctataaatgatgatatattattagcacctaaagccctagctttacttgctttagatcaggggcgatcctgattactgatcaactcatctacttataatttctttgaccaatcaactcatttagaacaaaataataaaatcattaatgtgataagttaggttgatccatgaggtatgaatcccttattcaccatcaatgactgaaaatatagattaatattttagcggaaaaagtgtgatatcgtattgcggtggaaaacttgtgaaaaccatctatttttggcagaaaattgttcaattttactatctgagaaattgtgaaatagtgtctttagcaaaagaattacagaatctcattttttggttggaaaattatgatattgtgattatattgaagaaattgatgataaaggtgatgatgattatatggtgatcatgatgatattaataaagctaatgatgatgttaagtatgataatttatggtttaatatggtgaaccataaaccattacaacttactccaaacgatccactaactcactgacccatcaactcattatgatccaaatagtaaaattattagggttgatgaattagattagatcaaattgacacatatagtttgactcatatattaaaattttatttttaacaaaagaaagatgctgaggtttgagaaaaattcatttgaaaaaaatgtaagagcatcaaagaaaattagaagtggttcgtttgtgcatctagatgcatatacaagacattattcgttaaataacatttaattatatgagttggacttaataacttgatgcatttggaaaatgtaacttaagaacaaaaaatcttggatgagttttaaatttttaacttaaaggagagtttatatacaacacaatttccatctagaaatcacaacgataaccaagatagttttactttatatatattatcatattttaaaataatattctttcaccaaaacagtgaaacaacaaattatctatttcccatcaaaatcactaaactattaaactacatttgatggtataactatgtagtttgattgctcgagtaattcctcgatacaagcgcaaggtaaatatacatggttaatattctaaagagttttaggacttgttcttagctaaaacaaaaaaaaaagttgtttgttttgttttcagagttgtaaataaaaatgcaaataaattgacaattaaacttatgaattaaagacattgagctatagaatattttaataatcaatctagaagaatagatgtaacaggtaattcagaaattaagaactgttctcaaacatgaacacaaatttagattctctctctctctctctctctctctctctctctctctctctctctctctctctctctctctctctctctctctctctctctctctctctctctctattttgatagatgaaaaaatagtacaataccatattctcaccaaaaatagtagaatactgtttaccgttctacaaaatccgtgaaatcataattttgaaagacattttatgcatacattttcccgccaaaaccttatattcaaggtcttatgtattttgcaccaaaactttaaaactaggtgtagacatccgggtacgcggatcgggttcggctaaaacccaatcaagtaaggatcttttggttagagagggccaattttaaagaccaatacccaaattttatattaaatactcgtgttttaggtaagattttgggttttcggtaaatttggatattctaatcaaatatccgggtatatttgggttcgtgtcgggttcttgtttggttgtttgggtcgaggagtttaggacccaataggataaatctaaatttttggctttggtttcaggtccgatttttgggtcgaaaaaaagaaatagtcatcatttcctatctttcgttctataaaaaaatttggaccctaattataatagatttgcttataaaaaaaagataaattttgggtggaccctgtgcatcagctcttccagcacaggtatacccagttcctgttttttgctaaatccctatttgaaaccacgatttcatgagttcataaattttgccagaaaatgcaattactcggatttgctagttttagaacataacatgattttacagttttggcagaaacatgatttcacgttctttgaaaaatgacgttccacgactttgatagaattatgatgcatttattgcctataaaggggaatatgacttattgcagttccaatattttgtttgatgtgtttttctaccctaataacggtccaattttttgtttcgtttaaaatttatttttctaccctaaaaatatacttgaactcttcaaattttgccttaatcagaatcatcgataacatatgttagtcaattgtaatggatgatgactcaactcacatgtgtatgacgattaggctcgaccgaattgggtaggacttaaatgttggacctaagactcatcaacatttttgaaaaaagggaaattggcaaaactaaccaacaaaaacgttatatttgcaaaactaacacctgaaactatatgtggtgtaatttctgtaataattccaaacataaattctgtttctttcagagaatttacaatacccaaatataaagcatggtatacataaagcgagcaacccgggaaagtttcgaagagtgatatagaccgacacggttagagtggcgaggcaagggtatccgatttttcgatttgggggtttcgcataatggcgacagggccggtgccggtgaagtcgagtaagcaacttccggttgtgcaatttgggggagggggactatataagcgtcgaatttgagtcgcggctagggaaaagcgagtacagttggttctatttgtggcggctcctatacgaacagcgaatttcaggaaacattggtggattagaagtgctccatcgacaaacgtggttgctcttatcaaattttagcaagtcggaggtatgagttgaaatattttgtctttgtcacaaatcattggttttagttctatgcatgcatctcagaaactcggatttgatgaactgtagtattgaaatttagtgattcccgaattgatttgtgtgtttaattctgtgattttttggttttagcagacatcaatcatttgtggttaaggtcggattgtagtgttaagttaagcgtgtatgtaatccagtttatcttaatgaaactaaaggaaagatgcttacatattgcatgtgtagtttaaccacctatatggtgagctattgaacatgtattgccaatttagattacatgatttgtataaatctgttttgggcatctggtaagcagcaaataagtgataatgttacctttgaatttcatggtatctgtcaaatgggggatgataagttgccaaagcgtttgtttcggcttggggctgaacctgaaggtcgaaagaggataaacaaatattttacactttggtggattgagattataaaggctgcacttgatgaagagcatttgcaacagctggatggttctcaatttcggagtatcttgcaaatggggacgcatcagttttctataatgttcttgcattacattctatctagacagttagtgacagataagaagtacgagatgtggtggttgtttgctgggaaaccaatttgcttttgcattgatgattttgcgctagtaaccggtctaaactgcagcaaagctggtttcaaaaagaaggatgcaagaactagagggaatatgaaagcggttcagaatcctacaaggttctacaagtttctatttggtaaagagagaaatccaacttcaaaatagattgtaggaaagctttctatggagaagaaatacaaagacccgctaactcggtttcgcctagctttgctgctaatagttgatggcattctttgcccgacatatgcgcgaacaatcatcaatccttaacatgtagagacggttaaagatgttgctgtgtttcttaaatatccttggggcagaaccttgtttctaaatgaactaaggaacttgcccaagatacaacagccatacaagagttcccgcatgcattagttcttgtgactgttaccgcatgtccaactatcatatacatgtcggactcggttatcagcatactagacccaacaatttcagttgagaagcttgttcagtatgtattaggaaggagcttgaaaatcaatatgcatgacgcccgcactatagaccaaaatggcatggtaattttttagttatatagactgctacttgattttggtattaaattgtgttttcatgccttaactatccaattcaactttatattgtaagaccggatcacatcactactaaatgaagaactacttgcaagagatatcgacttatctttctgtgatgaggaggatgatgaagaagtatcacacttgctgtccttattaatgaaggagcacccattcaagcataatagtttgagtggtggcgtggacgcttgtgatgttgtacaaccatctgatgatgagttccttgcagatgaaggtatgaatccgtctaagagtgatggtgaagaggagatggaggctgatgtcccaggtggtgctatggaagagagacaagagggtgcaaccggtgaatgtgaagacggcatggatgctgattttcttgttgatgatagacaaacacagaaagatgatggcaattttctggctggagaagatttgcagcatgatgtcccgattgctggggaaacgcaaaacagtagtagtgcattgatcaaagaggcacctgatgaatttgagtaaagttttctcaagattcaacaggcgaacacagttgaattgaaggcctactttgatactaaactagataagcataagaaagaattggtggaaatgattactgaatctattagggaagtggtaagtgggcaaaatagacagaaggctcaaaaaggggaatccaacaaatgtgtagcagagtcctgctctacaaaggtttggttactttgatttgctgtatatgttttggaaaactgaccatatatgttccattccattttcagtgacataatatgcttatgttacaattgtaattcatgaaacaggaacatagaagctttgaccagccagggcatacgcatgttggttcccagccggatgaacctgagattgggctagctggtggaagtgacagtgtagcgggtgtttgtggcataattggtggattaggtgtgttagatggcatcaagactgacactcttaaggaggttagcatacggtaaaaattgttcctcacttgttttaatgaataaatattacatataaatgtgatgtactattaggtccgaggtgacgatgctagtcagaaaagacggaaaaaaaaatctagttctgatatggacgcccaatctactcggccacttaaaagagttaaagagaaggaccaggtgtcaagcactaaggtattactatatctgtctgtatatttactccactagcacttgtgtttttggaatgaacacttactttactaattgaatttgacagattggaaacacagaagaattgcatgcaaacaacccggtaagacatgacaaagatgttaaattaagttaaatgatgtagatatgctgaactatttacatgggtatatgtatgcaggatgttaatgcagaagagcacttggatgatgattgtgatgttattgcccctaatgttttgttgggcctaccgcaagaaactgtggctgacagcagcaggttacctccaaaaggaaagaagaagacatctcccagaaaagtcacagtgttgcggtcaagcaaccggattagggacagtcccgtcatgtccaacagaagagagagtcggcctaccattccggtacagcagcggcaaacagctgttagagggtcgactaaagttcatgttgttaggcctggaaaatgggagaagatacctccaaatccaccaccatcttttattggtccgtttgacccgtttgctgttccaagtccagagagagtgaaatgttttcttaaaaaaatggaacggagagtgtaattacaggccctatatattcagaataactaatttgttatcgcaactaacttgctggtatatggtaccatgtagatcttatgctctggctgatggcgttgtaatggagaatactgaatttctaactatttacgaggcacagacactactagatgaatcagtaagttatacatgcaatcagtgttgtttcaaataaaactgtgtgctcactgcttctttagtaggcctaccaatattaatggtgtgtgctaataaaaaaactgacttccacaaggaccagatctgttagtgaggttcatccagatgcggctggataaaaagaagttgttgcgttttgattttctaccgtcacgtttcttgtcagagctacgacgccagtacaacaaattttgtgcagcttcagataagagtgctttttacttccccacacttacaagagtcccattcatggtgcagccgaaatggtttgatgaggttgatgtcatctactgccgaatgcaggtcgagaggcagcattgggttgggcttgtcatcaatttgaagaaatgggaagtcattgtattagactgcaagagggaagtattgaacgacgagcatgtggcgaagtacatagaacacataataatcatgctcctgtaccttattcgaaaccatggtgtaaacgggagaatgctaacacagaggctcgatcctatgacaatgagtagacccaacttacagttcaatgtttcgtcattaggtatgtttgtcttccatgattgagttttgctaagtgttttatatttgactggatgacatatatatttcacgtgtgtttttcaggccttgttggaattgcgtgtgtgatcttacttgagctacattcagttaacgccatggactattgtgctaaactagacgaagagaagatgcgaggggcagctaaacagtacgctatcaaaatgttcaatgccttgtctccagaaacacgtactgcttgagtcttacaagtgcaaaagctggcaaccaaacccgaaggttcttatgtaatctgtgactctttgtttttaaattcaacaattaatagcgatgtttgctatttacattgtactgttttgttggaggctagtgtaatttgtggattatatgctatttatacaaacactatcctgcttaaaaataggaatacaacgccttccccgaagaaaaaaaatatcgtctactttacgtgactacttagtagattatacagagttacttatatacaggcaacatgaaaataataagattttaattgaagcaccataatatttggagtacaacttacatttaggattcaaaacttgctgattattttcaaatagtacaataatggaatcttaatgaagcagattacggaccaaagaaggggaaatacacaaattgtgaggtttcttatatatacatttcaaaagcggtgttacaagacattgcatacttacatcggaattcaagaaaccaacacaaatatatacgaattgtaggaaaagtaaaatagtaaggtatacaccacatttggctataccaaactattttgaaaaatgtattgtagcctgcattaggaaaagtaaataaacccgcttccgcaaagtaggcgggaacaaccattattgtgcccaaaccagaaagttacttcataacaccttataacaccccatagcagtagttaacgttttctatagcattacggcaggaggctttgttgtggccaacaccacaacaacgtgaacacctcctttgggaactagacttcttgcgctgcaaattagaagtatagaagctgttagcttttaaaaaatagaatggactatgtactcttttaatgttctgaacttgccttgaattcaccacgagataatattcttattttccttggtctccaaggtggctacctaacaaatgatggatgctcctcccttgtcgttcctaaagtaattacgggtgcgtcctcccaaccaacatagtgaattggatagattttctcctcgtaacttagcttcactaactcactaaaatattcgtttggtgctaacgaatctgtaagaactccaagccgagcagtagcggctattgcgtaagcacaaggtatccctaaaccctgaaattccaagcaagaacaaatagactcgtccaatttgacaataaaacattcactagtccgaacttggacgtggaactcaaagttgcaaatcggcttaacagacattgacatggcggcttgatagatttcctatactctttcctgcactctcgaagataaagtggtagggcagtcttcaacttgatcccttctaatagcaaaccaatccatcaaagttgtttttatgtactcaagcatgcaaataagcgggtactcgcgtgcctctctaataacgttgtttcatgactcacatatgttactatccataatattgaaacgccgaccttttgaatgcactctggtctattctgaaaactctatacacgttacaacatacatggttatgtaatttacaatcatgtcaaccactttactataactatatggaagctgaacaatataataataaagagtaaaacaaacgtacccaaatcaactaaataggcaacacatcctgggtttaatttttgtatcttgagaaaaatccaattgaaatcagtgacatgaaacgcttgtgcagcttcagacattagtcagcagaggctttttggcttgtagagatgtctgacattccgccaaaggtgaacagtacaagcagagtggttggcttgggtatagacctgatgccaaagacaaaaaatcaaacagtacttgtcaattgtgaaccagattctatatgtagaataagtacatatctagcggtatactatataacacaatgcttcaaagcaatgttgtttctcaccttactcaagcccatgtatatgctaccatgtcggtcagatataaacattaaatcaggattgtctggagctataatgctgagccgctgaaaacccccgttcataagtgctatcattctcactgttaacgataccaaaagcaattgggaagatctaaaaattcccatcttggcaacatgctgatatgagacaaccaccgtatctactcttcatagatgttccatcaacgacaatgaccttccacatgtatgcatagcctttaatagaagctgtgaaggctatgaattggtatttgaaacggtgtggaccatttggctgatcgtcatactctgtaaagcacatactccctgtgtttacttgctgaagtagcccagcgtaagcggggattagtgcgtagctgccggccatagatcctaatgacttctccattgccacctctctagcacgccaagctttccagtaggatatactaacatgatagtcgtcaagaaggaacttccaaatcacaacaacatttggcccgcttttaataccaagaaagcacgattgcataagttcccctattacttgagttgttgctaaatggtggtatctacgcctttgatcaattgtgaatgtgtgtctctaatttgcctgccgcacttgaaagctgtcagaagaatcaaccttagaggcatacacccgccatgaacaagtcctcgagatgcatttcaacaccataaactttggagtagaacgtgcagttctgaagtgaaacttgcggttgatggcgtgtatagctatcttaatcttgcaatcagacttggacttaaatactctgccaataaacagcttgtctccttcgtatttcacatcaaagaaagcagagaccacacctgaaacaaaatgaacatctttcagcaaatgtatgtattatgctacttaaatagaaccagtatgtctaaacacaatggtatacaagacataaactattttaacgaactagcaaattccaaattcttaaaacaaatcaacaaaacaattatatatgtatagccggattacaagttataccttcaccttttccatcattaaagaccggtggggcgtctcgaccgaatagattaggatcatcactaaaatcagagaggattgtgttta

SEQ ID NO: 529 - DNA, 103632 bp, Arabidopsis thaliana
aattcgttttcagggaatattaccaagcgggcaagagatagcggtaaagagattaagaaaaggttcaggacaaggaggtatggagttcaagaacgaggtcttactcttgacaagactccaacataggaatctggttaagcttcttgggttttgtaatgaaaaagatgaagagattcttgtctacgagtttgtccccaattcaagccttgaccacttcatattcggtgagccttcgcgagacgagactttgcatctttgcatgttacactacttttagaaaacaagaaaaaaaaactgtttctttgagatgtgcagatgaagaaaaacgccgagttctgacatgggatgtgaggtatacaatcatagaaggagttgcaagagggcttctttatctccatgaagattctcagttgaggattatacacagagatttgaaggcaagcaatatccttttagacgcggagatgaaccctaaggttgcagattttgggatggcaaggctgttcgatatggacgagactcgaggacagacaagcagagtagttggaacatagtaagtaagctctgtttttatttttaaagattctttgatcagcatcactattaatatgatttggttaatgcagtggatatatggctccagaatacgcgacatacggacaattctcgacaaaatctgatgtttatagctttggtgtcatgcttctagagatgataagtggtaaaagcaacaaaaagttggaaaaagaagaagaggaagaagaagaagagcttccagcttttgtaagcttatcacttatgtcgatcatctttactcttcttcttcatcttcttatcgaaattttaaaaattatttgcaggtgtggaagaggtggattgaaggaagatttgcagagatcattgatcctttggctgctccgagtaacaatatctcaataaacgaagtaatgaagctcattcacataggtttgttgtgtgttcaagaggatatttccaaaagacctagcattaattcaatcctcttttggcttgagagacacgctactatcacaatgcctgtgcccacgcctgttgcttatcttacgcgaccatcgttatcacttggtcattaatgaaccgtcaatcatgtatgttttatacctatttgtctctctctgtacaatgaatgacaaatgttgagaaaagagatgccgtgtaatgtaagcaaacttatgtttgatttgtgctaaacttatttatattaaatgaatatttgatatagccagcgttttggataatgttggaaattggactgaaacggaggaacgcatagatgaaattaaagtccaatttctatgaaagttcacacgagcagaaacaaaaactttgatctaatgtaagaggaaatgcgtgcggtaggggttgcgtagtcataaagaaaggacattgaacaaaggcacatttttaaacttatatgtaagagcatcatgggctcttaaccatatttagaatttaaatattgcacaatcaaaatacccctcatgagtttttatttttgacaactccaatggtagaagttctaatgaggctcttaaaatttaaatttttgaaatttatatgtgtttgtgtaacaccccgatttcaggaatatggtggtgcatacggtgaaatttaaaataattgatttgaccatttatattaccaaaatgcatttatcttttcgatcaaagatgttgaaaatgctcaagtaaataacatttgacattatattttacttttttcatgtttacaataaagcttcgttttgtatgatctgaaatataaaattttctctatatttataaccaatttactatagactaaatatttttaaattacaaataccgaatgactaatccataaaactgtgatggacaccatatataaagctatattggacgattgtgggtgttgttcattaaattgatgatttccactatgtcaaacctttcctccaaatttaagaatgacaaactatccaaaattattttcaaagatttttgaaagactcactacgagtttctcagaaattaacaattgttacaattttcacttcttttttcttcctgaattgtcacattctttatacagtatatgagtatgactcgtagaccaagcaaaggaagacttttttggtcatgcatgcgaccaaaaacaagtacttacataaccatattgaaaggacaatattttcaatacttctagagaagaaaaaaacccttagttcatacgaagtgattaagaaatgtttaccctttctctacggctatttgaatttgaatggccatctttgaagtcaaccattactcaaattttttcatgtgtactcaaccaaaacccattctctctcatgtcacctaattatacacatatataaacatttattacctcattaacaaaaaaaaaaacaatgaacaaaaccctaaactccattgcttaacaatgataatgaagaactctgctgcgatcttccttacttcttcccttattcttctccttcaaaccctccacggagttaaagccggtttcatctgcgtcggaagctccttccccaccaacagtagctaccaaaaaaaccgtgactctctcttctctactctttctgataaagtcaccacaaacggtggattctacaatgcttcactcgatggagttcacgttgttggcctctgtagaagagactacgatcggcaaggttgtatcaactgcgtagaagaatccattcgacagattaaaacaagttgttctaatcgtgttcagtcgttccattgcaatagtgacgatagagaacgtgtttcttgtcttgtacgtaccacggatcaatcaacttatcggatactcgagcttggaccagctacgaatgacccgagtcctgttgctatcgacacattcgcaaagaacatgacccttttccgccaagaatgggaagcaatggttgaccggacgctcgaggctgtaaccattgacaattccacaacggttctcaagtattacggtgctctcaaatcagagttcagtgagtttccaaatgtatatatgatgatgcaatgcacacccgacataaattcaggcgcgtgcaagagatgtttgcaagcgtccgttacatattttagagaccagaattggggcagacaaggaggcgggatttgtcgaccgagctgtgttttcaggtgggagttttatcccttttacggcgcttttgctaatgtaacaagagttccagcgcctcctcgagctttgattcctcgaacagaagcaatctccatcactcgcttgaaaggtgtgaaaacaaatgagttgtttaacattttcacctgtgaaattatctgagattctcatacaaatattaaaaaagagaagccataatcttgcaggaggaattatcgcaatatttgtggttcctatcgtcattaatcttctcgtctttatcggtctgatcagagcatatactcgaataagaaaatcgtacaacggaatcaatggtatgttgtcagggtttgcaataaatatttgtgatgcatcattgctcatagtttttttttttttttggtatgtgcagaggcgcaatatgattatggtggtcagtctaagctacggttcgattttcgcatgatcctaacggcaaccgatgatttttcctttgaaaataagattggccaaggtggatttggatctgtctacaaggtaaataaacttgagaaaaattactatcaaattctttagatgtgtaagcaatcttatagcacgataatcgggtttgcaggggaaattaccgggaggggaagagatagcggtaaaaagattaacaagaggctcaggacaaggagagatagagtttagaaacgaggtcttactcttgacaagactccaacataggaatctagttaagcttcttggattttgtaatgaaggcgatgaagagattcttgtttacgagtttgtccccaattcaagcctcgaccacttcatatttggtgagccttttttcactttgatgtttgtgtaaaaatttttgaatgttctagtcgctggttcgagtgacacttgggagatgaccatataaaaatattcagtggtttagtatattgatgcttctttggtaatatgcagatgaagagaagcgtttgcttctaacgtgggacatgagagccagaattatagaaggcgttgcgcgaggtcttgtttatttacacgaagattctcagctgaggataattcaccgagacttgaaagcaagcaatatccttttagatgcatatatgaaccctaaagttgcagactttgggatggcgaggttgttcaacatggaccagactcgagcagtgacaagaaaagtagttggaaccttgtaagtatcctctgtttttactgattcttttagacaaaacaagatactctgtttttttttaccctaaattttcgagattcttggaatcagaaactaatttgaatttgttttagtggctatatggctcccgagtacgttaggaacagaacattttcagtcaagacagacgtttacagcttcggagtcgtgcttctcgagatgataaccggtcgaagtaacaagaactatttcgaagccctcgggctccctgcatatgtaagcaaaatccagtcttgtttactactttagacacaaatgaatctcaaaagataatttgagtataaacttatggtgataatatataggcatggaagtgttgggttgcgggcgaggcagcgagtatcatcgatcatgtcctcagtaggagccgaagcaacgaaatcatgagattcatccacattggtttgttgtgtgttcaagagaatgtttcaaaaagaccaaccatgagtttggttattcaatggcttggaagtgagactatcgccattcctttacctacagttgctggttttacgaatgcatcgtatcaagctgaacatgaagctggtacattatcactaaatgagctttcaatcaccgagttaagtcctcgttgaaaccaagatctctctgtcaactcttatatccaagttttattcacctaaatttcacgatataaacatatgcacaataaattaagttgttattcacctaaatttcaatttctgaccaaggagatggaagatatgagaagcatatgacagtttggtttgcaacaagataaggagggtagttactactaaatatttttcagtgtatgtatttttaaaaacgttaaactttccgatgcacttgatgtaaacacgttttttcgaataaattttacattctattcaaaaaaaaaatttcaatttctgatcatgggctgaccattggacaagttttcagaccatgtccattaaggaccaacaattaaaacccatgaaaaataatggtccaagtggacatgaccgttgggttttagacagtccaattgacacttctacatatatgtatgtatctaaatggggttccaactcgaaactcattatcaataagtggattggtttatgtctcttatatactgttcaagtctcttcttttcttcccagcattccaatgtgagatatttctccacatctactaaaatggatacataacataacaataattcaaaatattccttctatacttgagagtaaagaatcttggtcttccatgatacttccacgcttcttctttattttgttagggttttaaatttatatgctaaaacaagtgttcaaaaaaatgctaggcgctaatcgggcagtgatccaatgcctagcgtctagaacgcttaattgaagcctatatgattttaggcggttaaagcgtttatagcctaaaacattatatatatatatattattatagataaaaataatttaaaatatgcattaataaaataaaaatattaaatttataaacaaaaattagataaaacgtacatttaagagaatcttgcaaaacctgccatattcccctcaaaatcttacaatccctatcatattcacagtcagcttacagaatctaccacatttagctacacgtggaaattcgtggacgaaattacccttaaggtgggtcagtgctctgacttagatggcgacagcttcgtccagcgaaaagaggcagcccctgttccgtaataaatgtttccgtttccgattggatgttatgtggatttattttttaaaaatggtaatataggggttagtcactttaattgtttattaatgttgcagaggaaagatgttgtgttgaacagaacaaagtggtaaactggggaatttgggaggtgttgttgaagacacaaccatttattgcggacgaggtaaaatttattatctggaatttctgtccttcgattcgctttagtttggtagttctatttgtttgtttggttgtgataaatgcaactacctcatattccaaaatggtatatttgttctgtttgaagaacagaaaaggatggacgaaggagttatggtattggtcggtggctgggaatgcaaagacaatggggagtggcgtttcaagatgtcggataataagtacgggaagtgggttgacgtaagcgaatgagatatgttgactgaaattgtatcaaaagttgcaacaacgtttggactagacaggaagaccaaatttcagctgagtttttggttcgaaggaggagacactgtctacacgcatcagaaaatgtcgcctgtctctgttgacaacgaaagctcgttgaagaaattcaaagagaaaaggcaagaaaaaggaggtttgaacatgtatctatctatagacgatgtcgacgtggctgagatttcgtcccctgaaataaggggacacaaagacaataatgttgtagaggtagaagtggcgggatacatgggcgggcgaatggatgatggtaatagcacgcatgcaattccattgacttatgaggaagacggcttcctagaagaaataattgtgtgtgaagaaacttaaagaggaaggctagtttactagagttggcctgcgcaaagcggggacgagaaaaggaagtggatgtagagttggcaactgagacaagaggatgggcatcagactcagaagacgaatcgttaagggaggtatcagattcagaggattatgattttgataatatgagggatatgattgatacagattacctgccggattgggatccttggaaggattggaggaacagcacattgacaagttttgacggttagccggggacacaaatgtgtggaacaactttgggggataagtcatctaggcccaataatatgggggacgatatactgctttgtggcgggggacaaagccgggttgaccttgtcgaagtggaagttattgagatgaacggaatgggcgatgagagtgcaaaatgtcgattcagctggggcaaagtagaatgagagctgaattaccggatacgcaagcgacaacattggaagaatcgttagacaaggactgtccaagatgtttggacaacgtgcatggacaaagcctgcaaggggtaggtatagtggacgttgaggttacaacaatcccagacgctgatgcacaaggtgatagtgagaatggaattgaggataatgatgaagaaaatacgagaatgtctatataattggggcagagggcagtcccaaatatgaggacagattcaatgacagagacgttggatacgtgtttggtccctgaatctggagaatatgtaggaccagtggacgttgtagtgacatcgttggaagcaagtgcatctgaagaggaaggacaaagtgatgtagaggttggtaatacaacagtgggggaaatgataatacagcaagggcactggcagaggacatgtcgagaagattaacagacggagagactatatttactgaattagcaggggacgagatgttgatgtgtagagatgccgttccgttcaaggacaacgcagccggggttgcttccgacaaagctaatatgaatcttaggaagggtggcgatgcaatatatatcgggtgggtattcaacaacaaagtcgagttgcataaaacattaactatgtactctatgaaaaggctattcaatttccgtataaaagcgtccgacaagacacgagtcattgcggtgtgcgatgataaaaagtgtgattggagggtatatgcaacgtttcacgagaattctgaaaaggtggaaattcgtacggcgactctaaagcatacttgtgatgtcgaggcgcggtctaagtatgggatgaaagcaacacgatcgatgttaggtgagttgcttaagacaaaatatacgcatggtaagaagggaccaagggcctgtgaactaccagaaatagtattggctgaactaccatacatgaaggcttggtacgcaaaagaaatagcaatgaaaaaagctcgtggtagtgaggaagaaggttataagtttttcgcagacatgtctccacctgttgaggacaactaatctaggtacgttgtccacagtccatacggattatacggaggaagggaatattcgtttcaaatatcttttttttttgcgtttgggcttcgattgttgggtaccagtatttgcggaaagttattgtgatagatggtgcacagaccaaagggaaatacaaaagctgcttagttgctgcaagtggacaagatgaaaattaccaaatattcccattagcgtttggtattatagacaatgaaaacatagcaggttggcagtggtttttcgaatagttgtcacagtttatccctgatgaggaagatctagttttcgtctctgacaggcatgcggccatttatgttgggcttaggacagttcactctcttgcgaagcatgcgtgttgcacagtacatttgttcaggaacgttgtccataatttccagtgtgagggacttgtaaaaatggtctccatggcagcgagatcttacactgtgggagatttacgatattggtttgaagaaatacagaagagaaacattcaatgtgccaagtatttagtagagataaagctatctcacaggacactggcgtacttcccgggtatgcgatacattgtgatgagaagcaatatctcggagtccctaaatgctgcaattcaaaaagccatagatttcccggtagtgaccatggtggaatttataaggacaatgttgatgcgttggttttgcgagagacgacaaactgcagctaaaacaaagacaagatgtacgccaaaaatcgaggatttgctaatagatcatcttaaattagccacagattgtgcggtcatagcagcagacgaatggatctatcaagtaaacgacagttttggcatgatttttactgttgaccttgagaaaaagacatgtacttgcagagtatttgatgtgctaatggtcccgtgttgtcacgctttagcagcggtgggtgtaaggaacgtggacatatactccttgatcggagactatgccttcgtgacagagtggcgtaaactatagcgtgaacatattctacccccgccaaaggaaaaggacacagaggtcccgaacgatattagtctagtggttgtatatccaccaaatacaagaagaccagttgggagaccaaggaccgttcagataccatcgaggggggagccggtaaataactaaactcttagcatagttttaagtcctccgaatctatcataaccaaacgtgtcatctacttgtagggcaaaggatggaaaaagaagaagacaagacaatgcagcacatgtgggaaggatggccacaacagaggctgggggaaaaagtgcatcgagcgcgtgttaacgtttttttgtagtttttgatgtttcgaaaagacgttttttggtccatataagtttttggttttggtctccagattttaatacagatcgggggtgtctttcgggaaggggatgtaattcagtcgaacgattgctttttgtaatgttaacttatgatgttgactaccaactagtttattgtaattgctacatatagaacaataattattatattagacagtggaagagtaaaaacgcagaaagatgcattaaaagtgctggaagcaaagtaaacgtgaagactgaaagcgctggaagataatcacagtacccaccaatcaatacaaagaggacaggggttgcaataattgcatttcttatattctgagtatcgacgagggggatcaatcatgtaacacggccagcttatccagttcaagccaagttagtgtggcgcaattatattgatattggacataacactcatagccacacaatcggcgttgcggcaagagacaacattgagtttaaatagattcatggcggtaatggcatcatttggtctattaaccgcaatatggtagagacccttcgtaaaaagtattttgggggacggatcgggtatataggcgatcatgtccattgcttctttgattaacctttcaaatgaagccagcctaatgctctctaagtagcaagcaaccggattaccagcctttacacatcgtaacagaacaagtaaatgggtgaaccactggagactaattgagaatgcgcttcaatgagggccagggatgtctcccgcgaaacggatggatcaagtgctagacgcaagccagcgttgccagagacaatgaggggacctaagtgttggtaagataactttccaacaagaaggacaattgaaaccctaagatgttgaggaagcgattgccagtttaccaaattgtgatgtttgaagtatggtttagtttggatttcacacagaaagaagaactatatatatagttgggattaaaggagaaaataaaatggatgcaattagtaggtatggacaatgaatattagatgtgacaaaaagctataaaagctacaccattaggacaaagcaaactctgcaaagtacaaaatttaattaaacggtttatagaatttagaatattagttgaggaccataaatatgaaaactaaatgaatgatgaagtgacaagacaattagccattattaggcaaatggggacatggaaaagtaaatatatagactaaatattgaaaaatcataaaacgaaatatataaaaaacttatcaaatccgaaaaaaatggacacatactcatatggtccacatcttacagtacggttacataattagtggacaaaataatcaaagataaaacaatagttctgtggaaagaaaaagatttaatagagctctagcaatgaaattatcgctacatataagtgccaaggacgaaagcgacaatggggacaaggatcacgaggacgagaattatatgcgggggacaagaatggacttggtcgatgatggtacgaggggagcgttcgagaagaccaacttgatgctgaagagatttgatttcttgctggtagaggtctaggcgatcccacatgtacggaggatcaatgcgttcaccattagacccggtaactacgaacttaatgtgttcatcctgttccctgacagagcacttgagcgctgcaatcttgtccaccaatgactcgtccaaccatttgacaagatgacgcccaggtcgggccttgaaaaagatagcaaaagcaggttttatacgtgtggagatagaaatgaaaaatgggggttaatgggcatacctctctcttctcgcactggtagaactgtctgttgtcctcagaggacgaactcgcaagaaccacaatcccaccacaataacagcgacgtggaataccaagaatgggcgtcgacggttgggaagggtaaactagtccatatgacgtcggagattctgaatgctgagaagattccgatggttgtgtataactatgaaggcccatgttacagtggctgtggataattttgaacaagttaaaaggaaagtgaataattaatggggttggaaaattgagaaagtggacaagttatccttcaaaaggtttgaaagatttgaaggataattaatttagagagataaaaggggggggggagaatttagagagataaaaggccggggggggggggggaagaagaacttcagtaacctaggcacctaataatataataatgttaaaaatattaagttgatgtgatgtgacataaaggtaaaatcatagaaaagcgtaagggataaagattagtagaaaaaattgtggagacagttgactgagactgttcttagtgggaagataccccacaatagtccacgaatgtgaagtgtattgcatttgcatacttacaaagccacaacataattgttgtcccctctaaatatataatgtccctccccatccgttgataagtgattttacctccacataaaatattttacataaagataagagttatatatggaataaaaggtagtaaaaagttaagtctccaaaaaacatacaagttcggaataaaagtagagtcactaaatattaaaacagacataaattctaacatggacatcaaacacgaagagcttcaataaactcctcatagatgtctacagcaaatctcatcctgagatcttcaacggactcctcagttatggagtcatggctaatggcctgaaaatgaagctcaataaacttcacaacaagcgggccactgtcatctgcatgctcagtttggaagacctcagggagacgatcataagcaaactcaaggggcacttcatttgtcctcaggtcttgggggacaagcgactttataataagcggaatcaggacaataaaaggtttcatcaaaaccgtccatctgtttggcagtcttcgagtcagcgatagggtctagcacacctatggtaccctctttctgatttatgacaatggaaacgcagtgaccggcagtgagatgtaaaggagtgtacaagatgtcgacatcagcgaaccaagcctatcggatgctacggccagggacgatacctttcacatagtcccagatcttactgttccacgaccagtcagatttacttttggccttcttataacgtggatagagctcaacaaagttaagtgcgaacgaagaatctagtataacagccatactctgtaccaactcatcgccatacctccgcgccaacaggcttagcatagcctcgatgtattggattacataaagacaaccagttagatctgagtaaattttaacatattcccaggtttagcattgatttggtacatacctcctggtggacagcagcctgaggagtgtgcatgtccttgaaaaatgttttagggacaacatgtccctcgataacgtacttcctgaccattcattcataataatgattaatagatacgtagaagaatattagttaccaaaacaataattcagcggaaaacttaattacctttggcgataagctttgatagtggacaaaaagcttttccgaacctcatcgtttactttggcaattgggtgcaaatcatcatggggccctttgactactgagacagtaactgtctcacaaaaacgctggggttttttcttgcccttctgggaggaagcatagacttagaagtatccccttctccaacctctctttttcttttaatcctagagggaaaagtctctgaaattgggacaccagcatgtgcattaccctataagacaaagatttatgtcagatccataaaagacaacaaaagattgaaaaaacatagatttatacctcttgatcggatagttgttcagtatcaacttttgaggattgaagaagctcttctggatgtatagcaacagtaataacaaaaggtttgctaatcgcaataaaagatataataaggattaaatgaggaatacttcgttcatggtctgatcatcttgttgatcaccggagtcagaccttccttcactctcatcatcaccctcgtccccttgttttggatctccatccccttgatgagtatcatcaccctcgtcccctcgttggggatctttgtcccctggattagtatcatcaccctcgtccttttatttgggatcttcgtccccttgaagagaatcatcaccctcgtcctcttggtttgctccgtcatcaaaatcgtctccggattcagagtcactaactaagacagcctcatcttgaggcgttaggaaatcgttgggctacaagtaaaaagaaagaattaaaggtaaataagattctcaagaccaaaataattatttataaaaaaaaacacaactatctagaaacttacgttgtgatcttcagtaatattcacattatcagacttcccatccatttcctatttaaaaatgttatgcaaacatttacaatgttatatgataccaaaaaagaaataaagggacaatactcacctcgtctccaatagcagcgtctccaagagcagcgtcctggtcttccgcttctgtgtcctctggtatggtctgcagcggcgtttgaaagtcttttggctaaataagaagtaagcacaattggttaaagtaaaaggaaattctaacgataagtaatagatgccaaaccattaaacttacattgtgatcactcgaggatttcgaggacgatggaccaccagaaggatccgaacaagtagaaccaaactttccagcctgcggaggaccagaggaagatgcatgagattggttgatgttcttaataacttcagacaatcccccataattagaccaggcttgctgctgcaatgcattcaagagttgagcatgagtctgtccacttggggcagggttcttgcttgacgaatcagcgattcgcgagggcatattactttgtctctcagggacaatcttggggtcgaggttcttcgcggggtcactaatttgtccctcatctgctatgtccttttgggacgcagccttagggggtggagtgacaattccatcaccactagtggactttggagactttccaccagatttgggacttggaaacttgtcaccatggcgcaaattgcttattatctcgtctaatagttcgtcctttaacaaagaattctctaagataaacataccagtaaggtccccaaataattcaaccttcagttcatccttcaattcacgaaatttagaattaacctgttccatgatcagaccatggagaatatcatgtccatcagtcctcggtggtggagtactgaactcttcatgcaccttccctttacctttagcagagggcccttttggggaccagatggaccagcctggaaagaatcagggatatccgatggtctgtgtggaggcaccttctttgcctttcgagcattgtcttctttaggatggttctcatcaacgacgatctttggccaggttcgacaaccacctctccagtcagattgttggaacttgtatcggctaccaatgaccctttccatatagtcaagcgtcgggtcttcaacttcatcgatccagtagtcgttgatatttgggtatggtggatcatcaatgggcaacaacggagaaatactcaactacattgaagccgaaacaatttatcaactaaacaaatcatcaaaggcaaactagtgagagactaataagaatctaataaaattaggtccacagattaccctaggaattagctctgtctccattatgttggagttgtggtaagtcttcaacggaggcaaactggtgagagacgtctcactgatagtctgcgtatcatcggggtttggaaggtatctttccaattcagggataacgttaaagacaaaaagttggaagacaagagggaatccatgtgttgaattgttagactgattgaacttcgtgattagtcctgggagattgctgaccttggatctaactttgtgagaaggaaggactctcgtccccagggatacgcctcaaaagcctccaagtccttcaccatttcaacgacttatttagaaacttttacaggttgggaactacagatcaagatcccctcaacaataactataacagcgagacaaagccttctccaaggttccatcctctcttctttaggcttcagcttatctgtcttcaaccatttgaatatatccttgatgaggacgactttgtgttccttacctattaggacattccagtaaggatgtctcagatttatgggttgctgcgacttcaatatgtctctccgagaggggtaaggaccacaattcaaaccactaagaatggcaaactcccttaacaaaaaccggaagggctgaccggcaaaaacaaaccaaatctcgtgttttttccttgtgtagaggcctctacacaacatctggtggaccagtttcccggagaaagaacatttacggacttcaaattgaaaaaagggactaaaacaaggggcgcaaatgtagtttaactccttcgtcccatctagaatatcgacgagataaagaaggtacttaggcttagagtatgtatttatacgcccattcagcggatagcagtcagttgcgtaaagtctcttgggaagtctttcccgattgaattcagggatgcgaggaattattggcggatcagagctctgctcagcggttgatttggcagagagaaatggatcgtcgtcgtcttcaaaggacaccgaccgcctggcaccgccaagcgctgacttctgtttcgctttgctggtggaagacctcatctgcgttggggtaaaatcaaacaattatcaaatcagttattcgatgtgataaaataattaaacacacaggaggacgaaaaaccctaaaagctgtaatgggggacatttcgattaatcggaacaaactcaatcaaccggcttaattgctaaaggttttcgaactttctgggtaaatgaatcgcacaggagaggacgaactatctaaaatcataatgggagacaaactcgatttttcataacagaccagtaacaagggatttgctaaagattttccaaaaatacttcactgaataaaatatgaagacatgattgaagatagcaacatgcagaaacttgaaatgaccttaccggagacataatccgatgaaagttatcggtgaaggaaagggaaagtatgagagagatagacgaaagagagagagttaactgttgttgtttttccgcacggtttacaatgaaaaagagataaaaggtattgtaaaaagacgcagttgttgagcgcgaaaactgctcagtaaaccgtgggaacaaaatggacatttcacaaccaaatgtggtatgagttgtaatgcccgaagaaatatggcagattacataacgattgggaaaaatatggcagattttataattttcctacatttaattcatatcaaacaacatttgaacatttaaaaccatatacatttgaacatttaaaaccattcaacgagaaatcataataaagccatcatctgaacagtgccaccgaattagtgtttctactttatccccatcaactcaatccaatcattcactatgacaaattttggattccgattcttaaaagaagaaaaaaaatctaggttaagtttcgacgtgccgcgcgttaatgaacagacaagaaacaatttaacatgtcaatcttcactaaaatttactttcggattcgagacaaacctgagagaagcgaaacagatcaaagcttgctcgggaggaatggacgagaggttgaagaagcggtagcggcagcgcaaataaacgaagaattacaacaatcaacgtagaacaaacaaggactttcagaaaaggctcataaataaactttttaatggaccatattgtgtggtaagaagataaatatatcttatcaaataaaatataaatttactaaaacattataacacaactatacttatttattttatagaaaagaaattaaaagtaaagaaaataattataaaaaaaatgtatatatcttattaaataaaaataggaataaaggtagagaaatttggatctataaccaaaaaaatttaataattaagaaactaacctaaaaaaaaaagctgttgtgatattttttgtattttgtatattaagaccactttacccttctcacctctcacctctcacctctcacctcttatctctggcatctcatctctttttttctatatcgccttcattaaaacagaacaaaactatagttttctattttactttcaattttgttacattctatttgctagaactaaggaaaacaaatacgaagactcaccagatctaattgaatattttctggtttgatcaatatctccttaacacaaatttaaacccaaaatcgaatcgatttcaattcgatttaagaaaggagaaaagagattaagagtatataaacatgattttttcagacttctaaaaactgaaacttgagatgatttcatttagtttaattatttttgtttgggttcatataaagtatcatccttagggtttaatttttttaaatcaatagatgtttgtaattagaatggattgagataaaaaaaagttaatttttctggaaattttttattgaattggggagaagagaagaagcaacgaagaagatgatgaaggaaaaaggtctgttaaataagaataaagtggatatttcccagttctcatatgttagtttcttaatttctagaattatagtgctattttcttaatttagtgttgaaaactagttagttttccaattcacccataaaagtattttcagaaaaaaaatatagaaaaaaagaaaaaaagtattagtgtacttggaacctaatattattcattatcaatcatggaatttttactttacaccgaagtcgaaactctactctggacgataaagtgtatgattggtgccgacaaccaagatgtagccttttttatatactgttcagacctggtgaagatagttttttcctcaaccgaatagtcggcgttttcagcatatttggaggattttcagagcgacaaggaagaattcacaagcttctctttatctttaattttttgtaatgcaaatgttaaaacggacaatttggcacgaaaatttgtactaaatcgttttatgtcacttatgtaaacaatattccgcaagattgattcttttgagctcaaaacaaaaccgatgacaaaaaaaaaaaaaatcatggaatttctaagaaccgtagacacttacttggtcaccgttgccaactacgacgaaatatttataacatttctaatatgctacttgacaaaacaaaaaaggctacttgaaaatcgctaatttttgtttttcttcctcactagtcaatatcacttatgaaaagttatttgtaaatttgcaattactttccaaagtaaggttttgtgagtaaaatgtatgttttgataggaataaacattctcaatttactaagcagttatgtatactatagttgttttaaacgcacaaatgaaaacttgtcaaatgggattgataacaaacatatcatactactttctttctatcttttgtcaatatcgtattactttatgttaaatatatagtaaaacttctcgataaattaataactatataaattaataaattcttccgttccgagttgagatcaatgtaaaaattgatacaaatcaatatattaataagataataatttttttgaaaatcttatataaatatatggtctcatttaccttttagattaaatttttgtaaaaagttacaaaatttgtaaaatctctctataatttaaatttattaattaatcgataaattaatacctttttaaattaataaattttctcggtttcagtattattaatttatagaggttttaccgtatttcaattatatcctaactatacaacgaaaacacataaaataataaaatttgaacatgaacatctctgtatacatatatggacatgagaacctacgcgtatgtccgagtactttcctagtagtaacaaaatctgaccaatacaccattttgtcaagtcaagtagtgtgtactcgttgtctcaagtcaccttataatatacaaaagctctatagtaattgattatcctcgtaacaataacgtatgatcaaaaagatatggggaaatactctgttttgatgatctttatcgcttcttctcttcttattgtccttcaaaacgtggaaatcgttaacgccgtcggatgtaccggaagcttcttcaacggtaatagcagctacgctcagaatcgccgcgatctcttctctactcttcctaataaagtcgtcaccaacggtggattctacaactcttcactcggcaaaagtcccaacatagttcatgctgttgctctctgcggaagaggatacgagcaacaagcttgtatcaggtgtgtcgacagtgcgatacagggtatactaacgacaacgagttgtctaaaccgcgtggattcattcacgtgggacaaagacgaggaagacaatgtttcttgtcttgtaagtacctcaaaccactcaacttttgggaacctcgagcttagaccttctgttagataccaaagtccgaatagtatcgagccatcgaaaaacatgactcttttcgaacaagaatggaatgcaatggctaatcggaccgtcgagtctgccacagaagctgaaacttcctcggtacttaagtactatagtgccgaaaaagccgagttcacagagtttccaaatgtttacatgctgatgcaatgcacacccgacataacttcccaagattgcaaaacatgtctgggagaatgcgtgacgcttttcaaagaacaggtttggggaagacaaggaggcgaggtttatcgtccgagctgttttttcaggtgggatctatatgctttccatggtgcttttgataatgtaacaagagttcctgcgcctcctcgacctcaagctcagggaaacgagagctctataacaaaaaagaaaggtaaaacattgatttgagtcttatttaagtttgttagtatgataaagatgttcttaggctaaaaggggtttgatgatttttaggaagaagcattggatatggtggaattattgcaatagttgtggttcttactttcattaatattttggtgtttattggctatatcaaagtctatggacgtaggaaagaatcatacaacaaaatcaatggtaagtgtacattatttcttgcttcaatcaaccacatgatgtagagagtaagtcttatatcttcttgttttttcttttagttggaagtgcagagtactctgattctgatggtcaattcatgttacggtttgatcttggtatggtcttagcggctaccgatgaattctcatcggaaaatacgcttggccaaggtggatttggtacggtctataaggtagtactaacatttgttttactaattatgagttcttgattgatcttgatctttggtgaataacaaatcttgtggaccggtttcaggggacattactaaacgggcaagaggtagcggtgaagaggttaacaaaaggttcaggacaaggagatatagagttcaagaatgaggtttcgctattgacaagactccagcataggaatctagttaagcttcttggattttgtaatgaaggagatgaacagattcttgtttacgagttcgttcccaattcaagtcttgatcactttatcttcggtgagacttcgaaagacagctgccaatttggatggttttagaacttttagcaaactaaatgtttctttgaactttgcagatgatgagaagcgttcacttcttacatgggagatgagatacagaattatagaaggcattgctcgaggtcttctttatcttcatgaagactcgcagctaaagattattcaccgagacttgaaggcaagcaacatacttttagacgcagagatgaaccctaaagttgcagatttcgggacagcgaggttgttcgactccgatgagactcgagctgaaacaaaaagaatagctggaacccggtaagaaatatatcaaggtatatttaaatgctctgttttgaaaacagagtccatgaattaatgttattggtttgcatatatgcagtggatatatggctcctgaatacttgaatcatggacaaatctcagctaaatctgacgtttatagcttcggtgttatgcttctagagatgattagtggtgaaagaaacaatagcttcgaaggagaaggacttgcagcttttgtaagcttcttcacatatatatatttttttgaataccaggaggttctgggccgaaaccacagcatgtaatattagtttcgtcccaagcgtcactcgaaccggcgacctctaagtttcttcacatatcagtttttgtttttctaatcttcaaaaacttttggtgtaggcatggaaaagatgggttgaaggaaagcctgagattataattgatccgttcttaatagagaaaccaagaaatgagatcataaagttgatccaaattggtttgttgtgtgttcaagagaatccaacaaagagaccaacaatgagctctgtaataatttggcttggtagtgagacaaatatcattcctttacctaaagctcctgctttcactggaagtcgatcccaatctgaaattggtgcaatgtcaatgagcgacgatgtcttcacggagttaagttgtcgttgagttaatcagaatgttggttccaaaagggagttatcgttagttcaattagctaattcaaatgtgctttttaaagtatatgttgtgtatgtcatctaatagtaatacttttaggtattttgagtgaatgtaaggagatgaaaaaattgtatgaattatttatacatttttgttttaaaactaccacaaattgatattatagaggtaataaaataaaataaacttaaaatgttgcacagataaatataattgaaaaataaatagctgaaaatatatttttaaaccccagctagatttaaaatttatattttagagttagtatatataaaattttgcaaattatatctatttataagatatttctatttctcgtttataattgttattaagtaatagatatcacaagtccacgggttaattgttaaaatattgaaaatttaattcatattgaaacgacatgttagtgacatttaaaattttataaatattgattcaaacttgtctgttctgtaatataacccgtacgatgattttttaaccaatctcatgatttgttttctaaaagtagtaatttataaaatttaatgattatttattatatttgaaagcttacaaattgtatcatttctaagacattgatattttatagtttacaatagttatgtagtaaccgtatatcacgagacatttttggttttatacaatcttatataagttaggttgtttagatatatctaatattggtagtgttcttatatatcttactctgaacataaatattaaaattaatttttgttgataaaaatatattataaggaattttcggagtattttgacatcacttcctataaaggtatatatcaagtaactaatatagttctccctaatacttttcttctacttatatacctaaatgacgaccaaatatttcaaagttgatttcaattttatctgaccaataagaaatcttttctgactcgttttcttaaaaatattttttaaaaagagtgtctttctctctcaggcacggacatcgaagcacctcttccgttcacgtattccgatatcggcgtagcttttgttcgccggtgtcgagaaatatctagtttcacccttcatcactttgtttttaattttcttgtcttcattttcacgattttttcccccaatttgtttatttttcttcaaatttctccaactttctcgaactcactagatccatacgttttctcaataaccagcgaccaaggacaaaagtattttctggcgaactccctcctcctcgctttgctcgcaacctccttgacggcggaccagaagaccaccgccgaagactattttggatctggacttttgttcactcttggaaactcttcaacatggacttcgttgatggcaagagttctctctcttggaccatcagatgtgccattctcgatgtttttcgacgacgcatggtgattccttattcagagtgataaatccttctcaaaaacccatgttttatttgttcaccgcctccgccgcagataatgtcaatagctttctaccaacgaatcttattacattgaaggagcataattcatcgcaaatctatccttctgctttgatcaactgctgcactctctttccaccttggtcagcaatcacgaaattagggtttcacctaaagggatttgtccctagattcggcacattaacacgtgtgaagcccaagcccaacaacgttatattcaggtctgtttcaatttgtattttgacaatctttggtcgacattatgctcttgatggtcgacgactccatctcagaactaattcaccttcgttgatatagattaacaagtatcttttgagaactctggcttatgattcatctatggttgcgacctttgttcccaaatccaatttgttggatgaatgaatgttatcatggaaaatctatgcctaagtttccctctatgataataccatctaacaatttcaagtaccatccaacttccaccatgactaagtttcggatcatgttctttgaagaagattttgtttgtcacaagagagatctcgagtctctgagttgtgtcacaaagcaatctgtatccgactataaagccatagtctctcgaatcctagatgatgctctactccctatagagcttctcgtgccggcgagaatcacagctttgatttcttcatcaacatcactatgtcgatgcacactgaccaccatgttttccatcgatttgttcgtggaagatcgttcgactaaccgtgatctcacatgtgataaaacacaatctagtctttgtctcaaatctctcgtggaatcattgttgatttactttatctattttgttttgacattgaggaatgcctttctttttgttgtcttaaacgtttggagctttgccttttatcgccttgtagttggattatttgaatgagtgaataaatataagaggaatatttccttattaatcagataaagtatcaattcctaatttctgctactctacttgattcttattttactctacatagaaatataagaaagattttttttaagaaatacaatctaagcaattttccttactattttcactttaattctccaaagaaaaaaatatagaaatacatacctaatatagttcttccaaacatatttcttctaaatatacacctaaacaaaatctaatgcaaccaaatattttcaaagttgctttcaattttatatcatagatgatgtgatcatggaactcactattcgtatgtcgaattttgatctttctcgacttatcaaaaggcttttccgcatccttttgtggcgtcattcaatccatcatctcgtctttgagtcgtgtgtcgtatccatttcgagaatatccactccagatctttgaagtgccgaaattaggattgattcctcaccatgatcatatcaatagcaaacaaaattgttctacatctttttttttgggtcaaatgttctactacatttaagtaccttttttataacaacatttaaatagctcttttggtgacttatttgtgcttcaaagcaagcttgtttgttttatgtttgtaccattttgcgaccagtacataatatttagtagttttacgtttgtaccatttaacgacatgtacttacatcatataatagctatattggtttgtaccaaataaaatataaatattcttaggaaaagcaaaatcagcaatatattgagaacttgtaaaacataattaaataaatttctaaatatatttgtgtacccatataatggacgaaaaatcacattatagcatattataagaggactaccataatattttatttggtttttatttttctatctcattatgtatatgggataagcattaaataatatagagatcaagcattaaaaaaaaatagaaagcaaaattgtcttagtacttgcgcccaagagtgagttcaagggacaattcttcttcgccaattgcaccaccacaagcaacaacaacatcattatctctgtttttattaagtctcacctagaaaaagtatatatttatctagtttcatatgcctcaaatctacatgttgatgatcattcatgatactaatgtaagaaaaaaaagaagaagaagaaaaaatacacttgaagattgatagagagacttgttacttgatcccaaaactggagttatcttctcactaatatccaattgtaccctacaaaacaattgaaaaaaaaaattgttttatttaccaaatcaaaaatcgattatacaaaaacctaactcaatacatgaacataagaacctttgttgattttggataaattgggtagcatctcgagcactttcgtagatttgaatgtattgttgagattgcctcctgctcatttctcgcatcattctcctttctgccaaaggattgagcatgcataattataaatgaaaaggatataaagtcactatgcattatgttgaacatcaacatactaccatatacaacgttacactacaaacataattattaaatgttaatttaaatgtaagataattacttataccttttctagattcttctttcttcttgttcctatacatctaataaaagtaaaaaatatatatttatttcattacatactatcttaaatataaatatgatactctacattaatgcatatacatgttatgtatatagacgtatcttatatcgctaactgattatgtgtataaactataaagacctgaagatggcttttcacatgtgaaattgggaggtttttcacatccataaaatccaaaataaccttaggagttgcccctgcaaatttaaggagaatattgatattaattatagttaatctaaaagatgatatcaagaaaaatattatcatgtgtaatatataataataaaaaataagagagatgaggtatcttaaaggaaaaataggagattgtttattttaatggcgattggtttttctctcaatttatttagaagaattgtctttattttaattttgcgatatggaaaaaaattgcttacttctttcgccaccaagtaattcaacaacttgaataaaaaggagattaagatcatctgtccaacgccaatgcggcacttttgacctagtgtacgatctaacgatccgtcctctcattgttcttctgtctcttgtaaaactcttagtttgataaaactttagactacatactgataatttatataaaaatatatttatatattttccccaaaaataaccttaaaaaaaatatttagtgctagtacatgtttttgttgtcacgtgtaatttttgattttactattctctaaaaataaatataaaactgcattttaagaaataattatcttctgacaactccaaattttcttttctctaataataatatgcataataaattttaaaatctaaaatgaatacttaccagatttattttatttttattctaaaattaaatctatatatgctgaatatttgtaaaaataaagtaaaactcaaaaaaacaaacatattttctctaataatagccttgttattaattattattatttttaaccaaaggttataaataaatttataatcatccaaaaagaactttgaattatatttattttgaattaaaattagattttcttaaaaaaagctatgaatacaaatgagttgtaggtgatataaaatataaatgggagatgaaatcatttttcttatagaaatggagttacattgtagaatcgttgtttgtggaaaatgttcatcatatttgtatagagtactgcaagtagatgtgtccaaatagttaatcatattattggtaaaggtaaggctaaagattgtggaaccttgtttttcgtaaaatttatgaaggttgtttttgtggggaaaatatggtatgatgatgatgatgatgacggtggcgttaataatatgatgatatgatagtatgaagataattatgatgtgaaaaattataatcttatgaaagtttttgtctaactataaaccattacatattattgacaaggcaggcccaaagtgcatagctacctaaagcatgagttttttttttaaaacccataacacttaaatataaaaatattcaaaaaccacaaaatattggctcaaactcaagacttcatgttaaccttaaaacttaactttgtcactgtgctacatataattttcccgtatttgatgtcctataaatgatgatatattattagcacctaaagccctagctttacttgctttagatcaggggcgatcctgattactgatcaactcatctacttataatttctttgaccaatcaactcatttagaacaaaataataaaatcattaatgtgataagttaggttgatccatgaggtatgaatcccttattcaccatcaatgactgaaaatatagattaatattttagcggaaaaagtgtgatatcgtattgcggtggaaaacttgtgaaaaccatctatttttggcagaaaattgttcaattttactatctgagaaattgtgaaatagtgtctttagcaaaagaattacagaatctcattttttggttggaaaattatgatattgtgattatattgaagaaattgatgataaaggtgatgatgattatatggtgatcatgatgatattaataaagctaatgatgatgttaagtatgataatttatggtttaatatggtgaaccataaaccattacaacttactccaaacgatccactaactcactgacccatcaactcattatgatccaaatagtaaaattattagggttgatgaattagattagatcaaattgacacatatagtttgactcatatattaaaattttatttttaacaaaagaaagatgctgaggtttgagaaaaattcatttgaaaaaaatgtaagagcatcaaagaaaattagaagtggttcgtttgtgcatctagatgcatatacaagacattattcgttaaataacatttaattatatgagttggacttaataacttgatgcatttggaaaatgtaacttaagaacaaaaaatcttggatgagttttaaatttttaacttaaaggagagtttatatacaacacaatttccatctagaaatcacaacgataaccaagatagttttactttatatatattatcatattttaaaataatattctttcaccaaaacagtgaaacaacaaattatctatttcccatcaaaatcactaaactattaaactacatttgatggtataactatgtagtttgattgctcgagtaattcctcgatacaagcgcaaggtaaatatacatggttaatattctaaagagttttaggacttgttcttagctaaaacaaaaaaaaaagttgtttgttttgttttcagagttgtaaataaaaatgcaaataaattgacaattaaacttatgaattaaagacattgagctatagaatattttaataatcaatctagaagaatagatgtaacaggtaattcagaaattaagaactgttctcaaacatgaacacaaatttagattctctctctctctctctctctctctctctctctctctctctctctctctctctctctctctctctctctctctctctctctctctctctctctctattttgatagatgaaaaaatagtacaataccatattctcaccaaaaatagtagaatactgtttaccgttctacaaaatccgtgaaatcataattttgaaagacattttatgcatacatttttcccgccaaaaccttatattcaaggtcttatgtattttgcaccaaaactttaaaactaggtgtagacatccgggtacgcggatcgggttcggctaaaacccaatcaagtaaggatcttttggttagagagggccaattttaaagaccaatacccaaattttatattaaatactcgtgttttaggtaagattttgggttttcggtaaatttggatattctaatcaaatatccgggtatatttgggttcgtgtcgggttcttgtttggttgtttgggtcgaggagtttaggacccaataggataaatctaaatttttggctttggtttcaggtccgatttttgggtcgaaaaaaagaaatagtcatcatttcctatctttcgttctataaaaaaatttggaccctaattataatagatttgcttataaaaaaaagataaattttgggtggaccctgtgcatcagctcttccagcacaggtatacccagttcctgttttttgctaaatccctatttgaaaccacgatttcatgagttcataaattttgccagaaaatgcaattactcggatttgctagttttagaacataacatgattttacagttttggcagaaacatgatttcacgttctttgaaaaatgacgttccacgactttgatagaattatgatgcatttattgcctataaaggggaatatgacttattgcagttccaatattttgtttgatgtgtttttctaccctaataacggtccaattttttgtttcgtttaaaatttatttttctaccctaaaaatatacttgaactcttcaaattttgccttaatcagaatcatcgataacatatgttagtcaattgtaatggatgatgactcaactcacatgtgtatgacgattaggctcgaccgaattgggtaggacttaaatgttggacctaagactcatcaacatttttgaaaaaagggaaattggcaaaactaaccaacaaaaacgttatatttgcaaaactaacacctgaaactatatgtggtgtaatttctgtaataattccaaacataaattctgtttctttcagagaatttacaatacccaaatataaagcatggtatacataaagcgagcaacccgggaaagtttcgaagagtgatatagaccgacacggttagagtggcgaggcaagggtatccgatttttcgatttgggggtttcgcataatggcgacagggccggtgccggtgaagtcgagtaagcaacttccggttgtgcaatttgggggagggggactatataagcgtcgaatttgagtcgcggctagggaaaagcgagtacagttggttctatttgtggcggctcctatacgaacagcgaatttcaggaaacattggtggattagaagtgctccatcgacaaacgtggttgctcttatcaaattttagcaagtcggaggtatgagttgaaatattttgtctttgtcacaaatcattggttttagttctatgcatgcatctcagaaactcggatttgatgaactgtagtattgaaatttagtgattcccgaattgatttgtgtgtttaattctgtgattttttggttttagcagacatcaatcatttgtggttaaggtcggattgtagtgttaagttaagcgtgtatgtaatccagtttatcttaatgaaactaaaggaaagatgcttacatattgcatgtgtagtttaaccacctatatggtgagctattgaacatgtattgccaatttagattacatgatttgtataaatctgttttgggcatctggtaagcagcaaataagtgataatgttacctttgaatttcatggtatctgtcaaatgggggatgataagttgccaaagcgtttgtttcggcttggggctgaacctgaaggtcgaaagaggataaacaaatattttacactttggtggattgagattataaaggctgcacttgatgaagagcatttgcaacagctggatggttctcaatttcggagtatcttgcaaatggggacgcatcagttttctataatgttcttgcattacattctatctagacagttagtgacagataagaagtacgagatgtggtggttgtttgctgggaaaccaatttgcttttgcattgatgattttgcgctagtaaccggtctaaactgcagcaaagctggtttcaaaaagaaggatgcaagaactagagggaatatgaaagcggttcagaatcctacaaggttctacaagtttctatttggtaaagagagaaatccaacttcaaaatagattgtaggaaagctttctatggagaagaaatacaaagacccgctaactcggtttcgcctagctttgctgctaatagttgatggcattctttgcccgacatatgcgcgaacaatcatcaatccttaacatgtagagacggttaaagatgttgctgtgtttcttaaatatccttggggcagaaccttgtttctaaatgaactaaggaacttgcccaagatacaacagccatacaagagttcccgcatgcattagttcttgtgactgttaccgcatgtccaactatcatatacatgtcggactcggttatcagcatactagacccaacaatttcagttgagaagcttgttcagtatgtattaggaaggagcttgaaaatcaatatgcatgacgcccgcactatagaccaaaatggcatggtaattttttagttatatagactgctacttgattttggtattaaattgtgttttcatgccttaactatccaattcaactttatattgtaagaccggatcacatcactactaaatgaagaactacttgcaagagatatcgacttatctttctgtgatgaggaggatgatgaagaagtatcacacttgctgtccttattaatgaaggagcacccattcaagcataatagtttgagtggtggcgtggacgcttgtgatgttgtacaaccatctgatgatgagttccttgcagatgaaggtatgaatccgtctaagagtgatggtgaagaggagatggaggctgatgtcccaggtggtgctatggaagagagacaagagggtgcaaccggtgaatgtgaagacggcatggatgctgattttcttgttgatgatagacaaacacagaaagatgatggcaattttctggctggagaagatttgcagcatgatgtcccgattgctggggaaacgcaaaacagtagtagtgcattgatcaaagaggcacctgatgaatttgagtaaagttttctcaagattcaacaggcgaacacagttgaattgaaggcctactttgatactaaactagataagcataagaaagaattggtggaaatgattactgaatctattagggaagtggtaagtgggcaaaatagacagaaggctcaaaaaggggaatccaacaaatgtgtagcagagtcctgctctacaaaggtttggttactttgatttgctgtatatgttttggaaaactgaccatatatgttccattccattttcagtgacataatatgcttatgttacaattgtaattcatgaaacaggaacatagaagctttgaccagccagggcatacgcatgttggttcccagccggatgaacctgagattgggctagctggtggaagtgacagtgtagcgggtgtttgtggcataattggtggattaggtgtgttagatggcatcaagactgacactcttaaggaggttagcatacggtaaaaattgttcctcacttgttttaatgaataaatattacatataaatgtgatgtactattaggtccgaggtgacgatgctagtcagaaaagacggaaaaaaaaatctagttctgatatggacgcccaatctactcggccacttaaaagagttaaagagaaggaccaggtgtcaagcactaaggtattactatatctgtctgtatatttactccactagcacttgtgtttttggaatgaacacttactttactaattgaatttgacagattggaaacacagaagaattgcatgcaaacaacccggtaagacatgacaaagatgttaaattaagttaaatgatgtagatatgctgaactatttacatgggtatatgtatgcaggatgttaatgcagaagagcacttggatgatgattgtgatgttattgcccctaatgttttgttgggcctaccgcaagaaactgtggctgacagcagcaggttacctccaaaaggaaagaagaagacatctcccagaaaagtcacagtgttgcggtcaagcaaccggattagggacagtcccgtcatgtccaacagaagagagagtcggcctaccattccggtacagcagcggcaaacagctgttagagggtcgactaaagttcatgttgttaggcctggaaaatgggagaagatacctccaaatccaccaccatcttttattggtccgtttgacccgtttgctgttccaagtccagagagagtgaaatgttttcttaaaaaaatggaacggagagtgtaattacaggccctatatattcagaataactaatttgttatcgcaactaacttgctggtatatggtaccatgtagatcttatgctctggctgatggcgttgtaatggagaatactgaatttctaactatttacgaggcacagacactactagatgaatcagtaagttatacatgcaatcagtgttgtttcaaataaaactgtgtgctcactgcttctttagtaggcctaccaatattaatggtgtgtgctaataaaaaaactgacttccacaaggaccagatctgttagtgaggttcatccagatgcggctggataaaaagaagttgttgcgttttgattttctaccgtcacgtttcttgtcagagctacgacgccagtacaacaaattttgtgcagcttcagataagagtgctttttacttccccacacttacaagagtcccattcatggtgcagccgaaatggtttgatgaggttgatgtcatctactgccgaatgcaggtcgagaggcagcattgggttgggcttgtcatcaatttgaagaaatgggaagtcattgtattagactgcaagagggaagtattgaacgacgagcatgtggcgaagtacatagaacacataataatcatgctcctgtaccttattcgaaaccatggtgtaaacgggagaatgctaacacagaggctcgatcctatgacaatgagtagacccaacttacagttcaatgtttcgtcattaggtatgtttgtcttccatgattgagttttgctaagtgttttatatttgactggatgacatatatatttcacgtgtgtttttcaggccttgttggaattgcgtgtgtgatcttacttgagctacattcagttaacgccatggactattgtgctaaactagacgaagagaagatgcgaggggcagctaaacagtacgctatcaaaatgttcaatgccttgtctccagaaacacgtactgcttgagtcttacaagtgcaaaagctggcaaccaaacccgaaggttcttatgtaatctgtgactctttgtttttaaattcaacaattaatagcgatgtttgctatttacattgtactgttttgttggaggctagtgtaatttgtggattatatgctatttatacaaacactatcctgcttaaaaataggaatacaacgccttccccgaagaaaaaaaatatcgtctactttacgtgactacttagtagattatacagagttacttatatacaggcaacatgaaaataataagattttaattgaagcaccataatatttggagtacaacttacatttaggattcaaaacttgctgattattttcaaatagtacaataatggaatcttaatgaagcagattacggaccaaagaaggggaaatacacaaattgtgaggtttcttatatatacatttcaaaagcggtgttacaagacattgcatacttacatcggaattcaagaaaccaacacaaatatatacgaattgtaggaaaagtaaaatagtaaggtatacaccacatttggctataccaaactattttgaaaaatgtattgtagcctgcattaggaaaagtaaataaacccgcttccgcaaagtaggcgggaacaaccattattgtgcccaaaccagaaagttacttcataacaccttataacaccccatagcagtagttaacgttttctatagcattacggcaggaggctttgttgtggccaacaccacaacaacgtgaacacctcctttgggaactagacttcttgcgctgcaaattagaagtatagaagctgttagcttttaaaaaatagaatggactatgtactcttttaatgttctgaacttgccttgaattcaccacgagataatattcttattttccttggtctccaaggtggctacctaacaaatgatggatgctcctcccttgtcgttcctaaagtaattacgggtgcgtcctcccaaccaacatagtgaattggatagattttctcctcgtaacttagcttcactaactcactaaaatattcgtttggtgctaacgaatctgtaagaactccaagccgagcagtagcggctattgcgtaagcacaaggtatccctaaaccctgaaattccaagcaagaacaaatagactcgtccaatttgacaataaaacattcactagtccgaacttggacgtggaactcaaagttgcaaatcggcttaacagacattgacatggcggcttgatagatttcctatactctttcctgcactctcgaagataaagtggtagggcagtcttcaacttgatcccttctaatagcaaaccaatccatcaaagttgtttttatgtactcaagcatgcaaataagcgggtactcgcgtgcctctctaataacgttgtttcatgactcacatatgttactatccataatattgaaacgccgaccttttgaatgcactctggtctattctgaaaactctatacacgttacaacatacatggttatgtaatttacaatcatgtcaaccactttactataactatatggaagctgaacaatataataataaagagtaaaacaaacgtacccaaatcaactaaataggcaacacatcctgggtttaatttttgtatcttgagaaaaatccaattgaaatcagtgacatgaaacgcttgtgcagcttcagacattagtcagcagaggctttttggcttgtagagatgtctgacattccgccaaaggtgaacagtacaagcagagtggttggcttgggtatagacctgatgccaaagacaaaaaatcaaacagtacttgtcaattgtgaaccagattctatatgtagaataagtacatatctagcggtatactatataacacaatgcttcaaagcaatgttgtttctcaccttactcaagcccatgtatatgctaccatgtcggtcagatataaacattaaatcaggattgtctggagctataatgctgagccgctgaaaacccccgttcataagtgctatcattctcactgttaacgataccaaaagcaattgggaagatctaaaaattcccatcttggcaacatgctgatatgagacaaccaccgtatctactttcatagatgttccatcaacgacaatgaccttccacatgtatgcatagcctttaatagaagctgtgaaggctatgaattggtatttgaaacggtgtggaccatttggctgatcgtcatactctgtaaagcacatactccctgtgtttacttgctgaagtagcccagcgtaagcggggattagtgcgtagctgccggccatagatcctaatgacttctccattgccacctctctagcacgccaagctttccagtaggatatactaacatgatagtcgtcaagaaggaacttccaaatcacaacaacatttggcccgcttttaataccaagaaagcacgattgcataagttcccctattacttgagttgttgctaaatggtggtatctacgcctttgatcaattgtgaatgtgtgtctctaatttgcctgccgcacttgaaagctgtcagaagaatcaaccttagaggcatacacccgccatgaacaagtcctcgagatgcatttcaacaccataaactttggagtagaacgtgcagttctgaagtgaaacttgcggttgatggcgtgtatagctatcttaatcttgcaatcagacttggacttaaatactctgccaataaacagcttgtctccttcgtatttcacatcaaagaaagcagagaccacacctgaaacaaaatgaacatctttcagcaaatgtatgtattatgctacttaaatagaaccagtatgtctaaacacaatggtatacaagacataaactattttaacgaactagcaaattccaaattcttaaaacaaatcaacaaaacaattatatatgtatagccggattacaagttataccttcaccttttccatcattaaagaccggtggggcgtctcgaccgaatagattaggatcatcactaaaatcagagaggattgtgtttaaagcttcttgtgcccgcccccaaaacagattatactatatatagtttacacaagacttgatatacaagcaaagaatattagtgaacatattaatcggaaactatctttatccgtaacagttttgagggatgaagctgaaattggtccgattgatattaattcaattgtgtgagaggcttgtatgcaatgctacatcgtgacacacgtctcagcagagttatctatttgttatagttgacaaacttccattatccgacgactctgatttacacacaaattgaaaacattggactttgtttaagaagtttaagggggaaaaaggcatcgggccttgttcaaatatttgctcaaacagaaaaaagaattccaaaaagaattattaaagtttatcaagtacatcattttccgtccataaaattgtattgacgatgttgaatgtccatcaaattgatctttttatcttctattatcgaagactctgatttacacaaaaatggaaaaagggtattatatgtttctaaaatgtttaagacgtttaaggaaaaacaagcattggaccttgtttaaaaaaaagtacttgacagtgttcaaatagaaaaagatcccaaaatgaattattaaaattgaagtacgtcatttctgtccataaaactgtactgacgatgttgagtgcccatcaaattagtcattttcccatcaaattgattttttttatctcattgaatcaaaaaagagttatgagaattttagacaacaaaactgtcaaatattaaaaaagttataatgtttaaaaaagattcaaaataatgaagctaatatgtccttgactttttttttaaatgttttaaaaatattttgtttaaaattagataatgttttaatttaaaatctaaaattactattttttaattggttttgatgatttgtattttacagattgttttaggattgtttgatcatatttagatagataataaataatattgtaggttagaaatcaacaaaaatcaaatatattttttaatcactatgcaaaaactttaaacctcaaggaattatgaggctgattgagtattaaacaaaaacaacatagtcgtattgaaagcatgtggtggggttacttggagacaaaaagtataacttataaccgtattgaaagggtacagtttacacaccaagtgattaaatcgctaattctaaatgtttaccctttctatacggctattagattttaatgcacatatgtgagaaggtagaagatgaccaaacccttgtgaggttctaaaatctgctttggtcttcttcagtcagctttccttagtgaaagaataaaatgcatatatttgtttttaaaagatactatacgtgtatttaaatgtggatggtgatacatcaacaatattaagacaaatttataggttgcgcatgtcttagtcaaagttttctaaaatatataaaaatagaaaacaaaactatttaacttatttaacactcactagacttttgagacttattttgcattttatgtatggaattctttgttttttttttgcgcaactatattgaattctattttctattgaaacatataaactctttattatatgtttatttgtagtaatttcttagtccaatattcaatagtataaatgtttctaatcagatatagacatataatagtcgattagtagagaaagtacactattacaaattactgatataaaccttatgagaagtttcggcatgctacagatagagaactattcgacgtggtcttaagtgtgttgcaaaaatagattaagaaggtatagaggatgattttgtttggaacgcgtcaaacaaacgttttttctttatttttattaataataaatattttagaatgattttattctctaggtaattatttgatctattatacccgaatgatcaaccccgactaagaacaaatctaagcttaatcgttcctctgtttcttatcacccgcctgattacaaacacccactttctaagcttttgctaggtttcgaaagctttacacgtatggcaatattctagagtgcttaggcggctcaatgcctactcctagaagatttatgctattctcgctaaccttaatccctaggatctccgagaatcaatgagcggaatctttcttgaatcgtcaagcctatttcttttccttgttcgagatcctccttaatatttaagcctatctctttccttgttcgagatcctccttgatattcaagcctatctttttccttatttgttgagaagaatattcaccaaatcttctcaaccgactttcgtctttaattaccatgccaagtcagcaaagcttcttgacacgtcagatcaaccactccagctccgccatgtcagctcacgcgtccatgtcagcaactcagacgtttgatgtagatttgatgcagcttcctgatatccaacagctctctgatgtccatcagctcgttgttgtcagaatctgcatcttcaatctccccctttttgacttagtttgatactcaagcatccttctgattcaacttgaaaagatactaaacaaaccaaacaaagataaacagaacaagcaatatctagctatagataaaagcttgttcatatgagaactatcttaagaacgcaaaacatcaataacagcgaaaatcaaattcttaaccgtttacatcactcagaagaattctaccaacgaactctaacaacaggcagtgaaactatgtctaaactcaaaacgaatcaaattcaaacaagtctcccacataaacagtgaacactgctcaactagtaattagtcaacaatacttatcaagtaatcagtcaactatgaacattactaagtagtcagcagtctgtcaaactcccccacaatcaagcattctataaaccagagtcatctccccctgcttgagtgcataactaagttaaaaacaactagttacagaagatctacattaggacaagtagttagaaatacttacctgaaatcagtgtatcgtaacacactttgatgaccatccacttctcagactactgcagccaaaccgggtttgcttccaccagctgtttgaatcaaacaatctccttgacgagacctgaaagtcaaacagaaggaaacccaaacacagcaacaagacaaaatctagaaacgtttctagcatacctatcaaaagataagattcgtccaagcagctgtgtttaacttattacagacccaagttttcagaggatacatatcatcagttcaaaaagaacaaaaataaaagcatggtgtgaaataaaaacaagcttgtcaaaaacaagattttaaacgttaaaaacatcaagctcccccttaaattagtttctcccatcatcagattcagacacatctcctcctgcttaagtgcatgacttagtcaaaaatcacacaaacatcattagctgagatataatatttcaaaggaaaacagaaaaacacttacttgcatctaaagcagtctgcagaacttcaatggccagtttcattgctctacgatgttctgaaccatcagtggagtcaccagcttgcactccttgggttgatggcttctttgcagtcttcttcttagtctggactaagggctctggcttctcaacaaacttcacaggatgctgcatctgaagaagttgatacacaggactcggaaacggaatgtagaactttgcctcaggtttcaaagcaagctgcagaatagaactttgcctcaactttcaaagcaagatgcacaatatgctcatacaccatctgcccaaagtcaaaagccaacttgtgtgcaatccgatacataagcaaaaccctgtgtatacttgcatatccctcgctggtcgttggagaccaatttctgcacgagaacttgaaaagcttcctacagttctccgagaaggtgctcatcggaagactctgaagaaccttcacttgtccgttagtcagatagctggtgacctcatcatcaatcagactagcaatttgcacctgtagagctctggcatcaactaattgcagaccaaacgaagcgttgatcttggcaggagagaatttgtactccattcctcgcacacataccttgacagaatcaccttcgacctcttcttagcatcatgagagataaatcgcaagcggtcaaagccatctttatcaacaacacttgaactagcagcttcgttcctatcgttagtcttctgtctttttatcctctccacaacagcaaactgttttcttttcagcagacgcgaggacacagacagatctgttgagtcaacagcttgtgctgattcagatgcatcagagatctgcactacttgaggattcttgttgttgagttatggaacttgatcacaagtcttgtttctggtctcagcttgaatgggtgtctcagatctatgctcatgaacaacagaagattcacacacgtcaggcagttccacaatcaccggtgggccgcctgttcatcttggttctcattgtttggaagctcagatctgagagatgttggttcgggctcagcatacaacaccatagctctgttttgattttcttcctcttcagctttcagagactgcgatggatgctcttcagaggctgcttctgacaggttcggcgacggtgtcacagatctttgttgcacgagccgttgaagtccacagaaaatcgcattcatcttcaagaaagatttcaacttgattctctttgagcacaagtcttcgaataaacgactccctaggcaggtttaatttgacatgagaaaccctaactctttttccctccaacgtagacattaagtaatgggcttaatttgttcatgggccttcaaaacaaatgggcttaggctgaatacctaaaataattagagcctgaaacactaaacaaaaacattagtgcatacttgcaaataatcccattgattcatatcatcccattgatcaatatcacatgttagcatagttcagattaaaaatcatttagcgaacaaccattcactcatgaacagaatttagtgacccagaaagttattgaaacatgtgagtacagtaagttggattcaaaacatttttatacctttgagatctgttccgtgttccgtgccaaccacttgttcagaactcagcaagaagctaccataaccactcagatctttgatagatcaactctggatacagtggctagtctttcacactatcatgccttcaattccagtagatcggctcaacgtataacaggcagctggaattttcctttggagattgctcaaagaatcaggagtgtgatgttttcatttccacacttccttagatttagatacaacagggttctccttttttttcttttctttttttaaactttggatcccggttgatctatcagtttcatattagcagcatcacttgacttctcaactgctgatatcagtgcatgatggtcatttgacaccaaattaggctttagatacccttagtttggtttgcacaatacattgatcttctcagcgctttgacctttgttagacgacaacgttttacagctgactatagaatcagcatgacagtatgctattttccacacacctttattcacagagtgttgatcttctattcatcctcggatttccatagcctgttcttgcattttttgctcttgtcttagatcaacacatctcacgaaacaaattagatctcaggcacaccaattaactttctcagatcactgaggctattaaagtccaagattttggtacacaaatcagatagttgatattcagtactcacatgatcaactactatcagtttcgcctcaacaagtttacagatgaaatggtgtagaatatcaatatgcttagtgcgtgaatgttgaacaagattatttcctatgtttattgcactttgattatcacaataaattagtaaagaatcagagatcataccatagtccgctaccatttgtttcatccacatgatttgagtgtagcaactccttagagcaaggtactctatttcagtaatggatagagacacaatattctgctccttactctaccacgagaccatgttgctacccatgaaaacgtatccaccacttgtacttcagcgaaacttccacggatccagcccagtcagcatcttgcactgcatcagactcttataatgatattcaggcactgcgactcctgatatgtacagagactcatccactttgactccagatatgtacaaagacatgtacaaacaccatcagattcagttcctgattcatccgccaccagcaggcttggtaactttctccccccgaatccttcccatagcttcatgtgggatgtgatttgaatacttactagactgctgcaacttgctactagtgaccaagtcctgactatgtaggtacttcggattcagaatacctctttgaacgaactcctttgaatgtggattggatgatttccacatgtaatggttaccacctgtgatgtgtccttggtcacgacagtaccaacagttcctcgttcttctgctcagttgtttgacactcgactgactaactcttgcttttgacctcgtccttgccttcacataaccagacttagcaaagttgttaacaagaacagctctattcataaccttatttgaggtacatgaatatccacagttacgataaagatcatctttctttatgtagacttgattcccttgcttatcgttcttgtggtgctgcttgtggtgcctgacttgcgtaacacgattcagctgtaacaatcagctctgtagtgtttctgacttccgcaataccaacatcctgttcttctgctcctcagatgattgtgatcaacctaataatctgactgcctccagttctgagtaggcatactcctggtcaacgcctttcgagccttcgagggtgcatccttgcggtgggcttttactggtttgatatcatcagatttctcatctgaagttgtccctttgacaaaacgcgttcctccttttgaacttgatccatcatatccaagacgccaagtaacgtttgaagttcttccaacagtcaggagcttatccaagtctttagtccccctactcagcatcttgatgtttctcggttggtcttctagctgtttctccaatccttggatttgattctctcttcaccatgctcctttcaagtgcagaaactttttccatcaagatttccttttcagaaatgagctccttattttccttctttttcagaatcactctgaatcagtatcagactcttgatcgttcccatctgagcatcttcctcaaccgtgtggtcatcatcttcaatggcaccaaaataggttgcgtagctgttgagaatttcttccttatcagtatcatacgcctgcatcatcccaacaacctgatcaaactttaattgatctgagttcaaagatacatcaatcgctgacttgtgtgattgaaacttgtctggtagactcctgagaaattttttcaccatcttcttgtccttgtacgtttttcctaggacaacagcctcttgtgtgatggagctcaatttgccgttgaagtcatccacggattcttcagcttccatggtcagattctcaaactctgacgcaagcatgtccagacgagtacgcttcacattgttggtgcattcaaatgagacttgcagaatttcccatacttcctttgctgataagcatccttgaacctgagtgaacttattccttaacaaagatccaaaaatcacagacagtgcctgagagttgtgattggctgctgtcttctcatccgcaatccattcagtccttgatttcgaaacaatgtctctctttgcatcctttgtggtaggaggcatccaaccatcttctactgcaaaccatgcatccatgtcgatactttgaatcgatcgcttgatcaacaccttccaatacccgtaatgctcagcatccagcttcagtggcttaggtatcgcaatgaaccgttgtgctttctccttcccttgtcgcaagatctcacctgttgaacagattcacaacttcttttaccaagtgtccgctctgataccaattaagagggtatagaggatacacaacacgctgattttgtttggaacgcgccaaacaaacgttttttctttattcttattaataataaatcttttagaaggattttattatctcggcaattatttgatctattctaccctaatgattaaccccgactaagaacaaatctaagcctaatcgctcctatgtttcttatcacacgcatgtgaagaggagagattacagacacccactttctaagcttttgctaagcttcgaaagctttacacgtatggcaatattctagtgtggttaggcggctcaatgcctactcatagaatatttatgctattctcgctaaccctaatccctaggatctccgagaatcaatgagcgggatctttcttgaatcgtcaagcctatttcttttccttgttcgagatcctccttgatattcaagcctatctctttccttgttcgagatcctccttgatattcaagtttatctctttccttatttgttgaaaaaaatattcatcaaatcttctcaactgactttcgtctttaattaccatgccaagtcagcaaagcttcttggcacgtcacatcaaccactctagctccgtcatgtcagctcatgcatctatgtcagcaacttagacgtttaatgtaaattttgttggaaactgaagcctcttgttacaaagaacaaaacaagtgtttacttgttgttctgtttcttatgaaatacacagagcaaaagagaaactgacttttattgaatggagaacttgttcgtttcatcacgatacaaaaggtttaaatagaaaacaaatagacacaacaagtgaagagttttgtctctttctctctaagataaacggcacaacctaatctaaaagtcacgactctaacaaacaccttttaatacaacataattataacctatagaccaaactcaattataaactaacattcccccttaattgagtttcggtcttactccaagcttcctccttagttcttcgaaccttgccttgtttactccttcttcacttgctagtaaagcacttgtgttcgcctttatccatctcaatggaaaactcttctgcatcatcttcatatccagtatccttcttccttgaggatcgttgatgagacatctgttgtcttcaaataagactctgtatcccttggataccatttgagaaacagtcaacagatttcttgctaaacccggcactagaaacacctctttgatgatcttctctcattggcttgtcatcacttggatatttccttttcctgccgtcattacatgttgaccattccccactttgatcggtacctttacactttgatcaagagtgatgaagtatttaacttccttggtcatatggttagtgcatccgctgtcaactagccatgtctcatcattcacgtttgatgatgtttcttcttcgactgcactgaacagcatgtgatcctcatcatcatttgtttcttctagacttagatccactcgctcggtccttctaagtctgcagttctttgctagatgtcccggtttgttacacacgaaacatcttctctcattgttccccacttgttgcgaaagaacacctttgttcttcttcatccagcaatcactctcattgtgatttttacgttcgcaaacgtcacaccatttcccagcctgcgtttgacgcttgtcttcacgtttgttttctccatagaacgctccttccgttgatcattcgtctcgcatctctacccgcttctcgtgtgctttcaatgtgcctatcaactatgttacggacaacgaagtcagatccttcgtttgcttcatcatagccactatgatgtcaaatcttttcggaagagaaattaggattttttgcactatttgatagtctgatttctcttctccatgaactctcagttgatttcccatctcaatcaacttggtcatgaaagtgttgatattgtcactttctttcatcttcaaattctcatactcccttctaagagattgaagctttatcatcctgacttgtggtgatccttgaaattccaataccaaggctttccaagtgcgcttgatgcaggggcgattctcggaaatatggaatctgagacggcagtttgaagaatttgcaaagcggttagatcctttaaggatgctgcttcacatcgtgtcttttgttgcactgcttcagggctatgatctccttctgcgggtggttttggaactccttcgtcaacaatttcccacagtttctttgtctggaaaattgttttcatcttgatgcgccaaaaaccataattctctttgttgaagattggagtcacaatgtgtgacaccatctccataactctctcgtgtttattaaactctttacttgaaatgtttggcccttgaatcagtagggctctgataccatgttggaaattgaagcctcttgttacaaagaaaaaacaagtgtttacttgttgttctgtttcttatgagatacacaaagcaaaagagaaactgacttttattgaatggagaacttgttcgtttcatcacgatacaaaaagtttaaatagaaaacaaatagacacaataagtaaagagttgtgtctctttctctctaagataaacgacacaacctaatctaaaagtcacgactctaacaaacaccttttaatacaacataattataacttatagaccaaactcaattataaactaacagatttgatgcagcttcctaatttccaacagctccatgatgtttatcagctcgttgttgtcagaatctgcatcttcataaatttataataaatataaatatataatgtataactgtatgtagaaccgtatattgtggatccgtgaattggtggaagagttgctattgcggaatcgtccaagaagctattcataaaatcaatcacgaaagaaaaagaatttgttttgctattatctctatattgtgggtagccatttttggaatctttgaaaaatcaaccaatacgcattttctctcagtttggaagttaacaaagacgcgttttttcaaggttttgtggggactggggaccaaaagttcttaatatgggttaacgtctcacaggtaataccaaacatttcatttatttgtgtttttctatcactatcttttccacattttagtattttactattacatataatttttgactaagaagttgattgtgaatgagtctgtacatcttcctagaaatgattataagtatattatttaatttgttactccctctattgtcatttatttgtagtttaagtttcaaggttttggcacaaatgaaattatttcgttttttattattatcttttaatatagttaattatctatttaaaaacaattcaacaaattgaaaaaaaagttttgtagaatttctaagagtcaaaaataataaaatttccattaaaaattgaaaacaacaaataaaatgaaactatttgtttttgcttaaacaacacttcttaaaaaacagaggaaccattgtaaaatagatttttcccaacacaaatcgaaaacgtaacttatataatctctatatttttagtaattcagcgacttatcatttcattgttaactatttttcactgacatgtttctcgttatataaaagtctctgtttatgtcaatggtcgtatgtgaatggttcatgtattatgcaaaactgtttatgataatattgccggggaaaaaaaactgccatgtttcatttttttactagttattacatttgattattatcaaccaacttaccattgaaagataacttgtgattattatttacagtaacgaagaaaattaggccatattttgttttctttttggaacctttcaaatgtcaaagctggtaggctatataaatataaacaaagctcaaaaatttattactatacttaacagtaacgaagtagactacttcaagtagtacatcaaaaaaaaaaaaaccaaagaagttgttatctttaacaaacaaaaatgggaaaatgctctgctttgatgatattcctctcttcttctcttctacttgtccttcaaacactccatgttgttaacgcggtcaaatgtttcggaaactccttcaacggtaacagcagcaccttcgctcagaatcgccagaaactgttccctactcttgctgacaaagtcatcatcaacgacggattctacaacgcttcactcggccaagatcccgacaaagtttacgctcttgtcagctgcgcaagaggctacgaccaagacgcttgttacaattgtgtccaatcattgactcagaacacactaacagattgtcgaagccgtagggattcgttcatatggggaggcaatgacgatgtaacttgtcttgtacgttcctcaaaccagtctacttttgggagcgtccagcttaaacctcctgttgtatggccaagtccagatactatagagtcatctaaaaacataacccttttcaaacaacagtgggaagaaatggttaatcggaccctagaggctgccacgaaagctgaaggttcctcggtgcttaagtactataaggccgaaaaagcgggtttcaccgagtttccagatgtttacatgctgatgcaatgcacacccgacttaagttcacgagattgcaagcaatgtttgggagattgcgtgatgtactttagaaaagactatatgggaagaaaaggaggcatggctagtcttccaagctgttatttcaggtgggatctatattctttccataatgcttttgataatgtaacaagagttcctgcgcctcctcctcgacctcatgctcaggaaaaggagagctgcataacagtaaaaaaaggtaacacaaattattttagctttcatttagagctcaaaagagccaattttgaggaatattgtttacataagtgacatgaagcggtttggtatgaacttttcgtgccaaattgttattatgattaagaggttaattcttagacaaagggttggtaatttgcagggaaaagcattgggtatggcggaattatcgcaatagttgtggtgtttactttcattaatcttttggtgtttattggctttatcaaagtctatgcacggaggggaaaattaaataatggtaagtgtaacttgcttcaatcaagcttatgatgtagagagtaaggcttatggattttttgtttttttagttggtagtgcagaatactctgattctgatggtcaattcatgttacggtttgatcttggtatgatcgtaatggcaactgatgacttctcctctgaaaatacgcttggccaaggtggatttggtacggtttataaggtaataataaactttttccttaatgatgagttcttgatcaacattggtcttttatgagtaaatagatatcttgagaatgggtttcaggggacattcccaaacgggcaagaggtagcggtcaagagactaacaaaaggatcaggacaaggagatatggagtttaagaatgaggtttcactcttgacaagactccaacataagaatcttgttaagcttcttgggttctgtaatgagggagatgaagagattcttgtctacgagtttgtccccaactcaagtcttgatcactttatctttggtgagccttcgaaagacagctgccaagttggatagatttagaacttttagcaaactaaatgtttctttgaactctgcagatgaagataagcgttctcttcttacatgggaggtgaggttcagaattatagaaggcattgctcgaggtcttctctatctccatgaagattctcagctgaagattattcacagagacttgaaggcaagcaacatacttttagacgctgagatgaaccctaaagttgcggatttcgggactgcgaggttgttcgactccgacgagactcgagctgaaacaaaaagaatagctggaacccggtaagaaatatatcaatcaaatttgatgacacatttcaaatgctctgttttgaaaacagagtccatgaattaatgctattggtttgcatatatgcagtggatatatggctcctgagtacttgaatcatggacaaatctcagctaaatctgacgtttatagcttcggtgttatgcttctagagatgattagtggtgaaagaaacaatagcttcgaaggagaaggacttgcagcttttgtaagcttcttcacaattttttttttttttgaatagctggaggttttgggccgaagcccgtaatccccccaggaccgaaaccacagcatgtaatattagtttcgttccaagcgttactcgaaccggcgaccttaagcttcttcacatatcagtttttgtttttctatcttcaaaactttatcccgaaagtaagaacttatgtttttggtgtaggcatggaaaagatgggttgaaggaaagcctgagattataattgatccgttcttaatagagaatccaagaaatgagatcatcaagttgatccaaattggtttgttgtgtgttcaagagaattcaacaaagagaccaaccatgagctctgtaataatttggcttggcagtgagactatcatcattcctttacctaaagctcctgctttcacttggattcgatcccaatctgaaagtggtgcaatgtcattgagcgacgatgtcttcacggagttgagttgtcgttgagatatacatcagttaatcaaaatatttgaatattttttaatatcaaactccattaatctgcaaatttgttagtaaatcgcataatcttggattcgaactttagacttctttggtgtaaaggctttattaactcttgattaacctttgggccaagagggttttcgcgtccagttttgttttaaaactattttcaccaatattaattaatattatagaggtaagaaataaataaacttaaaatgttgcacatataaatatgatttaataataactgaaatatcttataaatctcaattaggagaagataataaatcttttcttaacaatcagataaaatatcagttcttaatttcagttactttattctgatatatcttactctaaatagaattataaagaagtttttttctttctttttgttaaaacaaatattataatataacaattgtttttaagtattttcacattaattcccaaaacaaaatatatcacgtacctaatatagttctccctaatatatttcttctaaatgaccaataaatttcaaagttgattttaattttacatgaccaatagagtgaggataaaaaatcttttctgaccaatcaaattcctgattttagccactctacttgattcttatcttagtatgaacatatatataaggaagttttttttttgttgttgaaaatataatataaggaattttccttgatattttcagaattcccaaataagagtatatctatgtacctaatatagttctttctaatatatttttctaaatatatacctaaacaaaatctagtgcagccgaatattgtcaaagactcaaagttgctttcaattttgtaatagaaatattttatataaataatatttcccccaaatagcatggatgcaaaatcacataatagcattataaatagaataccataaaatattgttcagtttttatttttcttatcccattatatatatgagataagcattacataaaatagagagcaagcataaaaaaaaagatagaaaccaaactcctcttagtacttgcgaccaagagtgagttcaagggacaattcttcttcaccagttgcaccaccaacaacaacaacatcattgcctctgttttcatttagtccaacctgccataaaatatacattaatctagtttcataggcatcaaatcaacatgttgataatcatgcatgatatttagtaatataaaaattacaaaaggaaaaaaaaattacctttgaagattgatctagagacttgttacttgatcccaaaactggggttatcttctcagtattatccagttgtagcctagaagaaattgaaaaagaagattgttttactcacgaaaccaaaaaacgattaattatatgaaaaactaagttgatacatgaacataagaacctttgttgattttggataaattgggtagcacgttcatagatttgaagatattgctgagattgcctctgtgtcatctcccgcatcatttttatttctgtcaaaggattggaggtgcataattatgaataaacggatataaacttcactatgcattatgttgaaaatctaaatattccttatgcaaagttacacgacaaacatatttattaaaatttaatttaaaatgtaagatagttattttacctttactagattcttctttctttttgttcctatacatctattgaaagtaaaaaaataaaaaataattcagtacttgccatcttagatagtatatgttttgtagataagttttatacactatataattataaagacctggagatgacttttgacatgtgatattgtgaggtctctcacacccataagactcaaaattctcttaggagttgcacctgcaaatttaaggagaacaataatatcgactatagtgaattaatctaaaaaaggatataaagagaacattaatcatggaaaggtcttaaaaggaaaaaaaagattgttgatttcaatgacaatttttttttctttgaatttatttcagaagaatcgtcttgttatagttttgcgatatggaaagaaaaccgcttactctcttcgccaccgagtttttcaataacttgaataaaacggatatcaagatcgtcggtccagtgcattcgcggattgtctgacctaatgtaagatctaaccatcggatcttgcattttttttatctctcgtaaaatttttagtttgataatattgagagtgtgcaccaattatttatagaaaaattatatggaaaagaatattaatatttatttcccaaaaataacctaagaaacaaatatttagagctagtaaatgttattgttgtcacgtgtaatttatcatttaaatatttctgtaaaaaggatatataaaatcgcattttaagaaatatttattttcttgacagctccatgtgttcttttctctaataataatatttataataaattttaaaataaaaagttaatactactagatttgtttcaattttattctaagaataattctatctatgcttgatatttatataaataaacaaagaacaatccaaaactaatttatggcataaagccttaatgcttattattatcattttgaaccaaatgatataaataacttaaaaacatcccaaacaaatatgaattatatatgtcattatattaatataaattagttgtagacgatagaaataatatattcttattagattaaaaaattctgaaatttagtttttataaatgattatgctatataagtagttttcatttattttttttctgatttctcaagtaattactcgatacaagttagtataaacgcagtcgatccagaaggaccaaagatactctaaggatttccaagactcatttttagctagcgcgaaaaggttgtttgtttggattttcagattgtaaataaaaattgcaaataatttaaagatcaacttatgaattaaagacattgtgctatagggtatttcagatatcaatgaataatgaaaacattagacaaggaattcaaccatgaagcatcgggcttgaacatgaacacaaatttagactaagtctctcttaagacattaatcattatatttaactatgcaactactaaactcttgtttttaattttctagtcaaatccgtattagaattaggttcattcggttcacaatgcattctaacataaactctcattggttagaaatacattgctcaatttacatttgttcagacagtctatcaaacatttttgatgcatagaaaaatctagaatctaaaacagagtgttcgatctttttctagcattaagaacaagtgaatcaaagaacttaaggattaaaaactcaagaaaacaatcaaaccatcaattcattgaatctcctacttagaaccctaaaacccaactaaaggactatttactcatagcaaaaggaataacacaaagagatgaagaagacataatagattactaaacaataaaagaaaagggattagaaatattttccaaagtatcaaagaggatgaatctctagaatcccaataggggaataaaaaattaggtctcaaaaaccctgctctataaaatgaaaaataaaactgcttaaggaagaccgaaactgggcatcaggtagttgcctgatgagatttgcgtgatgtcattccccaaaagatttttaggcaagaaaacgaaactgggcacaagtagttgcatgataaaatttgcatgatgtcattttccaacagagttgtcttgaatcaccaatttttcatttcttctccgaactcttggttttgatacaaaaacgcctccaactccatcattgcttcctaaaacctgtaaagactcaatcaaggactggaagactctaaaaacatactttgactctataaaataatgatttaagaaagaaaacaaagactcaaaaccgataaaaataaaacatatcattttcatcgaaattataagtagttttcatatacagggaaatctttaaaaattaatacttcaatttatagtgattattgatttaaaaaataatacttcaattaatttatagagacggaggttattttaattacttcataaattaataatcactatacaataatacttcataatttataggattttcaaaaatattattatcttatcttctcattgaattatgttaaacattgcaatcttttgctaacatttatgcatcccatgaagggtggcatacattttagcaaaagattgcaatgtgaaggtagttggcatacattttagcaagagattgtaatgtgaaggtagtttgagctcaagtatatatatgtcatgtcattcatgtcttcactagattggactttaatggactcgtttcttaacagaaaaagtagacatacgatgtgtctgcgttacaaacatgtccatgaagacagttttctgatgatgtagacccacaagagcaacattccttataagcccgtgatcgggcatgaaaactgaccccaacttcaaacctaatatctctaacaggtttgattattggttgctcaagaggctgctcatcttcaaccataaaaaggtatcaacatactcaccataaacctcttctagagtagggtaatacttcttatcattaggaagaacaatttggttctcaatctcaacataacatcattgattgtaataatccaaccatccatgtttgccatgtttattatcttcttcatcctctctctctctctctctctctctctctctctctctctctctctctctctctctctctctctctctctctctctctctctctctctctctctctctctctctctctctctctcaagtccgatatagttaccaaacaagctatagtcctctttatgtaaaccatgccgttgaatagctttatctgaaacatcactacaagaatattgggttttaatagcactataatatagcgtttatgtcagtaatgctattgttatgtaaccactttattttaaatagcgtttatgtataatgaaacgctatgatataataaactataagtcacgtgtttattaatcaggttttcaatagcagattttaataaaaacgctatgttaaagttaggcggtaacctaaaaaattagatcccgtacttagaaaaatttcattctctttggcatcgaaaaatccccaaaatttgcagacctaattttcttccctctctatcaatttctctcgatttgtttccctctctatcaattttgctcgatttctctcgatttcttccctctcagtattctcttccaaccaaatctagctcgctcagtcacattaatctcatctccggtttgatttaggaagacgagaagacaatatctagctctctcagtctcatctccggttcaatctcagtcttgttcttcacgttcttcatctccggctcgatttaggtatttcactcttatcctctgttgttatcagatctcctactctattcttgtacatgtttaactggaattctctttgataattgtatacaccgtcggagtgtttgtaccatggataaagcttgggtctggttaccaaggtaagacgttgctctcgttctctttactcttctttaatctcgttatcggtctgaaaaactttaagttttctaaaagaattttgattttgattgcttacaggaattgccttgagtatgaggaaggagcgactaagtttgtatttgattcagcaagctgtttgggtaatgtatcagatatgctttgcccttgtgttgattaccgcaatatggttcatcagtcaaatgagacagtgttagagcatctagtgattagagggatggatattaagtataagagaagtaagtgttggagtaaacatggggatagaagtaacaatacagcagaacagacgtctgagtatgaggcttatgatttgtttaggacagcttttatggcaagtgaggagaagctaccatcgcagcaacataatgttgaagagtcagaaacaatggacagtaaagaagaagttgagttcagaaagaagttagaggatgtagaaactccattgtattcgacttgtctgaactacacaaaggttagcgcaatcatgggactttataggataaaggtcaagaatggtatgtcagagaatttttttgatcagcttctgacacttgttcatgatatgttaccaggaggaaatgtgctgcctaagtctacaaatgagatgaagagatttctgaagatttttggttttggttatggttccattcatgtctgcatgagtcatgagtgcatctgtctggagacctactccaaccattttcacacttggtgaagctgtaggaagtaaaattgcatggcccgctgacaagataatattggatgacgatattgacttgacacaagataatgtgggatcagaggtaaataagaactccatctatgttcctcttgcagtcatattgattagattactaatatagactgtggattatttgcatgactcattagcaagcggatgctaccattggaagagttcacatctatcaatattggaatggagatgatgaattgattgctgaaggtttgttgttgtcaactgatggtgaagaattggtagacggtagacctctgggacatggtgctgcagccattaagatcgtgttggtggttaaacctgaagcttatttatggagaccaaatccgccaatctcattgatgagggatgcactaaatgagaccatcgcatggcctattgataggttacacctacttgatctacctgcaacagatgaatcaaccaaaaaaacacatcgagtaagtttttaattaagtagcttcatgtttagattagaaaatgggaatattagagtagcttcaggtttagattagaaaatgggaatattagagtagcttccttgatgtgttgatgttgctgtgatgttgatgttgctgtgatgttaatctgatgaattgttttaaattttttgttgttagagtactagtactcccagcactggtaatagcagcaaaggttcgaaacagaagtgctttctattagatattgataactctgggaagaaagttgcagtaggtcgtgtgtcttcaattgatccagcagagaaggtccatcacgtccctttaggttccaacgctagcaaggtctgggtagaggtttccaaggttgatggtgcacgagtgtggaggccaaattccgaagttacattcatagctgatgcagtaggaaccacagttggttggcctaatgacaagattgtatttgtgtgacaatatttgtggaacaagattggtcttaagtacaatgaacttcaaatcttggtgtgtattgtgtaaactaatgttgtatgtgacaaattcataagtattttcattcaatataatcgtctttctatatatcgatttctctaatttgaatcaaattttaaatttcgtttagaatcaattatagcaagaaacaaaattaaaccattacattttttgaaaagctatattaaaaataaccataacaatataaaaatgttgttaatagtctaattataacaatatgattacgctattaaataatatttaaaccgacgaaatcgctattgtatattgtaatataatagcagacattataaacgctatctaaagtgtctgacctacgatgacgagcacagaaatagcgcttaacgaaacgctattaaatagttagatagcgttattcggatgctaccaaaagccaatattcttgtagtgcatgttggcccctaaagctatttgacaagtttaaagaaggagataattgtttagggtttcttatcttgtggttttactatttgtcttttatatttataaataaacttggagggcttcaaccatctaagctgctccttaactccattttgtggtcagtaaactatctattatatgtttttcttttgacgaatttctttgcaaaaccaaatcttggattaaaacatgagcaattttgagaaaatatgggcataaactttctcaaatattaaaagaggagacaatgaatcgcattggaagtaagaacttggccccttgaagaaacgacatacattaacaacacaacagccagaagatcaaaacctggaacaaaatcatgaacaaaaagtccaagatggaatttttgcgtagtaatcatcaaagtgtctaagagaacaccatgcaaagctagaatcgaccgaaaacttaagctaattttgactagatcaaaatcctaggctagaaccatccagaaaccctaggttatcatacaaagatgataatatagattggtttgttgtgtgttcaagtgtatcatacaaagatgccaaccatgagctttgtaatagtttggcttggcaatgagacaaccaccaatctttttctcctgctttcattaggagtctgagaatggtacctaacatacaaattggctatgagttcagttagatgataagtttttttttttgtgcactcagttagctaattcaaatgttatttttaaggtataattgttgtatgtgtcatctaaaataaacttcaaatgttgcacaaagtaatatgatttaaattttaaaataaccaaaatttcttataaaccaagataaagaggataagaaatcttttctgcccaatcagattcttgattttgatttaggttacttgattcctatcttactctgacataaatataaggaagttttttttcttttttgttaaaaagtgtaaagtaagaaattttctaagcattttcacattaattcccaaaaagaaatatatctgtgtaccttatatagttcttttgttgatacctaatatagttcttcctaatttgttttttatatttcttctaaatatatacctaagcaaccaaatatttttaaatttgatttcaattttggcataccaaacaaagtgtgttctactacatataaaaacctctttaggagatgtatttttcctgatctcatttatttgattcttatatatcttactctaaacagaaatataaacaagtatgttttctttttgttaaaaaaatactataaatgtataaggagattttctgagtattttcacattaattaccaaagagaaatatatcacataactaatatagttcttcctaatatatttcttcttaatatatacctaaataaccgaatattttcaaagttgacttcaattcttttcatccaaacaaagcatgttctactaaatctaaataccattttaggtgacttattttgtgcttcaaaagaagcttgttttttattgtttgttccattttgctaccagtatatacttttaatagaattgccaatacccacaaaactttacttacaccattcaaaagctatgttgtttttgagactttctattcataaaaatattgagaacttaaaaacttatttaaatggtatttatcttatggaatataaatattttataaaagtaatctttcacccatatatataatggatggaaaatcacatagtaacatcttataaacgcactaccataatatattgttaggtttttattttttattagcccatcatatatatgggataagcaatacataaaatagagagcaagctaaaaaattagaaaccaagtcctcttcgtaattgtgaccaagagtgagttcaagggataattcttcttcaccagttgtaccaccaccaacaacaacgacatcatgtctctattttcatttagtcccacttgccataaaatatacatctatttcgttcacgttaatgatcacatagtaacatcttataaacatttactagcataatcataatgtaagagatgcaaaggaaaataatacccttgacgattgatagagagacatgcaaagatactttcataggtttgttacttgattccaaaattggggttactttcttagtaatattgttcaggttcttaattttgattcaactttaagtgaccggtttaggtgctgtggttaagtggaattgagtaccggttagatggagccaattgaaacggattggagaaacaaatggaaaccttcttttcacgagagagggtcttctgttatgtttgggacttagtataaaagccctgtaatctcttcttcttcattatccgttttcatacttgtaaaaaaaaaaaaaaaactttgagctctgagactccattgttgagctctgctcttgctctgtaattctcgttctgatttagtgaattgccgaactgatttggccccagacgtagacttgatcatatcgatcttgttgaactgggtaaacaaactcttgtgttgttttctttcgttctctgtttcgatctctttcttgagctgatttgagtttcgattgttgagtgattgagagtttgtgaggatctttgtattgtgaatcgagcataaaacgtaacagattggtatcagagcccaggcttttgggtggttcattcacatcgcatcgatcgatggcgacgacgactagagttgagatcaaagccttcgacggcgataacgacttctcgttatggaagatgaggataatggcacaactcggagttcttggattgaaaggaactctaacagactttgctttgacaaagactgagccattaacgaagagtgaggagaagcaagtagcttctggagatgaatcatctgattcaagtgctgtgttgactaaagaagttccagatcctattaagattgaaaaatcagaacaagcgatcaacattatcatcaatcacataagtgacacagtcttgagaaaagtaaatcactataaaactgcagctacattgtgggaattgttgaatgaattgtatatggagacgtcgttaccaaaccggatctatgcacaattgaaattctactcgtttagaatgatgacttcaaagacgattgatcaaaacgtacgttgatgattttctgaggatagttgcagaattaggaagtcttgatatcaaggttgcaaaagaggttcaagcgattataatcttgaattcgttgcctgttacctctgatgagctgaagcataccttgaagtatggaaataaaactctatctgtgaaggatgtagtttcttctgcaaagtctcttgaaagagaaatggctgagcttaaagaaaacactaaggtggtgaatacagctttatacactgcaaaaagaggcagaccacaaacacgaaatcaaaatggtggtcaaggcaataaccaaggtaagaaccaaggaaaaggcagaagcatgtcgaattctaaatctcgtgtaacctgctagttctgcaagaaggagggacacgtaaagaaggattgttttgctaggaagaagaagttcgaaaatgaagaacaaggtgaggcaggtgtgatcactgagaagctggtgtactcagaggcacttagcatgtataaccaagaagctaaagagaagcgggttattgactctggttgtacctaccatatgacttcaagaatggactggttctcagattttaatgaaaatgagtcaacactaatcttattgggtgatgatcacactgttgaatcaagaggcactggtacagtgaagattaacactcatggtggagccataaggatgctaaagaatgtcacatttgttccaaatctgcgaaggaacttgatctctacagatactttggataagttgggctttaagcatgaaggtggagatggtaagatcaggttttacaaagaaaacaaaacagctctacttggaaacttggttaatggactttatgtccttgatggtcacacagttctgaatgaaagctgtaatgctgaagggccaaaaataagacaagtttatggcattgcagacttggtcacatgagtgtgaataacatgaagattctgactgagaaaggtttgattgaaaagaaggatatcaaagagctggatttctgtgaacattgtgttatggggaagtcaaagaagctgagttttaatgtgggaaagcacattactgaggacctactaggatacctacatgcagatctttggggatctccaaatgttaccccatctctctctggtaagcagtattttcggtctataatagacgataagtctcgaaaggtttggttgatgttcttgaaccaaagatgagacatttgacaagttctgtgagtggaaagagttggtggaaaatcaggtcaataagaagattaaagtgttgagaacagacaacggcttggaattctgcaatctgaagttcgatgagtactgtaaaaagaatggtattgagagacatcgaacttgtacctatacaccacagcaaaatggtgttgcagaaaggatgaatagaactctcatggaaaaggtgagatgtcttcttaatgaatcaggtctagatgaaagattttgggctgaagcagcctcaactgcagcctatttggtaaaccgatcacctgcatctgcagtagaccacaacgttcctgaagagctgtggctgagcaagaaaccaggctagaaacacctaagaaggtttggttctattgcttatgttcatcgagctcaagggaaattaaagcctagagctttaaaaggtgtgtttctgggctatccacaaggagtcaaaggctacaaagtgtggctattggatgaggagaaatgagtcatcagtcggagtgttgtatttgatgaagactcagtttacaagaatctgctacctgaaagtgataaagagcagattgaaggtgaactcggtaaagagactactattactgtcaatgacagtgttaaagaaaaaggagaaagttttgtttcaggtggagctattgaggaaatcagcgacagcagtgactcagaggctgttgctacagaagaagattcacctatacatactgtaaatctcaagaactaccagctagctcgagacagaacccgaaggatcactagaccacctactaagttgtcagactatactcattttgcttatgcgttagtaatggcagaaaaacttggtgaagaggaagaacctcactgctatcatgatgcaagaaatgataaagactgggagaaatggaatggtggtatgtatgaggaaatggactcattgctgaaaaatgaaacctgagatattgttgataggcctaaggatcaacaggtgattagctgcagatggctatacaagataaaaccaggaattcctggtgttgagtcaaagagatacaaggccaggctagttgcaagaggtttcactcagaagaaagggattgactatgaagaggtatttgctccagtggttaaacacatttccattagaattctaatgtctattgtagttgcagatgacatggaactagagcaaatggatgttaaaacggccttcctgcatggagagctagatcaagtgctttatatggagcagcctgaaggatttgaagcagatccaaacaaagatcaagtgtgtttgttaaagaagtccctctatggcttgaaacaagcacctagacagtggaacaagaagttcaatgctttcatgatggatcaaggctttactaggagcctacatgactcgtgtgtatacgtcaaagaggtcagccctgatcagtttgtgtatttactggtttatgtagacgacatgttgatagctggaaagagtatggctgaggttaataaggtcaaagaagggttgagtttaaactttgagatgaaagacatgggtgctgcgagtaggatacttggaattgatattgaaaggaatagagaggaaggaactttgtgcttatctcagtcgaagtacttagagaaggtcattcagcgttttagaatggcagatgcaaaaggtgtgagtactcctattggtgctcattttaaattgtcagcagtcaggaacaatgatgagagtgttgacacagaagtttgtccttactccagtgcagtaggaagtgttatgtatgcaatgatagggactaggccagatgtagtttatgctcttggtttggtgagcaggttcatgagtaaccctggtcatatacattgggaatcagtcaagtggttactaaggtatcttaaaaggtcaatggatctgaaggtggtttatacaaaaggaaaagacatgaagatacatggatctgtgattcagattatgttgcggatctcgataagagaaggtccataagtggatatgttttcacggttggtgggaacaatgtgagctagaagtcaagcttgcagcatgtggtaacattgtccacaacagaagctgagtttattgcacttactgaggcagtaaaagaagccatttggattcgaggtctcttggatgatatgggattgaagccagaagcagcttcagtgtgatgtgactctcagtcagcgagttgtatgtcgaagaacaatgcttttcatgaaagaacaaagcacattgatgtgaagttctatttcataagagacataatcgaagctggtgaagtagaggttgagaaaatccacacttcaaggaaccctgtagatatgcttactaaagtcatacctttgcacaagtttgaagcagctttagatcatctaaagcttctcaggtgatacttggtgatatgtttgccgaaggttaagttcaagtagtgcaattcactggagaatgatgaaagattgaatcaaggtggagtgttgttgttcttaattctgattcaactttaagtgaccggtttaggtgatgtggttaagtggaattgagtactggttagatggagccaattgaaccggattggagaagcaaatggaaaccttctttttgcgagagagggtcttctgttatgtttgggacttagtataaaagccctgtaatctcttcttcttcattatccgttttcatacttgtaaaaaaaaaaagaaactttgagctctgagactccattgttgagctctgctcttgctctgtaattctcgttctgatttagtggattgccgaactgattcggccccagacgtagacttgatcatatcgatcttgttgaactgggtaaacaaactcttgtgttgttttctttcgttctctgtttcgatctctttcttgagctgatttgagtttcgattgttgagtgattgagaatttgtgaggatctttgtgttgtcattcgagcataaaacgtaacaaatatcaaattgtaacctagaataaattaaaataagatagttactttactaaacaacaacaaaaaatgacactacaaaagccaaagttaatacttaatacatgaacagaagaacctttagtgatattgcaaaactttggtagcatcacgagcacgttcgttaatctgaaggtattgttgagattgcctcctctccatttgtgtatcattctcctttctgcataataaagttatggataaaataagatatatgccctaaagaccctatgtgttgtgtttaacatcattatattgtcctttgcaaagttacaagacaaacatatctactaagaggcgatttcggagtaccctcctcctcaggcggtccctactagtcttcctcctaatcggaatgtttgtcagtttgatgcatcttggcaccaagaggacaccttgagtggacatggttgggttctagtagaccaagacaatgtcctgtatttgggtcttaagagtgcgcggaagagcctatcaccactacacgctgaagtagattccttgttatgggcgatggaaagcatgatctcgataggtgtcacagattgctccttcgcatctgacagtgctgaccttatttctcttcttgaaaaaccttcggagtggcctacttttgttgctgagatggcgacttttggttcttttgtctgttttttcccttcttttagtattaagttcttttctcgtatttacaatgtgcgggccgattgtcttgcaaaaaaagcacgagcccgtaatagtttttttctcatgtaagcaagtcggttcctgattggctctctctagaagatagtctctttccgactacttaataaaaatggtgtttcgacgaaaaaaaaaaaaaaaaagacaaacatatctactaattttaaaatgaaagcgtaagtagttatttaccttgtatagaatctgcttccttcttatacatttattgaaaggaaacacatatatttgattcagtacacaccatcgtgtatgtatggctagcttacaagagcaaccccaatggtaagggacccttagagcatccacaatggtgagagccctcctatgggctctctcacattgtttagtataaattgtagaaatttataagaagagagcttatgttttttgaaaaaaataaatatagtccaatggtagtatctctcaagtgaggttctttaaaaaagaaaatttgaattgtagaaaaagaagaacaagaccaattatttggattgtattgtgcttttttggtgattgattgtttcacatagaaagcagaggacaattgtgagttttggtgatcgtatgttttgaggaacttgaagttggttttgagttatatatagcaacatggacacatggtgtatgaaagtattacatggcaagcaagacacattgtcattggtagagtaatcaaaagacatgattgctttggtttccatatattaagagctgagagttacatatcacagtactatcactatcaacatgaggattggtaactctagagctacttggatcatattctgctagaccagatttagattcagtcacaataacgtcttaccacttaagctcctccaaccaccttccttctcatgtataccttcgtgattcttcaagttgtttgttcctgaaatcgcataaccttttttaggacaatgcaaagaaaaggaatgagggaaaagtgatattactagttctctcatagttatccaatctaatagaagtgataggaataagaaaacaaaactttgcagctcctataccagttatgcctttgtttcaaggcctccactattattggctttcactgcataaaacaggtaatcaaatataacaatccacatgaaaccagaacttgtaagttacctcagtcaccaacaatcaatactcgaacttagccacatataggagctaagatctgctccttattaaacacgtaatttaacagtttgattcatcatctcattatcaacaagcacaacatcacccacctacagagatcttaatataagctaagatgtaaagtaaacacatttccagatgaaacaaatttcaaggtaagagagtacccggaaaatgtctttgagcagaaatttctcagattctccagatacatgattcatcattagacagacttcaaaactccatccaagtttgctacttccttgatgcattgaattggaaactctatggaaaacttaactgaaacttaattagaaaagagattcaccacaagcgaaatttactagaacagaaatgcattgaagagacaagtgtcaataattcaatatcctgcgtaatggagccaaatgtgtcaagttcttatcttgaagtgcagagtttgttaaatatcagaacatatatcgaagttcgtatatccaaattccaaacccaatcccaaaaatcagagtgggtatatgataagaaaggtacaaatcgaagaaagcttaccatagtaaagaaattagagaaacgttgaaccaaagtgagagatttagtgaagcgttgctgaagcatcactaagattgtgagcaggatcattggagatgatgagaacgaagaagcgaacattggcgcgacaaattgtgagagatacgcgaaagattcgcaagagagagaggaggaagagaacaaacgtgtgttttttttgggttaaaattatcagccaataaaagcttgacacgtatgcggctctctctcgtgctcaaaactctctggagagaggcagctctcttgtttattatgagtttagatttaatttttgtaaaattaattcaagagaacctttaaaaattagaagagaactccccattggagttggccttagggtctcttcatattttttttaatcataaattttgaaattttatagtttaaggaattgtgttggtctcttaatgttttgttcgtctaatggtaggtctttaagcggggtttttaaaaaacaaaaatattattgttaaattaaaattacacatattttttttcataaaatttaataattaatctaaatacttaaattttaaacatacatgatataaatattgaaaaccggaataacgatagttgttagcttgatttctgccaaatttgtgcagtataatttaacacataaactaattatgaaaaagtaatagtgaaattattaagaaatgattacttaaagtttgagtttttcatttaaaattttaaataattatcatttctacaatcattagtttaactgttttaattaacagttaatcttgaaaaactaatttaatttttaaattaatcttgaaaaaaaaagtaaaaaataatggaagaatagcaccttgttggatttggtagtagagcaggcccaactaacaatttctttgttttatttcaacaaccaataacaagtcgctacgtcaggatcccttaacattgaaaaatcccttccttaaagaaccgaccctgatcatttttgcaattttcttttatttttgggctttttggaaaggactatcacctttaaagccccaaaagaaacctgctctaatgtgtataaattctaaagatcaagagatgacttttcacttgtgatactgtgaggtctctcacgcccatatacctctcaaatttttcttcggaattgcacttgcaaatttaaggagaacaataacctcgtctatagtgaatctaaaaatgatagaaaagagaaattttgatgattgcaaggggaggtatcttaaaaggaaaacaaaaaagaagaagagattttgttgatttcaatggcaaaatttttatatttctctggatttatttcagaagaatcgtccttagttttagttttgcgatatgaaaaaaaatcgtttactccttttgccgccaaagtattcaacaacttgaacaaaacggcagctaagatcgtctgtccatcgcctacgcgacatctttgacgtaatgtaaggtgtaagtctctaatcgcttttttctctggtgaaactcttaatttgataatattctaaaatatgtgccaattatttatagaaaatgtctttaaaaatattaataattaattaatgctagtaaatgttttgttgtcactatttctctaaaaagaaatataaaattatacatttgtataattaactatttttaacaactccaagttgtcttttattaaataatagtatgaatgataaaatacaaacataaaaatagtactaccagatttctcttctttttattctaaaaaagaaatctatatatgatgaatgtttatataaataattaagaattaaccaaaaataatttatgacctatatataattacctatatataatgtatactgaaattaaatgaaacttttatacgagtgtttgtagtatatatatagtttgatttaaacacaaaatgagctatagtcatttgagtttaatcacaaaaaaattgtagcaagagagatcttgtacattacttacattaatacatatattttagattatttttaaaacactaagagaatcacttcttttggaaatttacatattatttattaatttaacatatagaaatatttgtttgttgttattatttattatattgattactgtataacaacctttaaaattttctccttatgtaaatttcatttaggagaattttctttgagacaggtaatgttaattaatacgtggacctacatctaaatttgctgccttatatataatacatattttataaaatttatatttgtttcctaagaaaagttctttaccaaaaaaaaaaaaagatgtttagattagagaaaagttcattcgaaaaatgtatgggtgtcaaataaaattaggtgttgttcgttaagcttctaaatgttgttgttggttaaattacaattaagcacatgtgttgggtaaagcaactcgattcattaggggaatgcatctaaaaaaacatacatttttggatgtgttttgaaggagagttcatctgcagtacaccgactaaattttttttttttaacacacaccgactaaatttataaatgtttaaaataatctcatttacaatcataacttaaataatcaccaaaaaaaaataaaaaaatagaaaaaaaagtaataaatcataacttaaatattagttttgttttaaaaaaaacaaagcatatcaatttctatagtcatgacccatattttatgtgaaataactagatttactctctctagttatacctaactagaatgacttacatcttttgtaaaaagagctttcaatcttttttatttgtattaacaaaattaccgttttgattttttttttaataaaataactatcttttatatttcataataataataaaaacacattaaaaacttttgtaattcctcttttttattgtcttcttctccgtcgagcaaaatctaaaacccaaagagagcaaaatatctagagtcgtcttcttggtaagtctctgtctttgtttcgtcttctccggcgaatctgcatgagttcttttcttttcctttgcctctttggcttctcttgagagacttttagattttctttgtcttattctccttgacgccaccaactagtttgtcttcttagggcatctccaaccctactctattttagagtaaaaatgcaaaaatcttctccaaccccactctataattgactcaaaaatagagatttctgcagattgactctatatatagagcaactctattctctactctatttttgagttcaactttttatttatactttagtccctcaaatttaaactttttatttaatacatataattattttacaaacaacaattacaacacataattttataaacttaacaaaatattaagtattaaatttaaaataattttataaacttaacaagaaacaagtacctaatttaaaattaaaaacataaaaaaaccaaaacataaaattaactagtgatttaatagtctggtaaattgcttgtggatctgccaagatagtcaaaatattgtccaaatgaagtagatggaagaggagtttcttgatcttgatcttttcgttggacacgtcgtttttgtaaaatccgtccttgttcactctcaaagtatgctcgaatatgtgagttttgaaaggaattcaaatcacaaaataaaatttgtaatgttttattattgttatatgatgtaatggttttttaataaataagtagtgtctaatttaaataatatcatattttctggaaatgtttacaaatctataatatatggggtcaaattgtaaattatataattaaaaggtattagtatataaattagaaatagaatatttctaagaatattcttttttagagtagaaaatagagctatacactggagagaaatccatctctaaaatagagttactctattttagaggtggatatagagctatacattgtagatggtcttagccgcctacatgaaacatctgtttatctaggcctaatttctttgttgttcgccgacagatttaggtaagctttacatgattttgctattgtttattttgaaaacctaactaattggcaattcaattttaaatttttagtaacaatcattcaataataaaaatttaatattattttatttttagtattataaaaattacattgtaggttagaaatgaaaaactatgggcttattggtatgtaagattgatagtttaaaagttatggaatagcaaaatcattatatatatatatatatataccttttacaaagtggtaaattaaagtacaataatatatagtttaagtataaatggaagactaagatttactaacaaacaaaagactaatttaattgtattttagaggtaaacttaaatgattatagctagctagtaaaaaaaatattgtctcctttccttcaaaactcttttaccaaacattagagtgggtcttacaccatctccaatggtggtcttttgagaggctccggaaagatgagtcccttatgaaaaacacaaaaataaatcaaaaatgttaatattgttaagggacgccctaagcttagggatttttggagtgggaagagatccatacgtggcgttctctaattggtccatgaagtaaaagaaatcaatttttttctccttttttgttttattttcgtgatttcgtttttttctctttttcgattatttcgatggcgattgtatacggtttgtcgatccgtttgagcatatattggcggaaattaagctaactactaatcgttattccggttttcaatatttatgtcttgtatgtttaaaattttaatatttgtattaattattaaatattataaaataaaagatttacaatttttattctgataataatatttatttttttaagaaacccacttaagaattttaccattggaccagaaaaaaattaaggaaccaacaaaaactcttaaactttcaattctcaaaatttaaaattaaaatttttgaagaaacccaattaagggactaaccattggggtttctctatccctttcgactaagataaaaaaactaaaccctacttcttccggaaatcgactttccatatagtcatattgatcgttatgactagagagtcaaaaaacccttgagaaaacacaatttaattttgtgtttccaaaggccagcctaatcttgtgtaataatgcaggtatagaacccaggcccgtctcagcggggtggcaaggttggcaaatgaccatggttaataatcagtttcaataattttattaagactaaaaggcccattttttccacacaaaaaaaaagtactaagagattttattctattttcagttttgcgataggtcacataatgaattgagtcgtgattagaaggttcatttctccagtggacggatctctcatcatgcgctcttcggctatccccaataagcaaggtttctaccaaataataaattcaatcgtttggaagatgcgaaatctgaaccaaataatatgatgtacaatgatttaatttaatatgagtaatattcttatattttcacaccatatatatatatatatatatatatatatatatatataacataataccattagtagtcgtttttttgttttttgagttaattgaaagaaaaagaaaaaaaacagcacaaacacaataacttgcaacgatttacactaatttacaagatttatttatttatgtactttttcttattatcttttttggtaagctactttttattattactaggttttaacccgcggtttaccgcggacaatcggtttatttggttcttatactaaatatttgaataaatttgatatcctaaacttataaatataaatttctagtgattagtgaagaatcgtaatatatgatttggatattattgattattgatttcgtgattgaatatagtgtttttagggatgaaatgtgatatattttgatttcaaaaacgacatagattccttatttttgttgaacggtttatattgaagggaaataattttattgaacggtttagattgaataggatcataaaagtttaggaaattgttaagaccaaattacccataatgattttgaatagcaaagaacaaaatccaaaattgaaatcaaaattgacgacaaattagacaaaatttcaatttgtactttccttttaataataaagggattattgatacatgcatctacaacatacttccaacggtttctacaaaaaaaaaaaaatcaaaatcaaaacatgttatgctttgagaccaagagtgagctcaagggacaattcttcttcactttttgaaacttttattgagtttagtgacaaagtaacctcatcatcattagcatcctcatcatcatgttcatcaacaacattaccatcatcttcaatagcaacaacagcttcaccattttcatcatcatctctcgttttattttgtggagcctgttatttataagcagtataatataagagtatttctaaatttacatgtatatattcggaaatcagatgaacacatagatgacttgtacacatggtaaatagttaaataaatgcatatgaaaaaaaggataattactctggatgtttcatagagagacttgcaggtaaagtagtcacttggtacttccttagtttcattacttgattgtccaaatgttataattttttcatatattcccgcttcttgcctacaagaaacttttattaagaaaatatatagctctctgcttcacgttaaaacctatatatatatcaactaaaatatttttattaataactacacgaacctttgttgattttggaaaaagttggcattgccctgaagacgttggtagttatgaaggtaatgttgaaattgccaccaagttacttgtcctgtcactctaacacttctctttgctaatatctcttctgtcaaagattgaatgtgtttctatattatatacatatatgtataaatcagtttatatggtcctatatacacatgtacaatacatacatatttatataatttactttaagatgtaatgatcatatttatcaaccttgcatggattcttcaagcttcatgcccctatacatctgttggaagttgaaagatatatggttcaatattcaaaccagaacttataaaatatgatactattcatatatacacatatataatgatatgtataaagacatatgcttgtataagtatatggatgtatatagatattaaatgttaggacctggagatgactcttcacatgtgatattgtgagtcctctcacatccattaactgtaaaaccattttaggagttgctcctgcaattttagggattgtaaaccgaattcatttatcttgaacttgaatgaattcaagattggtaaaaattatataacttcacaagaacagaagttttataattgataaagtaatcttcaaaagttgttctatatataatgacagaaattgtgaatgatttttgaaacatttaagagaaattaaatcataattatagttttaggagaagagaaaggaaaccacttactattttctccacctagttgttcaacagcttgaacaaaagagttatgaagatcagagttccaccgcaaccgcggcacttttgatctaacataagatctaacgattgggttcttcatctgttttatatcttactgaaactcgcgattcgatgaaaattcaccaatgtttccggcaagctgttttcaaaatggttgaaggaactcaaagagatgagtttcaccccaaaaaaaaactcaaagggataaagccaattaattgagaattctctgttatcaaataggcaagttttcattgactacttgtcttcatctatcccttgtcttgtttttatatttttcgtttttcctagacaaaaaatagaaatagatatttaaccctttgtccaaaaaaaagaaagatattaaaccctaatgctataagaaatatgtttatgctgcttttttcaaaatcagttcttttttatgtttgtccttgtgacaacttctaagaattatatcagtttgtattatcaaaatttattctttctcaaatacttgcaatacctaattaaagaaaaaaaaacgtctattgaaaatatcacttataaaagagccacaaagtaaattagactaattatgtgtgtgattggttcgtctgtaactgtagattttttgctgtagaatttttgttgtatgtgtgatgactgtagctgtagattttattgctgtagaaattaggcggtaggttttattagtttaatattattacttgaagaaattggttgtaaaaataagattattgttgtatgtatttttaaacaaaaaaaatattattggtaaattgtactatgtgttatataatagaattcagaaatatcaatttaatatatatatatatatatttatatatttatatattaaaaacaatgtaagttatatatatgtcataaagtagtagtatttatatccataaagaattttaatatatatatatatgtatgaaaactgtagtaatgttgttaaagaaaatgagaaaataaagtgaaaagaaaaagaaaaaaaaaaaggtacagactttataaagaccattaaattgtgctttagaaaaacatgaacttacatacaaaataattaaaaaaattatttgggctgttagaaaaaatagaaaaactaaagcatgattgtttcaattttgggactgtaacttttttagtagctttaaaaatttcttacagcccaaccaatcatagcctatatgacctaaagcttcatgtagaatttttttattaaaaatatagaatataaattgattattatgcttttaatatttcagttgtattcaaagaaaggaatgtaatataaacgcaataattttgttttaaaaaacttagttcttggattcgatcattcgaatattaaaaaaaatgttgaacacatgtttaatcaatactacgtcaaatgataattaatctagtgtaatgtatctacttgaatagtattctagtatagtttttgattgttaaatgtgagtcagctgtgagtataaaaaaaatatttttggaatctgaaatttcatatattttataaagtaaaaggatgggctttcaggttttggcataaattctatgtagaggttaccaactattatgatgccgtggcaaaataatggtcaaaagactgaaaataatcacttttaaaatgtggaaaaaacaattgaaattttgcaaatattaaagttaaactgtgataaataaaaagtatgcatgaaccccacttaatggaaaaaggaatttaaaattttagataaaggttttatagtaatacctaatattatatatgtaataactaaaatgtacttattatatatgtaatatctaatattgatggtttttcttacatgtctttacactaagtggtattttataattaatataagcagaaatatattaataattgtatttctgagacaaaagtaattatgcacacagaaacagaaattgtatgtaattctcatttgagatttgtaactgacgctacttccttgatccttctaagtctccccaacaagacaaaagaacctggtaagtcatgaatactaggtcttctttagcggtatatggtgaataataaataatttttcttacaaaagttgaatgtgcactaaatttattctagtaacaaaaacattagtacacatgcatcttaattatttatcatgtatatctatatatgaagaataatatttatcatgtgattttgaaagacaataattatgttaattcaatgatataatatctactaaaacggtaatatgtatattaattattaaaagttgactttttatgggtatatatatatcataattaatttggattttggtaccacatcttactataacactgattagtgacagagtctctcaatcaccagcataactgacgactcttcaccaatcaaaattgtaataaatagtttaatggaatgaacgaacctgaacaaacagaatataaaaatagtatttttttgggcatagaaatagttatatatttgtccccatgcacgaacgttacaccttatagggaagcgtttgcatgctttttagcgaacagactcaaattatttcaattatttattatagtcaaccaaaattctcattccatttctctttgtcacttatactaacgttattatttaaatatcatattcatcaatttctagagaatttgtttcacatgtagaagacgtgaaattaatgtatatacacaatggaatttaaactaaacttgaaacaaaccaaaacatatatgaataatgcatgatgcatctataatagatacgcttttaagcaaccaatagttctgcatctattctagtagtttcgggttcctttgttatgatcatctttatactttaagctaaaaatcttattatgatggtgcatgtccttagattctgaaatattgacaacttaacataatggagttaattagccaactaaaaagtaaccaaacaatatgacgtgcgagcatatttgcatgtatgggaatcctcatgcgatgacacgtaacacgttcaaaacaaaaaagtctccgtttcggattatagaatattcaaagaaacaacaatattaattgtctattgtccgctaacgttatattgttatcctagttatttcatcagcttttttataatgtatttacttgaatttgttttttaaaaattcaatagaagaagtcatttctctcccatattccatatatatatactatttatgtcaaactaaacttcatactattttcagcatttgcttttcatactattttcagtaagtatccgatcttttaaaatttattttattttatcttaatatttactttaagatactacgtacttagtatttgacataaataccaagagaattaagtgtctaacgagaggacaaaaaagaatctgaaactctttagtgaggcgcttacatcatcacgtttttccaacatcgtcgtcgcattttttttattcttcgtaacgcatgtattaattttttcttgtcagtttaccggaaaaaaaaatgaatgactttaatactattttggaaataaagtgtagtagatatatctacttttttaccggaatatatagtctaatagcaattttagttaatcccacgcagtgactaaactgagcatggtttagctattagatcatatacataggtgatatatttagattatcaagaattaaataattttttaatagattaaacaatagacttagatcttagatctgatattgtatcagtgtagtgattcttttgatattaagtatcagatgatgtggatgctcataattcatctgtaaaattcgtttttttctataaaaaaagaaaattcacgatagtctttctactgttttagctaactagctacattttccccgagtaagtaattttgcaggcttttcgtgattatgtgacataattttacagtaattttgtaattctatgtttttataaatttattttttgattttacaaattttttttttaataataccaatatcgatctcaccactaaaaacaatttattatcggttctcaaacaataaataaacattaaaattaatactaaataattgttaatgatattcataagatattaactatgtgcatgataatcacgttacatatcctacgttcctacttctatcatccaaaagtcgcgtcggaaaaaagtgccgtgtctatgtttgtttttcttttgttatttgttggtttttttttggtgtggtttctatagacttttcttttaaaaaagattacagtccaataagaaattgaaatagtaattgggctaacgtgggttagccagagttacagaaagagagaattttcggtgaagctaatcggagtataaaaggaaaaactgtcaagcttttatgcaattttctttcatcgacctattgagttgccggtgattgcaataacaacgaaatttcagagttgtgcttaggactgcctagtcctgaaattttggaaaccaaagttacaaaaaacgtttttgaggttatttcctaagatttagaaaacatgggttctttatattataaaattaaataatttgggcctattttatactgtaaaattttaaaaacaaatcagaggcccaaagtcaatgtttcacgaggctctgtttaggaccggccatgtccgttttgttgatggatactaaattactaatgacctaacgggtttatttagaccgaaatagttttattagctaaaaccagttttcaaatggtttgtgaattgcagcatgcaatgtgtgagcatgatttcccaattgttctatcagtgtcaaagtgatatgggccaatccgaacgttttatccaaatggatcaaaagttttgattttataagattgatgagttaaattagaaattttgaatcataatggactaattatcaagaaaatgacactggtaatacatttcttaacacataatttttcctatttttataaacggaatctgaccataagtataaagattgatagaagttttttataaactattgtgtatatcacatttgtttaggaaatatgttagtaagaccttggtccaattggttcacctgatagtcaaaaatgtgtggtggtccttcaggaagaagtccaatctgaaacattttgggccgtttctagaagaactgattggatcagctgatagaattttattaaacaaaaaaagactatttgtatattgatttcatttttagttcccgagaagagtagaacaaatgctaaaatgtatcatgcggcccaataaccaacaaaactagttgaaagatggatcaatggtttttacatgaagaaagcccaaaccatacactaataatctaatattctattaaaaggacttgctgttattcggcccaatagccaacaaaactaattgaaagatggatcaggggctatggaatacctcagaataaaaagtgttattcattgcagaggaccccttaagcggacatggttgggtccttgttcgacaagacttagtcctccatcttggcctcaagagtgctcgacgaagtttatcaccgcttcatgcggaattttattccttgctatgggcaatagaatgcatgatctctattagcgatacttctggcgcttttgcttccgactgttcagacctgatttctatcattaacaatcaagaagattggccgacattcgcagcggaattgacatcctatcgctccttagtttatttttctccttcttttcgtattagatttcttcctcgtagttctaatactcgagcagattgtttagctaagaaaactcgggctcgtaatagccttttctcccatgtaagcacatcggttcctgaatgattctttctagcggagagtctctttccgataacttaatataaatggtgtttgatgaaaaaaacaaattatcgtaatgatcctaaaaaggagttagaaaatattaatatcttatctacatctagatgataattgtttttatgatccttattagatagtgtttaaatttaattatccactaatttaagcataaactatatattctatcaccgtttaaccaatccatataaatctcttttaaagcttctagaaatgagtctcacacatcagaaattagctattttcttattttattacaagaagagaaaaaaacaaacaaacaaacatgtgttactctcattttgccacatgcattataacgtataggtaggtgaatcacctaacttgtttcagcttatgtaattaactttaccaatatattaatttattgttgataagtatattttaaattaagatatgggaccagaaaaataacaaaagtttctattaaaaaatgcttgcatttaaaagagaagaatgtataaaatctttatcaaaaaaaagagtatatcatagattcataataataaaaaaaatttgataaatgactttttatttaaaaacttaagatattacaagctattactctctttgtttatttttaattgattttctaacaaaacacacatattaagaaaacatattaaaactgattataaatgtatcgatttttgtgatttatatttttctataattctaaatcaatgatatttaattatttgtgttgaactttaaaatttatcattaataactaataattagtgcatagaaaatctaaaaatcaatctttttgaaacaattttttttctaaaaaatcaattaaaaagaacagagagaatattgttttaataataaatgttttattggtaatccaatattaaaataattatatggattaaatttaattataaattttaaaaaatttgaacaaaaaattatttagtgaattgattccaacatgtggaaaaaaggaaacagataattaaaaaaattgattggttctgccaaaattgactaccttcaaatcagagatgattttaaaaataaattcatccaattaaacttgccacatcatcaacttggaccagaatattcgcagtcaccaaaaacaaaccaatgtgtccaggttcaatgaatctggaatcacctggttcttcgtatttttgttatataatgccacgcttctcacaaatcatcttgaattgaaaataaaaaacgaagaatcaaaacaaatcttagagaaaacaaaaatccaatttttgctgtgaagatggcaatgtctgtaaatgtttcttcttcttcgtcttctgggatcataaactctcgtttcggtgtttcattggagccaaaaggtataatttactttcaattctgagaaatttcaatttgttcgtccgaaatctgagaaattgtttgatgggtcaatgtgggttttgattatcacacaagaaatttgattaatttgggtatgaattgttaaaagtttcgatttttttttgtttcttacagtttcgcaaattggttcgttgaggttattggatcgtgttcatgttgctcctgtgtctctgaatctatctgggaagcgatcatcatctgttaaacctttaaacgctgaaccaaagacaaaggattcaatgattcctcttgcggcaacaatggtagcagaaattgcagaggaagttgaagtggttgagattgaggattttgaagagcttgctaagaagttagagaatgcttcacctcttgagattatggacaaagctcttgagaaatacgggaacgatatcgccattgcatttaggtatatatcgatcatgagatttgatataagtttgctttttgatagcttttgaagaaagattgctgatctttgttttggctcttgtgtgtttgcagtggtgcagaagatgttgctcttattgagtacgctcatttgactgggaggccatttagagtatttagtttggatacagggaggttgaatcctgagacgtatcggtttttcgatgcggtggagaagcactatgggattaggattgagtatatgtttcctgattctgttgaggttcaaggtttggttaggagcaagggattgttctctttttatgaggatggtcatcaggagtgttgccgtgttcgaaaggtgagacctttgaggcgtgctctcaagggtttaaaggcttggattactggtcagaggaaagatcaatctccggggacaaggtctgagattccggttgttcaggttgatccggtgtttgaaggtttggatggtggagttggtagtttggtgaagtggaatccggttgcgaatgttgaagggaatgatgtttggaacttcttgaggactatggatgttccggttaacacattgcatgcggcagggtatatatcgattggatgtgagccttgcacgaaagcggttttaccgggtcagcacgagagagaagggagatggtggtgggaagatgctaaagccaaggaatgtggacttcacaaagggaatgtcaaagaaaactccgatgatgctaaagtgaacggggaatcgaaatccgctgttgcagatatctttaagagtgagaatcttgtgactttgagcaggcaggggattgagaatttgatgaagttggagaaccgtaaagagccttggatcgtcgtgctttatgctccgtggtgccccttttgtcaagccatggaagcatcgtatgatgaactggcggataaattggctggaagtgggattaaggttgccaaattcagagcagatggtgaccagaaggagtttgctaagcaggaattgcagctcggtagcttccctaccattctggttttccctaagaactcatcgagaccgatcaagtatccgtctgagaagagagatgttgagtctttgacttcgttcttgaatcttgtccgataagtaaaccacaaaaccagtcgacatttctatgaggaataagaattatatcttcgtctcgttccagattgctagaacagatgaagttggtgtttggagaatcaattcaaagctttggatcacaaagtcagagataagctctgctacaaagcttgagtaattgcagtattgtaagatttataaagttgcgatagtgttgattcttcatgtaaatgtgtggtgtctattaaaatcaagcctctgtttcttctttgcattcatttttgagaatatagagctaagaaactgatgattctccatgaaaatcaagaccatgattcttcgtattcatatcaaattatcatcatatactaagatacatttcaaagctgagatcaggaacactaagatacatttcaaagctgagatcttcaggaacactaagatacatttcaaagctgagatcttcaggaatcagaacgagtaaacaatgctaagcaactgattattctccatacaaatttgtgacactaagagaattcaagctctagtttcttcacattcatataaaattaccatcaaatacaaagacattacctcaaagttgagtctcttaagagtcaaaaccagagtaaacaccactctctctcaactgtctcttctcttcttcaacataattcttgcctctacttgcttgtcccaaatctctcttcttcttctccttctgtgaaaaagagagattcttcctatcattccgcaactgcgcattcgcaatcgtctcgccaccagtaaccgcagcagctcttgtagcttctcgttcttgataactttctttcacttcctctactctttgtttatcctttcccgtagtccatgaccaatcctgtttctccatgggagcaggaatatcagaaagaccaacagctttgtaaccatgctgctgcagagattcatagtcaaaagctttcttatctttcttcgcaaacctcgctgcaaccgtaaaaaaaaaaacaaagttacataaaagagctctcacaaagttaaaacaatgaagcttttctcctacctattggcttcttgctctttctcttcttcttcttctccccaatctctgtattatccacatttgaatcagaagcagaagacgatgatgattcctcagaagagtcttcatcatcatcatcatcatcatcatcccatcgcatcaaacctttcttcatgataacaactctaacacagaattgaattctccattagtccaattttacaatccaaaaagctcaaaactttaagagagaaagtattcaactttcctgatttctcttcaacgatttactaaaatcatttcccaataagacaaactcgtccagcaattcgaaaacaaatcaagtacgaatctttgtaatcgaattgagaaaccctaaattgaattgaaggttcacgaagataccacaaatctaattagagtataacaaaagcttcgtaccttgccggtgtagttgacgaaggtaggagaacgattcgcggcggagacagcaacagtcgcaagatcagaagctatactcggtccatgtccgtagaaccaagagaataatataagtctcgaattttccaattcaatttttggtttgtgcttggtttggtttggtttttttcggttaattcaattttaggatttttcttcggtttagacaatttagctaattagtaaattgatcagacgaacttatcaacgttgatgatgatattactatagaggttattttattcaatggcaatagagaagatgcagaggaaacaaaacaaagaaactagagagtcaaattagaatcttgtttcaaataccatcttcaaatgcaagagatagtaagagagctcaaaaggttaaaccaagaaagtaaaatgacattattaaggtcgacgagaatgtacaatcatcaagaggatcagacgtagaagctgaggtaattagcagtagaaagatccaccaaatgtgttctctccactgtatgtcatgtagagaaacccgtcttcgtctttgtgttcttcgtagattgcagacatcaatgccgctgtttgtaagaaccagaaaagagagaaaccatatttatacatgaaccatagaagtagaagattcacacaaggtttaaaaagtgttaaaatcctttaccagttggtggtaatgtgttcttgacaaagacaaagatggctttttcagctccaagcttgattcttttcctcacaacgtacacaaattggccaatggttagatcagctggtacaagatacctaaagagaagaaacaggtgtcagcaaaaaacatcaaaaccagcaaaaaataatgctatgcaattcaatctctgtatctagaaactgctaaactgtaccaagggacaagttttgaagaatgagaactatagttagactcaaaatttcatcagctagtgattaaaaggattaccggatcatatcacatttccattagactcaaaggagattgaaagctaatttgtgatttgataccattatgatccaacaagagagatagagataatatgtaaaacaaattactcacttcttcttgtcaatgtcaggaacatcactctgtccagctttttccacaatcacctgtattgagttctctaattagaaacttagggtgacactgtaaatcttgttccgtaaagtgagagtttagaaaacatacgggaactctttcagggtatttcgctctgatacgagtagactcagccattctcatctctgaaaccaaaacaaaaccataaaaaatcagtcacaactaacggattatacaaacacatgaacacatcttagtgacatgtaattcaagtaacttccaggaaaattccagaggcacaagtactaaatctttatagattcaacaacaaactaggtctaataacttaatcgtgttaatgtaaatcaatggagaatacaaacagagtaaccaatatcagagatcgagaatcagaaccaacaaactcgtgatcaggctaatcaaaacttgagttcctttaacaaagatcataatcgtaacacaatccaaagcccaaaagatcgaagaaaaccaaagaagtaaacaactatcctttaaacgcttatcgagtgacatcaatcaagcaaaaaccctacagaaattgcaaaaagtaaaaaagaagaaacaaggaaactaacccagaggattagaaagcttgaaggagttcttctccatgatgattcggttagtatctacgatgattaagagaaacaaaactcgaaactttatctgttaggctaaatcgggaaaaaaacccaaaccacaaaaactcgaaattgacaaagtggagaggcgaaatcaaacgtacccaaaagacgaaactagggttcgatgatgatcagaggaaaaaaaaatgaattttgattgtagaagaagaagaggatcaaaaaaatgaaaaaaggagagaatatatataaaggaaacagagaggatggatttagggtttagtgattgttacctgcacggcacccaaacttattacttggattttaattagttacgatgcttatcttacgtcagcgagatgatacgacgtcgttggattgtagtggtcatgagtttgtgaactatttattgggcctttataggtttggatctcgtttgggcttttctgtcatttacatgatcaggactactaggcgtggacaaataaaccaactcgaatataccgaatcaaaatcaaagcaaaactaattaaatcaaagcaaaccaaaaattggaaaatattcgaatggatactaaattctataaatgaaagaaccgaaagaaccaaaactaaatggatactaaatattatttatttttagactacataattaaaaataattgaaaagatatataaaatagtaaaaatactcgaaaaaataaccgaaaatattcaaaaatgatcgaaaatatccaaaataaccgaaatatccaaaaatattcaaagcaaaataatagaatggatattaaattttaaaactgaaaaaaccgatacgaatcaaactttcaaaataaccaaatgaatactaaactttagaaccgaaaaagttgaaaccgaatagatacaaactgaaaccgaatggataaccgaactattaggactaaggactacaattaacaattttagtttgttccgattgataccaaattaccaatcataaagacataaaaagggtaagaaagcagcagaactgaaaactatttctaaccactatttttatttatgtcaaaagtaagactggtaaaaaacaaggttagaggttttaggtatataaaaaaaacaataaacaataccaaaatagttacaacttttttttgttaaaaaaaatagttacaacttttttttaaaaatctcgtttttcaacgttttcgtcactagtaataattagaagtttagaacggtaaaatactgcaaccatacgagattaccaatcaaaatctaactatttggttcgcctactgttttttttttaccgtgttgttttactactaatcataccaatataaaaatctttgcttctactatcaatcctttttctatatttaaaagcattattgaagtctaatgtgatgttttctcgttacattattttcttctcgatatcccatagttttaaagtttattacatttaatcaccttttttttggtctcgttcactcaccgctattaaatatcttataactataatcaaacaaaaaaacattcaaaactattcataaaagagttcaaaggaaaatcatggattcaatcctttatatgtacaccttcgatatgtgaatatatgacattgatcgattgatatggttgaaaatgtcttcagaattggaaactcagcattttagggcttatttatttttgcatgaaatcggctaaattaatgatatttagtagcagatttgccaaatacataattagccaaagatggacatagctaatattaacaaagaaagaaagatatctaatttatatataacattgtcgatagcaaacgacaaaatctttcaccaaaacatggtaaagaactcaactccaattaaaggttctaaaggagatgcccctctctaggctctaatttaagatcataaaaaaaccttcaaagagaaaccaaaaacaacagaagaacataaaacgggacccatgcatggggctgacaagtcatcatcatcactatgatacttatctactctaaataacacattgaaaaataataacaacaataaagaaaaaaaaaacttaacaaaaagactcttggtatagtgatccccacatgatgatgacgacaatgacattgataatgatgatgatgtggataccataaagttgagtttttcatgatgataatgttaaacaagagttatgggattcatattccatgcacatggatgataattatggtgatgatgatgatgagatattttatcctacttactccaagaaaccagtttttgacaagacagcatttctcactttgcttagatctcttcctttaagtgttcttccaactccttcacacatagagaaagaagagatctgtgttcttgctagctttcttgcaacccattcatgtggaggaaccatgcaaccatcatcatcttcatcatcatcgtcagcagcatgagaatgcaaatggctactccttctgttgctctttgagtcaccataaaccttggaccaatcagggacattcataggtgctgatgattgtttcactcctgagacctccttgcttctacgaatgttccatggtgaagaggaagaagatgatgaggaagagaaatgacttttgggtattttcatttcaggacttgaagtttctccttctcgtaaaactgaccacacatcttcttcttgaaactcttcgtccccttctattcccattgaaggaaccctacggctattatgtgtccttcttcttgatcctaatgaatccattgtgagagagagagagagaaatcaaatcaccagttgataataataataagtagaggaagagagaaattcttcaactactagtgaaagttttcttgctttttaaagagttttgttgttgatgttgttgtttttgagttaagtgagaatatatatatatatatatacacaaaataagataaaagaaatagaaaagtcatatacaagtctgggtaaataaaccgaaccgaatgtaccgaactgaaaccgaaacaaaaataactaaaccgaacagaaaattggaaaataaccgaatggattctaaattctacaaccgaaagaaccgaaacagaatggatacataccgaaatattttggatatccgaaaagatccgaaatagtttttcaaaaatattagttatttttagactaaatttaaattaagttgaaaatatatataatatattaaaaatactcaaaaatggccaaaaaagatatccaaaaaaattaaaaaggtctaaaataaccaaaaatattcaaagtaaaataaccgaatgaatacttaattttaaaacaaaaaaaaccggaaccgaaccgaaaccgaaataaacttttaaaataaccaaatggatactaaattttagaaccgaaaaaatcgataaccgaatagatacataccaaaaccgaatggataactgaatgctcaagactatacatataaaataaatattcaaagatttttacaattgacaagagcctcttagagaaacagaggtttcagaaaactccaaaagagtaataattttgtactcttctgttctttctgcaataatttgtgctaaagacctaaaatgctttaaaaataaataaataaataaacagttgcattacacaacttacaagagtaagtagcctttagtactattttctactgagacctgccaaatcattgacagagtctgattcatacaataagacaaaaaattgtactatatggaaaagacttgcttttatgtcaaattatatttactttttccggtaaaattttaagagaactaggacaaaaatcaatgttatcccaaaaataagaggacgaaattaaattcagctcgaaagtggctttaatgatgttacgaaaagtgggagagagagagagatcattttttggcttcttgcattcaatttacgtacgatttagtaaattaggttaggttcttcgttttatttactgtatgaaaatggtgactgagtgtaatacacaaaaaataatgttttgaaaacactaaaagatctaaaaaatgcagaaacattagagcatgcacatagttatactctatgagtattattaacaattttttagtattaattttaatgtttatgtattatttgagattttttataatattggtaataaatttgtttccagtgctagaccgatattggtatcattaaaaacaattactgcaaaatcgggaaataaatatataataacataagattacaaaattactgcaaaattatatcgcataatcacaaaaagcctgctaaattactcactttcagaaaatatagttagttagctaaaacactagaaagactatcgaattttttctttttttttttgctttcagaaaataacgagtttcacatacgaatcatgagcctctacatcatctaatactaggtatcaaaagaatcactgcactgatacgggatcagacctaaatatattgtctaatctataaaagattattttatagttcttaatactctaaatgtatcatctatgttcatggtcttagttcgccaatataatgatcgtgtgaaagaataatggatttagaaaaataattttcttcaaggcagcaaaatttaaaattttcaaatagatttatgaatttaggggaatgaatacaattgatatagcttcttaataattgacgtatgaatatgatactgcagcatccttgcaactagaatctaagttatgtcttgtcctaacacctaagaacaaaatagtgaaatagatacattaaacttgcacaaaaatgtcaagacaatgtctctatccttttttttttgtcaacaaagacaaagtcatgtaagaaaattaaataagagcacatacgaaaaaaacatattagcaaacaacaatttttttttaaataacgacaaattagagtgttagaatgatcaaaaaatggtaataaatgtatgagctagttgttaatgttcctttaaattgacaaagctttgagatgaagaattgaagatataaaaaataaattgttctcaaattaattataacattggttggatataattatcacaattacatttggtgcaattactatattgatggcaaactattaaataataaactcaatgaaagtaaaaagagtaaagaatagatacaaatacaattcaaaacaaacaaaagaatgaatgataagaaaagaaaaaaaaatgattttggatcaagtcttaaactatactaattaattttgtatcgtgaccaagttaaactctaatatattagagcgtgggcttccaacctaaaaccaattggcaagaggtggagaggcccatatcttatatataccacttaagatcctactcaacttccgatgtgggacattgtccctaatacgccccctcgagatgatggctcttctagccattgatctcgatatgtttgggcatggatcggcgggccaagtattgggccggaccgatgtggatcgggttgagtatgtgcggaccgggctctgataccatattagagtgtgggcttccaacctaaaaccaattggcaataggtggagaggcccatatcttatatataccacttaagatcctactcaacttccgatgtgggacattgtccctaatataatatccgttgaaggattgagaatttttatctcatggttcaaaggtactttggaaggaaacttctttaatcttactctgatcacaaaggtctatgaagattacatacttccatcattcccatttggttcttttgtaggtgagagacgtgtttactatgagaaacacttcgaggtctgtttgatccataggttttgaaggctgattttggatcgcggtttactcgtgacaaaactgttggtattttgtgtcttctttctttaaagtgtgatttctctgttgttttgttctcgtgtttttttacactttattgtaatatctcttatgtagtaatttctggtataatatcatgttttttattaaaatgttgtaaatttttaaacatttaaccaaaaaaaaggaaatgtttttacttacttcgacccttgttaataataatagaaagttacgatggttagatggtcacaaaaattgcaatggttgcattttactgcactaaaaatatcacataattaatcttcaaaatgctatagaaagtatttgtgtgttgggctaggtttagaaaatattaaaattgaaatggagattaaattagatgatgaggagtggaaagtgatgtggacacatcaccctacacagtaaacacacactttagtttcagaaaccattatcctttttataaactcctctcaccaacacaattaagcttcttttaattactccgggaaacgagcaaaaagatcaagcacacatactcatgtaactatttttataatcaacagtcacatactaaacgagacattatctagacctactaattccaactattagattataccgactcggtttactccaaagaaatagaaagaatcaaaaatcaagacattaatgtagtaaagtccattgactaggtggttgtatctaatccgacaatttgtttaaattaaacggtgttgatcaaagagttttcttaaaccaatatttgattatatctaccgacttttagacatttgatgtaactaaaaatatactattagctctaaaggatttgtgggataaaaaaacatattaaatttggacaagccattttgtcagctttctcaatgcttcgtgggtttcccgatttatttgagcggatggtattttgactattttcgtttgagaccccaaaactttagatatttttgcatatccctcaaaattaagtttatatctgttaaaaactccccaaaaatcagaagacaatcagcttaattgttcttggattcatccgttagggggtgaaccaaaagattgttctaattgttatagttagaagtaagaaaactgttcgatattttggtgtatgagcaagaactaaatagaaaaatgaagccgttggattataggaagaaaattgttcgaacagctaattatatatatgaaagttggacaactctctccatatgagtgacacatcatcatacaagaaaatgacatgtattattctacattaattaaattaaaagattagcaaactaattgagaaaaaaatcaaaagtcttttgttgtgttaaattcttcattaatttcactcttaaataaatttctaaaaacattcaataaataaaaaaaatcataatattgtatcaagcactatttttattttattctacttatgttattaatttatttttatcaatagtcattaatccataatggctaaatatttactttttggatataattatattttggatatttttggttacctaaaatattttggtttgaatccattcggtttcggttctttcggttatagaatttaatatctattcggttattttcaaacttttggttcgggtcgattcagtttttttgcatcggtttcggttttgtacattcgattcggtttatttggctaggcctaagttttttaaatattacatcaacagtatatgatagaatgatgtgcaattatgttactaatttggtttgaaagttgcctaacttgattctaagcaaacaatttctttttgcatgtattctcttctaatttagtattccaatcacatcatgatagactcatgactaaatattggattgacatcatttaaacaacaaatatataactaactactcatttgctttaaaagttttcacatgaaagaaaaaaaagaaaacaaaaattaaatagtctttttaagtcaacacttttggagagagtgtcgtatatttaactttttggatatatctaatgtctcaaaagaccattacttaaaaaacatgcatgtcattattaatgttaccaatttatcataaagtacaaaaaaaacatattatgtaaaccaaaaaaatataagaaaaagaaaagactaagttaaaattactaaactaaaaatgcaaacagctaagttgcactacacgaaaatttctaatcgttatcaagtaatgactattaaaaaatataacaaaataagaaaagtaaaatgaaagtagtgtttgctatatcactaccgtctagaacaacaaatgcaacatgaaacctgaaatgcaaataaagcaatattagatatttgttttcaagttaaatgaatgaaaataggtaaaaaaatttgtataacccatcattctttaaaactttggattcttggtagttagtacaaagaagtgaattttggtgtggttcaagtgtgcctagacaagttttttgcatgggaagttgttccaaccatatgttgatagtacattcacaattgtagcttggcaaatgaagtatgaatcctacatttcattgtgattgtttgttttaataaaattaataaaattagttttacagccacacaaacctgttgtattcttgtagaagtgaattcgcacaattttgcaatacacgttggttccattttgggagtgtttgccgttacatccgtgatggtaaataaatcgttttctgaaacaccaaaactaaaaaagaggcttttgttatttttttaattttgtttgtaggtaaatataaattataaaataaacttaccgattaataaacttagagattggaccaatgtggtagttggaaaaaaaccttgtgtatatggttccatccaagcaaagtgtgcgtgcgtgtaaagtttaattaagagacttaatacattcatgtttagtagtaatatgaattttattagtgtattatttttataattataaaatagtcttaccatctagaattgttggattaacatatgttactaaaacaatagatgttagagacattggatcagttaggatggctcgaaggcgagaaacagttttagcccaaagaaataaggagacaatcacattgctgtagaatgtttaaagtaatttgtttaactatgagtgaatataattgaaatgtaggggaaataaatctgagactatcaaaatagaaacttacggttggagccataatttgacaatgatttggtttgttgaagtagggtcacttaagtttgagccttcgattgaaagaattttttcaactacatctgtattaaatttggaaattgttattaaccaagaatagtaaatatgtaagattcatataatacaaataatatttctattatatttataatttaaagctgaaactaatgttagtatttatatattattaaatagaaaatcatatgtttagtaaatatttaccaggtaatgcaagatttgtgttggcaaaaccaaccaggtgagcgtaattgtaaactttaaatttctctttctctatctttagccatgattcatataccacaatgattttggtatcaatgttgactttgatgacaaaagggtggtccgtgattttggtgtatttggtgcatgacctaacttcaaaccacaacaggtgattctgatgaagtggtttgatcggtttatgagtaaaggagatcaatgtccaaatagcatttgagaagagctttcgtaagacaattcataattgagccaccacaaaggcttttacatttgtagtttttgtcacacagaagtttacattgatttgtagtataatattctttgtacaaggtttcatatacttgattctgcaactacaaactaataataaaacagagaactcaacatgaatccactaacaacaattataatactttaccaaatactacaaaatacttgcagttaccaacactacaaaacagaactcaatcataaacaaactcaatcataaacaaaaccattgtgagaaaactctacatccgaacaaagaaacagatggtccacgagttcaccgatgctccacctcgaaccaggctccttaaccaaacacctcattagaaagtcttgagcttctgcagataaccgagtcgagatttgaggagtgagatcactatgaccaattaaatcaacccaatcatcatgaaccaaatcaccatgctctccccaaaccgttttccctgttagcatctccaaaacagaacatccaaacgcccaaatgtcaacagcaaaatccacaagcccaccgcctattaactccggagccatgtacgtagatgagtgcccgcgctacgcacgagattttgttgttgattttcttaaaatttttaatatatatttagtttatcatcttttcttagaaatgttatttttataagagagattgtattatgaaagatgaaaactatatatttgttattaaccactatatattgtttgttaatttttactcttatttagaagctttgagtgtgttggatgttggttcccattctttatattttgaggattaaattgtaatgatgtctaacatgtaatggttatttattactattgtttagaatactctaatttttttaatggttgataatttaggtggtgatgaaaccccatggtttgagtgtgttggatgttggttcccattcttgatattttgagaattaaattgcaatgatgtctaacatgtaatggttatttattactattgtttagaatacaataaattttttaatggttgataatttatgtggtgatgaaaccccatggtttggtactgtttgaatagtaacaaaagaaattatatatatatatatatatatatatatatatatatatattttttttttcgttagtatttgaaccgcaccgcacttaatttatagttgaaccacttgtctttattccaaaattaatttgtaggtgtattatatatactttttgtttggtattgataaatgtacatatatattgcgtatttaatctcccaacaggcatcagccatagcatcaagaaacttggtcaaataggccaaacaagcctcgtcacaccgaacatgaacagttagagggagaacaaaatcgctcaccttctccagatctttcagattaaaatcgatgtttggacatcatctatcgttttcttattattacgtttgtgaatatgatttatcatatgaacttttctgtacatttttatgcattctgataacttggtaacattgatatacaattttataacgtaatagtcatttgagacattcgacatacaaaaaaaaaatatgagacctatatggctatatgcaagggaaaagaattaaagcgttgacttgaattactagcatacgatgatgtgaattgtgtagttgatgacaagagaatatatggaataaataattgtttgttacaattaagttagacaagtttcaaaatacataagtaatataactacatacattgtatcaatatatcatatactgtttttgtatgtgatcatgatagtgaaataatagatatataaatatacatattatagtagaattgatatttcgagttatagataaatcttatcataaaatataagaactatattaaatagataggaatttatcaaaatgaacatcaaaatcaacaaaataccataatcatattttttcgacaattttaaaaagtgttttctgcaaaataacccttcaagtcaatcttgtttgcaagtttaccctccaagtccaaattatgcaagtcaatctcacaatctcaaaagtcacccgcaatacagccctcccgtgtagtgatgacatgatattcgatatttgtttttgaaaacataagagttttgtgcaaaaaaaaccctcaattttttcttttttgcaaaacaaacctccatgtcaaataaatacaggtcaaaccacaatctgaaaaatctcttacaacatagcctttccgtgtatcgatgaagtgacagtcaataactcattttagagtacgtgcaatgggtttagattttattagtcatttatctaaggtgcaatgtgcaatgagtagagtttatatgcaatgtgtaatgggtagaaaaatttaataaaataaaataaaaagttaaatttttgaatcgataacataattaactaaaaaaatacaaagaggaaaatattagaaagaaaatgaaaatttggttctattttgtaaagaattatttaatatttggatagtttgattatttaaagtatttgattgttttggttctaaaataattaatattttgagtttataattacagttataggtattaattttggatattttctaagtttctggatatttttgttaaccgctatcgactgccatgtcattgatacacaaaaaggctatattggagaagacttttcagattatggttcgatctgtatttatttgacatggaggtttatcttacaaaaaaaaagttacattgaggtttttttgcacaaaacccttatgttttcaaaaacaaaatatcgagtgccacgtcatcactacacgagagggctgtattgcggatgacttttgagattgtgatattgacttgtataatttagatttggagagtaatcttgcaaacaagattcacttgaagggttattttgcagaaaacccttttaaaaacaaaaacccatgctacatgggtgttcatctagtagtaatgtgaaattgacatggttaagaattaagttaaattcttacttaaaaaaaacaaaaaacaaatttaataaatttcagagtgatcattgatatgtcaacataattaaaaaagaaaagtgtaaaggaaaaaacaataacaaagatatttgcgaattatgataaaatatagaaatattctgttgtttgagctaggaacaaatcataaaagatgaatcaagcctttccaacgataacacatccacttcacttcattaattatttaatttactgtttaataagtttattaataatattgcattttaatatggaaaaataaataccaaaataatgttatatgagtcagattttactatgttatatcattatgtaagattaagagagagatggagatgtcccagacttggtggaatcccgtggttggtcggattggttatggcgtggctgtggcaggcttcagtggtggtggagggcaaagttggccaaaagaacaaaaaagaggaaacaaacgaaataaaaggtagtgtggaggaggcaactttggaggctcttcgacaccagatatgacgtatttactccaaggttaaagtacataaatgttcattagcatcccagtaatccatagcaactatcggatcttgaatcagatttatattcaaggagttatgtttattgcgttcaggccaagtaactgtagaatttgtcaaaccctaagaagctgttccgagatgggttattcgaggcgccatttggatgtcaaaatgttgtctgatatgcatggctgaacctttgtggagttactgatgatactaatagctaaagattcaacggtg

SEQ ID NO: 530 - DNA, 43175 bp, Arabidopsis thaliana
gaattctgttttgaacggttagttattgttttattcttatgtttctgagacagtttattatcgagtaaatggtgacaagttctattgttttatttggaaatgaggtttgtggatgtcggattcacatactcaagtatttatttgtttgtggaaaaaaatattcttgaaaacaaaaatcaaatgtaaaaagcctagaattgatattgaaatgactatagtatatttgctgaaaaaattgtgtgtgtcttacatggtacaaaaccttctttatttatacaaaaacctagtaattaatcctaattatatgccataattcccctttaatgcttctgtttcggtcttcgggttcaacattctaacgttcgaatttgaattaactttgatccttcatgggctttgctactcgacccacaacacctaaactgaattgctctcaactcggcttagcctccacctcgtgatatggtcacctcgcgatacctctcaactcgacttcgggactccttccaggctgtacttcctgcgggtcccttttttacttacgtggtaatcttttgttggtcttggactactggtgcaagatccgacaccaacaaaagaaaggaaacaaaagaattaaaagtagtgtggaggaggcaactttggaggctcgttgacaccagatatgacgtatttactccaaggttaaagtacataaatgttcattaacatcctagtatccataataatatagagcttcagctcagtccaacctttggaggctcgttgaacggttagttatttttttattcttatgtttttgagacatttaattattgagtaaatagggacaagttctaatgttttctttgaaaacgaggttggactgagctgaagctctatattattgttccttcatggtttgtgatgtatgcttgatggagaaccacgctgaagttccgataggttagactgtagcatctttaacaagttaaagactgtcttagttacttagtttaagattaagctgagcaagctatatattacattataagtaacatatatttgaatgatgatggtatattatatttatatgtggatatgtatataactatgtaccaaccgaactagtattaaaatgggaacagaaaatgaatgcgtgtttgctgatgatatgattgtgtgacatacatgccatttgtgataaagatcaggttcctaccaataaaagtctcaacattctgaaacagtctctacgaccaaaccatggaatgaaccagtttgtgagtactcaacgttcttctcacaaaatcagtgaattcttcttgggatttcgagtactcaagacacatattacaatactcaggagcaatcatctcataagatacatgttttcaatccgtagaaaagaaattacaatacaacatgatcaatttaaatattaaaaatcaatttgaaatctgtaattgcctatatgcatatttcactaaagttaaatctaatttagtagatttactcttattatgaacataatttagcaattatactacattcaaatagatatggtaaaagtaagaagtgagtacaattgtaaattgaagtttaacttgtgaatagtttgtacaaaaaaaaatcataaattaatgctctataaattcataatcactataggttaataattttgtctagtctcgagtcggacaaatgtaagatatttaacataattcacaaaaataataagataataatttgtttgaaaatcttgtgtaattatatggtcccattagtatcataaattaataattgtatgcacttatcaatatatatataatattgatatatgatttttttttagtaaaatatgattttagtattatttgtttttcttatatatgcattaattgttggtggagttcacttataatattttactacatcaatattttgtattgttttctagagatagtaattattttacctttatttagttttaggaggatattgatttctactaaaagaaaattcagatttaaacttttaagaattacaaaatagtcaaaattgtgtaaaattaaataactattcatttaaaaataaatattataatttctttgttctgacactattaatataaagaagttttactttattttgataaaacaaaaaaatcgtattgtactttcattatatatagaaaatcacgttttcataaataaaacctaatttacaatatttttttttaattgacacttaaataattccgaaagaaaaaaggcaataggccatttttcaaatcctaggcacgtccatgatcgttggtaatcaaaagaatgtaataggtggagaaaaagagagaatggagatgatgcatgtcttttataccaaaactatttagcctactgaacaaattgaggctcatttatgttgttaaccatgagaccaaactcaacgacagtccctaatgggctcttgagggttggtctcttgagttatatagcaaaaattaaatgagtgtctttgcaaactagtacgttttcgaaacttaattagaaaagtaatacagttactatttataatatacagttactatttataatatgtaatatagtcataataagttttttttcgtgagaaagagagagagaaacatgtcagagagagagagggtcatgttttttttttttttttttttttttttttttttttttattacatttctttccctaaaattttaagaactataatactcgtttttaaattttatttttctaaaattgatcgtataaataaaaatctctgtttttttctctatcatttgatatgcgttttgtttaataatttttaaattttatttttctgtaattgtgtaactaaagatataaatacaatttgtacagcataataatctgtacagcgcaatcagtacaccgcaatctgtgcggttgtatctgtacagtgctatctgtacagcgttgtctgtacaacactatctgtacagcgttgtctgtacaacactatctgtacaacgctatctcaaagaaaaacaatttttttagagagaaaacaaattaaattaaaatacataaccaataatacttggataatacataaaaagagttatacattcaaatacttgccactttgaaagaagtttaggtaatctgcaaaatgctatttgtacatcgctatctgtacacccctatctgtacagcgctgtacagtggtcaaatgtaagaaaattttaaaaacgtatttggtttcgaacaaatatatgtatagcgctatcaaatgatgaaatgcatctgtaaagaaggatattttttcgaaaccaaatacgtttttaaaattatcttacattttgaccactgtacagcgctgtacagatagcggtgtacagttagctatgtacagatagcgttgtgcaaattacctaaacttctttcaaagtgacaagtataactgatgatgtataactctttttatgtattattcaagtattattagttatttattttaatttaatttgttttctctctaaaaaaattatttttctttgagatagcggtgtacagacaacgttgtacagatagcgttgtgcagatacaaccgcacagattgcgccgtacagattgcgctgtacagattacgctgtacagattgtatttattctcttgtttaacaattacaatacaaacaatttcaaaattattaaacaaaacgcatatcaaatgatagagaaaaaacatagatttttatttatatgatcaattttagaaaaataaaatttacaaacgagtattttagtttttaaaatttgaggctaaatgtaataaaggaaaaaaataaaaaaaataaaaaaaaataaataaatcctgacccacctgacccacgctctctctcacacgctgactcattcccttatatctctctctctcaccaaacaaaaacaaaacgtactatgactattctactaattataaatagtagatatactacttttccaattaagtttgggaaacgtactattttccaacttattccaaattaaatcataattctgtttagggatttggttgagagggaagagaagaaaaattatgtcctgagttttttttcatttcgattgaattttttcctttttgtaatcttcaactattctacatatatgccttcaaatctcggtaatattatggcctatcgcccatgatttcataatcgggctatacatcaacaattgaaaagtgatttggttgaacatatattacaaaaatttggcgcgaatcaagctaacaactaatcgttattccgtttttgatttatatatgcttttgtgtcatctatatttaaaattgtagtatttgtattaattattcagttttatgtaataaaatatttataatttttattttaataataataattttcttaaaaaaatgcattgaagggctctatcattggacaaagaaaaaatgggactaacaaaaactcttgattttaaatttctcaaaatttattgtttagaaatttggaagagctcaaccattggggttgctctgacgctccgtgtcttttttttatgaccttaacacttgataaaatttgaatctattttgattgggagttactttttttgcagatggttagaagatggatgttgggtgatgatgatgatgatgatggtgatgatgatggtttgcttgattcacttactagctagggagagattaaatcatagaacagattgaggagcaggttggtgtcatgttcaacaacttatgcatggatcagatcaacaatgttatgacattctctgaatgaaccaaagaacatttgaaactttatgtaagatgctaactaggaaatatggattagaagagtctgaaaatgtttaccttgaggaatctgttgccatgtttctcgaggtggttggctaggataagactgttcgagatattgctgcaagatatcaacggtcattggatacagtgaaaagaaagattgatgatgttctgagtgctctattaaagtttgcagcggatacattaaagccacaagaaggtgagtttacaagagtaaaccctgttttgaagaatgatgatcgatattggcctttttttagagattgtgttggagcacttgatggaactcatgtcccggttcgccctccaagtcaaactgcagaaaaatataaaggtagaaagctagaacctacaatgaatgttcttgctatatgtaatttcgatatgaaattcatatatgcatatgtcggtgtacctggtagagcacatgatacaaaggttttgaattattgtgcgacgaatgaacctatttcccacatccgcctaatgggaagtattatcttgttgacttcggatatcccaccaggactgggtatcttggtccacatcgtaggatgcgatatcatcttggtcagtttggtagaggaggaccaccagtaactgcacgagagttgttcaaccgaaagcattcaggtttgcgatctgtgattgagaggacatttggagtatgaaaagcaaaatggaggattttagatcgtaagcatccaaaatatggtctgactaagtggataaagattgtaacagcgacaatggcactacacaattttataagggattcacatcgggaagatcatgattttttatagtggcaaagcatagaagaatatcatgttgatgatgaagaagaagaagaagaagaagaaggagaagaagaagaaggagagggagaagaagaagaagaagaagaagaagaaggagaagaagaagaaggagaagaacatgttgcatataagcctattggtgacagagcgatggaagctttacgtaacaacatcacgaacgaatgtaataaaggtcgcttaccttattagatatgttttttttagtgacttggtttattattttagttaacgattttgtctatcttttttgcttataacttggtgtactactttattgttataattatgcttatgatttttcacaaatttttatcgttataattacaaaagaaaactaaaaattataactagttaaataaaaaatgttatggatgtaactatatttagattacattttttttattcaaatataattataatacaaatttatattaagaaaataagaattaagttaaaactaacgcagcggcggcgaaacgaacatagatacttgcggcagcggcagcgtcggcggcatccaaacgaacataaatgttgcgtcagcggcagtggcgacgaaacgaataacaatctgcggtagagtttcccgctgccgctgccgcctgcggtgaacaaacaaacaaactaaataatgtcttgttggatatgcaattgaagaagataggaaacaaaattcttaacttttttttttgtgttttttagatacatggtaattcgatggcaacactacaagttccaagtgacgacgtgaggttttttttttataggttggagctcggttttacagcaccaacggagctcccacgtccccttcttcagttgattgaggtaagcgttaatacgccataattgaggctctcaaaaattggacgtacgtatagttgcggggacacgagtagcgatacttgggtttcacggaactgcaaagtctagtcttttgaatgttcttgcgggagatttagttactgttttgaatgttcttgcgggagatttagttactgtgggtgaagtgagaataagccagaacctgaggatcggaaggtactcttttgtggagaagcccacttggatatattcttcctagatctttatcctcctcacccaagaccaaaggaaatatattaaacttgatgcggtgcgtttgaaactgatcaggtttggtctcccaagtcaacaccattacacttcattttcacgattgtttgaaggacaaaaggctaaggttgtgttagcctccatctcaatgtccaacccacacattttgctttgttgacgagccaactaatcacttggacaagccaactataactgccttggggaattcactaagttggttcaaaggagcagctgtgttggttagtcacgactcgagacttgtatcttccgatgtacatttaaagactaccaaatccagtcagaggtattcaaaaaagtcttatgaaatcttgaaagatggggtgaacaaaaggattcaatgttgtccctaactaagatccttagtcataacaacaatggaaaaggattcacaactaacaaccaaagaaaccaaaatcttattcctccaaaggatcctacaaaaactcttcatcatccacaaatattcaacgaagatctccatcattttatccaatgaaaagccaaaatagatacaaccgcgtttttgtttgtaattgcatgattataaagagttctagagattatcaattatacattatacaaacgataacgaaaaaaaaagaagaagaagagagttttggactcatatagaagattcaaagagggttcaaaacaaatcaaacctgtgcattagctccagcaacaatctcaagaatctctccagtaatcttagcttgacgctttctattatacaccatcgaaagcgatttcttgagatccgatgcattatccgaagcactactcattgcactcattctagctgcaagctcactagccaatgactcctgtaatgccctaagaatctgactgttaagatacagaggcaacaaagcatcaagaatctgaacagggtcttgctcgaattgcaagatcggcgagaaatcagctgttggtgtcctaaaagtctctctttcaactgtcaatttcccttcttttgtcgttaacctgaaaaactcatcttccgcagcatccacacaggttccattaatgtcacagatctctcctttaggtgataaaggcagtagcgtgtggatcacgggttctgatttgaccaaagagacaaactttgtgtacaagagctcgactttgtcgacttcttcacttataaacagagagaagacatcatcagccacagcttgagcttctttagccgtaggtaaagttccggcttctaggtatttgtcgacggggatgtacgggcgacggaggaaataagaatttcccttcttgcccacgctaatgactgtgtattcaagacctagacctttaagctctttgattcttgcctctgctttcttaatgatgaaattgttgaatccaccacataatccacgatcaccggtgacgacaacgagagctactttcttaaccggtctgactttggttaagggaacatcgacatcatcggtttgaagctgttcgttgatgttgtaaagaacttcaactagggtttctgagaatggtcgtccattgacaacagcttcttgagctctcctgactttagctgcagcgacaagcttcatagcttcggtgatcttttgagtgtttttgactgaatcgatacggtctctgagctcacgaagagacgcttggagtggtgaaacagaggaagctcgtgaaggaggtgaggaagtgttagttgggcacttgagaacagatcggaatgataaggaagatgaatcagcagaaagagatggttttgatgaaacccacattgttgttagattagagcaagccatttttttgttgtttgtttcagacagtgttttgctctaaccttatctctctgttcttttgattgtattgtattgaagaagaagaaagaagagaggagagatttgagtggagggaagagaaggtgatgagattaggtttggagataaggttttacatttgctatttggagtctgcaaattgtgggatcctctttttgttgacgtggcgttgtattagtggatggttcgatatcttcaatgttttttttttttggggtgtgtggtatatatcttacttctttgtaattgtttatcagccaaccaataattgcttttttattttatgagttttgaccccaaagagagaaaatatctgacaaaggatagaaattagagtaattaggtttggtttaatttctttggtatggttttggtccattagtatatatatataccaatcaaattaccttacaatagacttaaaatgatatatatatatatatatatatatatatatatataatttgtaatctggtttgatttgttaattgcttttttattttatgagtttttgaccccaacgagagaaaatatctgacaaaggatagaaattagagtaattaggtttggtttaatttctttggtatggttttggtccattagtatatatatataccaatcaaattaccttacaagagacttaaaatgatatatatatatatgtatatatatatattttttaatctggtttaatttgttaattgcttcaattttctccaaaatttttttgataagcaaaactttatagagaaaaacaaatatttggttataacgaaaaaatcatatagtgtaacaactaacaacaatggtttcatttgttaattgcttcgatttattccaaaaattccgataaaataattctacagatcaaaacaaatattaaaaactaatatttggttagaaattagaacgaaataataaacatataataagaattaactaaattatagatataaaaatttataaaattttattcattaaattaattataagatgtttatatattaaaatcaataaaatattaattttatcatgaaaattgtagttttctttttggttaaaattatatattattgtatcttcaactacatccggatacatattttggaatatgcttattgttacaagaacataccgaaatcacacagaaaccacaaaaattcccaacctcttgctataaacaagttcttagttttatttgttttgttttattttcatcaccaaacatattattacgtacgctcagtttctcatggatttgtacaaactaatatcatctttattaatcaccaacaatctagtgacattctattcatctcttaaggatcaaatcgacctatgaatctttgatgcttacatgaagtaaagctcattattctttccgtcaattattgcatactcgtccaccatttcaaataatagaacattaaggatgctgaacatgttgagtcatacaccttattggatttagggttatagtaacaatctatgtaaaatctgcaccgtattaatatgaactcgttgctcgagttataaaagcccaaccaaacaaagattacacatcacaccagaactgactttaaaatgagttgaccaccctaagtacaatgaagattatgatccatcaaattcaacattttcagttgcctaaaagaggtagatccttagtggaaaggcaatacaaattgctactcatatgtaatatgcaagaaatgagtaagttcttttaagggtttgattattttattttctttcttttttatttctttgaaatggaatgatgataatgcaactttcaaaatatataagacttcttttaggtcacaaaatttgatgttagtatttaggtcacaaaatcggcaccatccacgcaatttgtgtcaagtcgattatgaaatgaatcaaaaccgtgcctaaccagaatgtcctgaatcgaaatccaaaatgcaaataccttacttagacaacaaaacattgatgtatcaatatatctaaaacaacaatagctattgaaagggggggggggggtggtggtggtggtatttatgtaaggtacgagccctctccatgtcagatccaaaatagcgccaaactcaaaaaaacaatcccgaaactatagatatcagtcttttcattaaagttatccaatttaacttcaatttcgggtgctttatagacggttatttctggttcactatagctaccaactttttgggcatcttccaccattttttttttttttttttttagttcataaatttccattcaactttaaaacatacaatggcaaaagcccaaataaaggccacatgcccaacacaggagaaaacaaaccttttcctgcaacaaacaaaaggggagacgaaacctgcaacactagaaaaccaaaacaaacagccctgaactagaacaacgaaaaccaagttcctagcaaggacaaagcgttaggttgatgagccgtgctgcgagacaaaggatccagacgagcgcgaatgatgagctggatgtccttcaagatagactcagtagaacgagagacgccggagtggagacgttggtttctttctctccaaattgcataaacacaagagtgaaaggccagcctgataatgagacaaatatttttttcccttgagggagataagagccagttaagacagtccattaattgggcaggaggattaaggttggttgaggctgtaaaaaacctccacacgacaccactaaactggcactcaaagaagagatgtgctctcgaatcgtcatgagcattgcaaagaagacactcagcagggatcgagagaccccaattctgaagcctatcccttgtgtgcaatctattccacgccacaacccaacaaatgaaggcgtgcttaggaacatggttcttaaaccagaccgccttatgccaggggacggtgtgagattgcggatgcagagcagaccaagttcttggagcggagaatctgtttgatggtgcatgaaggtccgttttccaaagaaaggagtcgtcatgctgacagtcaagcaaaccctgagcctccgggagaagatttttaagctgaacaatgattggattcctgctacggcttgatgcaatccaccaagacgtgccccttaacgcatccctaaccacagcatcaataggcaaaccaactgtacgagggcctagaggaccgattacctctataagggggccaaggccaatccaattatcatgccaaaacttagcggtgaccccggaaccaacctcacaaacaataaagggccttgccacaactctgagcttacacatcttccaccatcttggatatcatttcaacaccttcaaggacatcttcgtcctctacatgagaggaaaggttcttcacataagtggagtcgaatcctgtaattgtggagttaaaatagaaaataagacaaataatgaagtagttcattaaagagttttattaaaatgcgaggaaccaaaaagaaaaaatttatatttgttttagttcataaaagattgaatgtggctgcaccaataatcagctttggctacattaatttacacaacatatatatggacttatatatatgaacccatatatatatatttatatatatgaacccatatatatatatttatatatatgaaaaactcttattataaaacctaataacattgatttagatggactacactaatgataatatcttgggtttttatgtgtgctcttatactattgtcgattgtatgatttattcttcatcggatctaaagcaatactcaaaaaggtttatgtgtgctcactcaaaaccttaactaggggttcaacaaaacaaaacaaaaaaactcaaaggagatggatttcgagttgagaaaactttcaagaacattttcaaactctagaaaaaaggaaagcttcattctatgaatggagttaaatagaaaataagacatgaaataaagtgattcattaaaaagttttttttttctcataagtgttatactttattttaaaacttgtgttgtaaagatacaactgtggaaccttccacttacaaatcttgacagttgacacatattaaatcttacaacgttggatcaactaaagtatagtcatccatgttgcataaaaacaaacaagtctagcttataagcagatgcccataaagaaagcccagtccaggaaacaaaacccttagagaaagtaaatttaaagattgccttccacccaaaagccacgtgtgatgtgaagaaacaaagttgaaacacgtggactgaagaagccttagtcgtcgctgttcatcgccgaactggttagcaactcagagaactccaaaaccatggaaaccgccagagcttcaagagaagtctatcaatttttaattagagaaccccaccaaacttcatcagcaaatcaggaaaggaaagatctaccaaaggcaattgactcccgaaatccaaggaacatcgacgtagagtaagtctttgagctttcaacaacacctaaaaacaaacaaaaaagcactcgtctccataaaacggttagagaaatagccacaattgcattagattcaaccgagaggcgtaaaaaactttaatctgcaactcaatttgttcctaaaaaattgaaatcgataagcttggaaaacaaatcgagccctttaaacaaaggaggttcaaggaattatattccaaatggaaacacaaaagacctcaatcaaaccaaatataaagaaatcgagagatgaaaacataaatctaaaccggaaatcaatttggccaaaagctagacgagacaccgaagataggcggtgaaactctggaccttagctagcccaccgccgctaaagaagccaacggaagccagacgcaagcagaccaccgccgtaaaaaaccggacagtgtcagaacgaaaacagatcaaacgttgcccaaaacgtcgctggacaaaagccagacatccatactgaaaaagccataaattctggacagaaaaccggccaacaaacgttgaagaagcgattattgtcggaaaaagaagatccagtgcttcctctctctaaaagatgctgatgagagaagagagagaaccaccaagatttatttaaatgcaaggaacaaaaaaatgtttgccttcaaggataaaatagatatagatttaatctctttaaatttaatcttcgtcaataaatttgcttcatgagttaacgcgatcaaactaaaaaaatctttgttctctcacttagcagctcattttagaaattctcatcgccgttcgtttgccgtcccgtttctgttgggcttaagaacttctcctctgtagtatatcattatacttgagcggagcccttgtccgaagaattaccagttttttgttggagttctgattcagttggatttcatttgctactttcaaaagttggtttgctgtttcaattaggctcgattctctgtgaattgattgcgcttggtttcttatcgaagttgattcaagtggatttctcgtcatgaatatggagttagacaaagctatctttgagatgtcgatcaaagatgatggtcctctagttttatcctatcaaccaaagtttagttcgatagagaagaatagttgtagtattattcgacaatttctgaacccttctcaccaacgtatgtctaattggatattagatatgcctcgaatatggcggatctactcccgggttcatggggttgctctatttcaagagagatttcagcttttcttcaagtcagaggatgatttgcttgaaatttttaaaacaggtgtttggactcaagatgagtggtgtgttgtaatggatcagtgggtagagaagccacctgaggagtacttgatgttccttccgatttggattcgtcttcgtaatatcccagttaattattacacaaaagagacaattaaggaagttgtcgaatgtctgggtgaagtgttaaaggttgaattagatttggataaatctcaagctcaagattatgtgcgagttcaagttctttttgatgttcgaaatccgttgcgaaattccaaggatgttcaggtgcctacaggtgaagtgtgttcagttacttttgattacaagcgtatttgaaagagatgttttctttgtcaacgtcttactcatgacagagcggactgccctagtcgtcttcaaggtagtggtcaaatcccggatgcagtctcaaagaagttgtcttcagagaagatgacgagtgatcaaaatattcatcccacagagggatgaatggatgaatatttgtcaacgtcttactcatgacagagcggactgccccagtcgtcttcaaggtaatggtcaaatcccgtatgcagtctcaaagaagttggcttcagagaagatgacgagtgatcaaaatattcatccctctatgggatttgaggttaaagaagctctgttagacaaagagataacggagttggtgaggtttaaagagaagcagaaaggtgttgatgatcaaggaacaattttccccctttctaaatctactctttctctcccgataaatgaggacaagattgatgatttacagatgcaacaatccaaaaagttgcaggttactatggccagccaaattctgattatctgaatttggatttctctcctcttttgataagccttgttcttctggtttgtgcatcaaatagaaaaatcagagacctcggaaaagttatggagataaggaagactgcaatgagttcaccggttccaatcgataaagaggttagtttcaataccaagatttataaaaccttcaaacgaaagaatcacgtctctgaaattaaatcttctaaatgtcttaagagagatgataatacggtggttcctagtgaaccatcgcaatatcaatatggcatcttaagttggaattgccaaggtttgaggaatccttggataattcggcaccttaagaaaatgaagaaagagcatttccctgatattttattcctcatggaaaccatgaattctgatcagtttctgttaaaagtttttagatggcttggttatcattactttcatactatagaaccggttgggaagagtggtggtttagtgatcttttggaaaaattagatagagattgaatttctttttgaggataagaatcttttggattaaagagcttctcaaggaaggaaaggctagttttctcttgtgtttatgggaaccctgtgacgaatctaagatacattttgctggaaaagctaagtagtattggattagagagaactacagcttggtgtatgataggggacctcaatgatattttttctaatgaggaaaagttagggggaccggttaggttgatatcttcttttcagcctttcaagaatatgctgcttaactgtgacatgcatgaactgggaagtacatgtattggttttacctggggaggaacaaggaatggtcaatggattcagagtaaattggatcgatgctttgggaactcggagtggtttaatttatttccaaactctcatcaatggttcttagagagattaggatcagatcatcgtcttgttctagtgaagtttgtgaaagatcaggaggtttttaaaggtcaattctgttttgacaaacgctttgctgattttcctaactgtgcagatgctattcatggttcatggaatggtaaatttaattcttcttctatgctgcagatggttcattgtaggaaagcaataagtagatggaaaaagactagtgaatataatgctcagtaggattttgggattaagaaaagaactggatgatgcatagagtgagcagtttccttgttggccccaaattccagacattcaaaggcagttgggagttgcttttagagaggaggagtctttttggaggctgaaaagtagagataagtggctttttggaggtgatagaaactcaaagttcttccaagctatggtgaaagctaatagagcaaaaaattccttgagttttttagtggatgagaatggcaatgaaaaaactttgaatagagagaaaggaaacattgcgtctacctattttgagaatttgtttatgtcttcttatccggcgaatcttcatttggttttggatggattctgtcaaagagtttctgaagagatgaataagacttaactaaagaagtcactgaaatggaaatatactctactgtcttttctattaatgctgagagtactccagggccagatgggttcacagccttatttttcaagaaaaattgggagattgtcaaggatcagatatgcaaagaaattttgggtttctttagacaggggtccttcctcaagagtggaatcacactcacctgtgcttgtttccaaagatttcaaatccacaaagaatgtcagatattagaccaatcagcttatgttcagtcttatataagattgtttccaaaatcttgtctttcagactgaagaaacaccttccagcaattgtgtcatctacttaatctgcatttgttgctcaaaggttagtctctgataatatccttatcgcccatgaaattgtgcatagtttaggaacaaatgatcggattttcaaggagtttatggctttcaaaactaatatatcgaaggcttatgatagggttgagtggccttttttaaaaggaattttgactgctttgggattcaatgataaatggatttcttggataatgggttgtgtgacatctgtttcttactcagttttgataaatggtcagccatttgggcatattactcctgaaagaggtatcaagcaaggtgatccaatatcaacgtttttatttgtgttgtgtattgaggctctgatacatattcttcatcaagttgagagtaaaaggaaaattagtggcatttagtttaatggcgatggaccttcagtgaatcatttgtaatttgcagatgacactttattggtctgtagagcatcaaagcatgattgtgaagaggttatgctttgtttatcttagtatggacatatctcagacaaatgattaatgtagagaattcaatcacttttggtgctaaggtggacaaggataccaaacaatggatcaaaaatcgttcagggattcagatagaaggtgggactgggaagtacttgggattacctgagaatttgagtggctctaaacaggttttattgggattcatcaaagagaaattgcaatcaagattgactggttggtatgctaaaactctttcacagggaggtaaggaggttttgttaaaatcaattgctatggccttgtctgtgtataccatgacctgttttagactgtcaaaaggtctattaactaagcttataggggtaatgacggatttctggtggaactcgatggaatcttcgaagaaaattcattggattggagttaaaaattaattatgcctaagagcttaggggctttgtgtgagaccccgtcccggacgtctcggcgtccggcgacgttgtactcaaattcgcgcctctccccgaccgaaccgcttaatttttcgcgattcaacatagaattgcctttacgaggctaaattctataatcgctctcttattacacagcggaagtctttctaaccttggtttaattctaaccaactcttgtaccggttttcatcgtctttgtcccttagacttagatcgatcctttactcggtcaagacatgcatatgttcgctaaccactctaagccaaacaatcgcatattcctttatcctactttcacggtcaattaccaaacgtctatcttaactaataagctagatcgttacataccttggccaatatgcggatttgattccttagcccgtttgtcgccttactccattcgttcaacgactcgtcatcagtcgtgaattgatgaaccaatccctatcgttacttagccatacaaccaaccaaccccactggtctaagtacaatgatagagattggggatggtacgattctcttggttcacgatggccgaatcaagctcttggcttattggtccattcgttctccaaacgtacgcccctccggctacatggtggacgattgagccctcggcttatcaaaccatccatgtttccgttccggtcgtttaacactacgaccgcccacggtttactaaccaattacccgtccggtccatggtggtcgataaagctttcggcttaataatccatccatgcggtccgaacgatatccttatcacacccaagggtccgtggattcatccactggatcatcgtaggctagcccatgaaatctttcttccgtcggccttaggtttgctcgcgggtccaacatccgttttgttcatcggttcccaccgtggactttcccgttggttatccgtcgagtcaccctttggtcttaccgatctctgatcggtttcaccatggctgaggagatagatacatgaaggcggccgcgatgttgatcctatatggtgaatcacgttccttacccattcttggtgctttctccctttatcggtaagattgcatccatgggcgacccttgggtgtgttcggatgcacttatccttgtgcttcctcgaacacttttctcgatccatcccatccgatgatcggtctgtccgacccgttccgtcagacgatcggcctatcccatccgacccgtccgacgatcggtctgtccgatccgtctggccgatccgatccgtctgacgatcggtctggccgatccgatccaacgatcggtcgacccgatccgattcgtctctaagacgaacggtctaccctctccatcctctacactccatcgaaccgttggaccgggaggtagcatgcgcatcagttcggtcgagttatactcgccgagccgcaccccctttccgaccaacaactctaggatgtgttaggactcctttaagaatgttttatggtgttttggatgttgtgagatgatgtgagattattccaaaggccttgggcgtcctcccttatatagggggcgaatggatgcttcccgaagcatcacatccgttccttgcaccactccgaaaggtcacatccgttccttgcacccttccaaaaggtcacatccgttccttccaaaaggtcacaaccgttcgttggtacccgctcgaccttacaccttttggccgagacaccttttcacccgtgagctaccacagtccaccagctcgagtgtcagctgaccagaccacccagctgggtcagtacacgatcagctcaccgagctcagtcgagctgtctgtcagctcacctagctgagctagctagtcttccagctggtttagctcacctagcttagctagctagttcatcctagcttgtccagctcacctagctggttcagctttgaactttctcgttcttctgactaagtattttagtccgtttcttgaccatggtctagttttctcctaaaacaacctcacctctttatgaacgcgggacgtggtcgtttcaagtctaccccccttaaactgaattcgtcctcgaattcggcgtgtgtaagatcttgcttactccctaactcgggaaacgggcgttacactttggttttaaagacttgcaatgttttaatcaagcactgttggccaaactagcttggagattactcactgattcaaggagtcttctttctcaaattttcaaaagtcggtactttttaaattcagatttcctcaatgcacctcaaggaactagcccttcttatgcttagaggagtattttatatggtagggaattattgatgggaggtctgaagaggattgtacaaaggtgtggatttataaatgggtgtttgatggtcagaaccggagaccaatgaatgtgcattcattgatggatatctagatgatagtaaataagttaattggtcatatcactcggaattggaacttgctgatactcagagatttatttcaggagaaacatgttcagttaattatgcaccagagacctcttgtcactatagaagacttctattgtcgggctaggactaatgatggtttatatacagtaaattcgggttatgatagaagtagtagagcgacttacccgaatcctttaaagaagctgaggtatgtccttctattaatcccttgtttgataagatttggaatcttgcaacggctccaaagattaaggtgttcatgtggaaagttttaaaaggtgcacttgcagtggaggatagactaagatcacatggaattcaaattaatgatgggtgtttattgtgtgaagaggaactttaaacaattaatcatattttgtttcagtgttcttttgctcgacaggtgtgggctcttgcgctcattcaatcacctgcaatggcatttggatcctctatcttcacgaatattgattatctgattcacaattctctgaacttgggactttctcaacaactgagatctgttagtccttggatcctgtggtttttatggaaaaaaagaaataagattttgtttgagggtacatgttcattgactcaagaaatcgttgattaagcttatgagaattgttctcaatggatcaatgctcaaggaaaagggtctgttatggttaagtcaagttcccagaattggattcctccaccagtggatgaacttaaatgtaacattggtgttgcttggactaaacagaagcaattagctggtatatcttgggtggttcgagattcgatggggcatgttttacttcacagtcgaagatcatattcttatgtacactctctatttgttgcaaaaattaaaagttgggaatgggcattagagagtatggatcatctacattatgataaaataacctttgccgcctcctctcctaatattattaaggctttgaataaaccaaatgacgggcatcggtcatatttctgaattactcaagttcactaaggataaaccacactggtttatgatgatgaaaacagattattgtaatacaggtgcttttgaaatagctaagagtgtcatcacaggaatgcggtggcaatcttatgtagctcacagtttcccctattggttgagaagtctttttgataaggaattgacttatcaatagagtatttgagttttcacaaggaggttaggattagattttaggtttgtcttttataagagtagaaatcaaagttttttttaagtaatgtaaaatttgatacaaatcgataaattaataagagaataatttttttgaaaatcttatgtaaatatatggtcccatcaatatcataaattaataattgtataaatatatcaactatatatatctattatatgtaagaaacttcaatgatatataattctagtattgtttttttcatcttaaattcatattagttcttgtttgaatttagttcatttatttttattgtatcaaaaacttttggttttgttttttagacataataactgtttttacttgtatttggttcgaaaaatatattttatatatagagagatatattatattgtcatagaaaaataaaaaattaggaaattaagaaaatttatctataaattaatacctctataaattaatagaattttgcggtcccaacattattaatttatagaggttttacactatatgcgttgtgtcttaggtttgtgtttagtatctaaaactcccttgtgtttctcttttctctttggtatcatggcagatgagttatgggatgcattacaacacttagagttaggaagggaggatcctgctctgtttattccgcatgctacttatgcaactgttgaatctaggaatagacttagcttgattgttaggcctcttaatcctcgatctcaaaatctcaatgttgtggttgctgctttgccaagggtttgggatctgacgtctagagttcatgggagagtgattaatgcaacgtttgttcagtttctctttcagtttgaggtggatctcttgtctgtgctaagaagggaaccatggctctacaacagttggtttgtcacggctcatcgatgggaggtaaatatggcttttgagtacttgtctaatattgatctgtgggtgcaaatgtttgggatccctctcctctatgtttgtgaagaaaatgtggtagaaatagctcatggtttaggggaaataatatcattggattttcatgatgctactacaactcaaatagcttatattagagtgagaatccgatttgatattactgattgcataagattcttccaacgaattacctttgattctggtgagactgcgctgataaggtttcaatatgagaggttaagaagaatatgcagtagttgtttcaggctgactcatcataggaatttctgcccttatcaacaacctgagcctaggtctcttgttcgtggtcctactaacaaccttacaaggactagaagagaaggagtgtgtacccataatgaatatcatcgatcatccctgaactctcaatcgcatatgtctgaaaactcctttccagcgcctcttgaacctcctccaagagtggcagctccttctttgaatcctcatgaattggtggctgcttattttcctcaaggaagagcagtgtctttaccaaatataggaacactgaatctaatcttaatccatcatttagcagacaagcggtttcaaggaattttaacattcaaccgttttttggtcctgttattgctacaaatgttcctcgtgtggttgaagtaggtgagtgttctagacaaggagagtttggagaaccagtaaacaagatggataagggagactcaacaaaaaggaagaatatgggaagtgctagaagtgatgaagaagaaagaactcatggagttgttgggcataaggatggaggtattctgaaacctccaaagaagcgctaaacactctgaaaattttgtcatattttttgttttctatgctgcttaggatccatgatcgcagcttcaaggtttatataataagcgctgcattgggttcaagtatgcaggtccaaggtttgaataaggtgaagagtgggtatggccgttggaacactttttggttaaggctactctttgtgtgcagtttgttgtttcagtttacctatcactttttgattttacaacatgggtaacattgatgttttgttaggtcatgtttctttacttgttttggtgtttgtcttcaaactgaaagtggaaggtctactgatgtactttttgaactatgagagcagccccaacggtaaaatacattctcagtccattgtttctattattttaatcatttaagtataattttattatttatttatatttttagttacaaataaaaaaattgatcaattatactttatcacatataaagtgagtttttaagtacagtaaagcaaatccgtctttttaggactttctttctttctttcttacttctctcttactttttccaattaactatcattttttttctttttaagggacttattaaaaccgaccgctggggctactctgatcttaatatatatataaaaaaaagttgctccatgagttagcattgattacatttatcaatgtcttacatgggctacactaatgatagtatgttgggctttttatgtgtgctctagtagtattgtcgtttgtttgtatttgtactatgactcatcctcttgttcatcggatctaaagcgccactcaaaagggtttatgaaaaggttagggttttaacaacaactcaaaaaacagagatggatttcgagaagagaaaagctgcgacacttgcttcaattcgttcatcagtgactgataaatctcccaaaggttttctcgacgaacccatcatccctctcctcgaaaccatcaatcatcacccatcttacttcactaccagttcctgctcaggtcgaatctcaatcctttctcaacccaaaccaaaatcgaatgattcaactaagaagaaagctcgtggcggttcatggctctatatcacacacgacccagctgattcggatttggtaatttctctccttttcccttccaagtcaaatcagattgacccaattgaccaacctagcgaattagtcttccgattcgagccgttgatcattgctgtcgaatgtaaggatttgggttcggctcagtttcttgtggcgttggctatatcagctgggtttagagagtctggtatcacatcttgtggtgatggcaaaagggtaattatagctatacgatgctccattcgaatggaggttcctattggtgatacagagaagcttatggtgtcaccagagtatgtgaagttccttgttgatattgctaatgagaagatggatgctaataggaagcgaaccgatgggtttagtgtagctttggctagtaatggtttcaagaatccagatgaaaatgatgttgatgaagatgataattacgagaatctagctgcaaatcatgactcaagtatcaacaacggaaacttgtatcctggtaatatttgtaaatccctatgtgattgttgattttttagatagatagcttgaataatgcaatggaattggtcaagttacagtcttcattgtagtgttgaattatagtcttgtttagtttatactagtgtttgagttatgtctacttggtttgcaggataactttcaaattttaaacgtgatagccagtttccgtatctaaatcattggcaggggttcagaaagaacttataccactcgagaaattatccattgttggggaacctgttgagaagcttcacctttggggacactcagcttgtacgatagatgaatcagaccggaaagaggttatcgtgtttggtgggtttggaggttttggtagacatgctcgaagaaacgagtctttgttgctcaatccttcatgtggcaccttaaagttgattgctgtcaatgaatctccatcggcacgacttggccacacagcttcaatggttggcgatttcatgtttgtaattggaggaagggctgatcccttgaacattttgaatgatgtgtggaggctcgatatatccacgggtgaatggagctcacagaggtgtgttggaagtgaatttcctccaaggtatgagtcatttaatgtgtccatttcttcgacatgtatttgacctatttccagtgattaacttctatgtactgtttattttgttaaatcaacctcaacttctcggagatgccctccgagactagtaatcctgttattgcacattttgcttaatttcttggatttattatatatgtttttgttgcttgttgcattgacatcccttcagataattgttatctcaaattttcttctaaatgcaaattctttgaatttgagcaggcatcgacatgcagcagccagtgttggcacaaaagtatacatattcggtgggctttacaatgataagatagtttcctctatgcacattttggatacaaaggaccttcagtggaaagaagttgagcaacaaggtcaatggccctgtgcgcgccattcgcatgctatggttgcatatgggtcgcagtcattcatgtttggaggatacaatggggaaaatgtactcaatgatctatacagctttgatgtccaaagctgttcttggaaacttgaagtgatttctggaaaatggcctcatgccaggttttcacactcaatgtttgtttataagcataccattggcataattggaggttgtcctgtctcacaaaattgtcaagagttgactttgctagatctgaagcaccgattgtggaggagtgtgagattggaatttatgaacaaagagttgtttgttagaagtacagccagcattcttggtgatgatcttatcgtcattgggggtggggctgcttgctatgcttttgggacaaagtttagtgaaccagtgaaaatcaacttggttcaatctgtgactatgagtgaaaatcatcttcctccccaacctgaagatgtttctctagaatcgaataaaaacaatgcagatttgaagactgagacgtctctgtctcaaccatgggtgatacagctagaaagaaagtatgcaaagttcggcaaggacatacttaaaagtttcggatggttagaccttgagagaaaggtttactcaaacgaaaaaggtctttgtatatgctttcctgtgactgaaaacttttctgaacttttccatgagaagcagctattgggcaaggactttgaaaggtcagaggaaaataatctaacaaagggtctatcgttaaaagatatatcctgctcagcggctttgaatctattgaaggaacatggtgccaaaaaactcattaatgtagcttttgaagccaaaaaagttgcaaaatcccccttacagagaatgagagaagatatcacatctatacttaaacagaaaggcctaccagaagagcttttggatgagctcccacagaagtaagtgttccagaatcctgattttataatactcggggactaaaatggtgagaatctgattgcgtgcatgttgtttttgcttccatctgataagtaattggtgttttatctactattagatgggaacggcttggggatattgttgtggttcctgcaacatcctttaaagatccaacttggagctctatcaatgatgaagtttggtgtgctgtttctaaatcgcttagtgccaaccgccttgcacgccaagtatgttacttttagaagcttacaccaatattctataagtggaaacgtttacatcttttcatcttaaagccactcaaaacctacaatattgatttattataagctgtgagaatgctgagaactttacaaaccgttgtcttacccaattgcatctccttagcagtaagacttataccatcaattttgtgtctttttcagggacgagttgaacctaatggtacaagggatagtacattggagattcttgtgggagacaatggatgggttaatcaccgtgaaaatgggatcttgtactctttcgatgctacgaagtgtatgttctcatggggtaatctctcagaaaagcttcgtatgggtaacatggcctgtgaaaatgaagttgtcgtggacctgtttgctggaattggatattttgttctcccatttcttgtgaggtatatgccattattgaataaacgagaagagaaagtggttttatacaatcaaaagtcaatactttattagatcgcatgcaactacaatgcattcttaattgacatttacagggcaaaagcaaagctagtatatgcttgtgagtggaatccccatgctattgaagctcttcgacgtaatgttgaagcaaattctgtttctgagcgttgtatcattcttgaaggggataaccggatcaccgcaccaaaagtacggttgatgatattccaaacggctcaccgtctatttaattctatgcaaatggttctttttataactgttggatcgagtaaatcgctgaagtaatagattttgcgtttcaaatcttttgattctcagggagtagctgacagagtcaatcttggtctcatcccgagtagcgaaggaagctgggtcacagctattcaggcattaaggtgattttactttccttaaaacttattcttaactacaagaaccaggagcataaaatctggaacaagttttaaggttcagtctctccaaaagatataatctttaagacgattcaaactcagagatgcgaaaatcttaagccacactgctcttggaacctctgaatatgatccaaaaatgtaatcattagagagagcaaccgctcgattgaatgtatattcactgatgtctctgttcttgttattggaatttgtaggcctgagggaggaatactccatgtgcacggaaacgtcaaggactcagatgagagcagttggggcgagcatgtcaccaaaacattaagtgatatcgccagagccgaaggtaataagtttatgaacaaaatcgaaagctatttggactaaaaaaagagcattggttttttatcaagactaggagtttactaggacttatatttttttggggttttatggtttaaggtcgtagctgggaagttacagtggaacatatagagaaggtgaaatggtacgctcctcggattcgccatcttgttgccgatgtgagatgcagatgatgctgattgctgacaataacgagaatgcagcggagagacttcctatagtattgtttagcttgtacgatctcaatttcgatacctggtttttcactttttcactctttaccaatcccaagtaatcagttccccagtaacaaaccgacaatttgttccatataattttcctcaaaaccggtttccgattggtgtatcttctataataaaaaggttttggtgtttttaatttagattcttgcaaaacttctttgaaaatggatctctttggataatagatgatcagtgtttttgcatcctttattaagcctagctctctctgcttatggttgaaagttgaaactgctgcagcaatgatacttgctgagcaaaatgtggcagctgaaaagagtggcttagctacaagtaagaaaggcttgaccttgaaggatcttctgccacaaacttcacattgcaatgccaaacttcgcaaaggtacttggttgaggaaaatataatggtttgctttgctatgttgatcaattttagattttggtctgtgtagatgcattaaatggtctcaaagaccttttgaagaaccatccagcagagctgcagtcacataaatatgctatcattcagaaacttagggaacgaattatggatgatgatagtctagtgagagatgctctttatcaactatttgaaagtgtgatccttcctgcttgtaaaaatgtattaattagttcttctctttggataaaacttgcatcgttactagttaactgttgtgtctaacactcgaatctatgtgtgaatctattcaggataaccagagccctatggtgtcacttttaatgccatacatatcttgcgctatggctcattcatcggttggtgttcgttggatggcttccaaatttgaaaaggtgactacttagattgatttcttggattctgatacagagtgttacatttcccaacttttgcctctaatgtttcttgccacgacgttccctgatatttccatgtgctacttgttgcagattcttgaaaactacaaggataacaaacacaagtattttatccattcacaacttgcaagtttatccatttgattcagattgacgtattttcttctaatctttacaagaaacagaaactttttgtttccatccatttacagattttgtttttttctcctaaacctacgagctcacaccatggccaagggatttctagatactggccagtcaccatcgcataacctcggccaagggagtacacatactactttagaccaaaacgtaaaacttgtcaagatcattacagaatccaaaaccagtagtgtatctcaataataacatatgtatagttgatttcaaaatacatggtacaaggaacaagaaacacaaagaagaagaaaaccagagtattaagaacacaaaacaaccctctttcttattctggaaccggaataacacttggaacatacacatagctacaaataaacgggttactgtaccgtgactcttcatgtcgtcctgtctcaatttgttttcttactccaccttcatcaatgtggtaaagagtgatgcaagtatagcactcatcatctgttgtgcaagtaaagcacttatcatctgtgatgcaagtataccatttatgttcttcatcttcttcggcatctccctagctcgcaccatgccatgatatttctgtgcttgccaatggagtatcccggacgagccaatatttggtaaacgaaacaattccatcacttaactcgtttgtcacccacacttcaatagcccttgacacttcttcaccatattgtagtaacaaagagagtctatctccacagaatgttattcaagatcatcacaatagtctatgtcaatatataacatctgcaatgaatttagtgcattaacatagttgatttcaaaatacaaggtacatggatgattcttcaaggatcaacaataaacaacacacaaagaagagaagaacaagaaacaaccctagactcttattctggaactggaatcagacttggaacataaacatagctacaaataaacgggtcaaggtagcgaaacgatctatgtcgtcctgtctcaatttgctttctgatcccacattgatcaatttggtaaagagtgatgcaagtataccatttatcatcttcctctacttctccctcgcaccatgccaagatatttttgtgatctccaatgaagtatcctggacgagccatatcaccatggcactgtaacaacggaagatgagggctagtgacgttaaaatacttggtaaacgaaacaacttcatcactcaacttgtttgtcagccacaccgcaatgtccgttgacacttcttcttctccaccaaagtctgtatcttgtagtaataaagggagtctatctccactgaaacagcctaatcgtccagtacaccctataggaggacaaacacatacgttcttgaaagtttccatggagaaatcaaaacgtagaataaacttctctttagtatcagcaatccaatacatattacccttcactgacacacctctgcactgagtatatacatcccaatacttagtatcaagagttctccacgaatcagacttaaactcatatatctcgcactctgtatcatcaaaggacataggaccagagaacctcacgatcttgtagttttcacgacatgtgttgtcgtatccaatcccaaagtaatcagtttcatagtaagagtccaacggttcgatccatttgattttcttcgttaccggattccaaactgcgagattggcctctcttgttcgttcgtaactcgaatcactacatatacatagcattagtccatcgcagtgaaccatagaagcaaacgaatgtggagagcgaaacacgtctgggactggtgaatctgaaaagattccggtcatcggatccatgatttgaactgtcttatgatcatcgattcttatgaatcgttccggagagtgatccaagtgattgtacatgaacctcttggaggtgatgatgccgtaccattgcttgcacgtagatttgaatcggtttaaagattcagcaggagtcttcttaagtatttcttctactaactcaaatggtagtgaccggtacacacgcttagagaaagccattgacgttcgctgtatcagagagatggattcttgaagaacaaggtttcgtgtttcctgcgcaattaggttaccttgagccccaaggaaaattgtgaaaagaatcgtgtgatcaaccgagccaaaacggttatgttccaaccggaccgatctaccaatcgaatcagagtaaccctaaatatcctctctcgttcccaagtaattgaatcctctgaatattttgtacgtatcactatttaatatcacaaattctttaattcaagtagtatttattaaaactccaggctagtcctatccttaataggagaaggaattatgtgcttatctacaaggaaattatacaattttaaaaggtatatatatatatatatatatatatttttaacgcatacaactgatttattgattaatagaatctgagtacaaagcacttgcaatatatggtggaattaagtttttttttctttttctcataagtattattttattgatatgtctccatttgaactttctgaataaagctacaaagggcataaaagcccataacagacagccatgaaataggcccattagagatacagttcaaggaacgtgtcagaatcataaagataagctgaggacacgtgttacttccacaatctctgctggatgagacttcaaatcacggtgaatcatagaacgtcgtcggaaaacgaagccgaacaacgaatcttcttttttctcaccgattatggcaatcacgagtatggaggacaaaacatcaatatactgagcttttaaccagctaacttaggcgcagaactgtcttgacaactaaatcgaaagaaacatctagatccaacaaagctatcaacacataaccttgttagaggccaccggagcagaactattaatcctcgaaataattgaacaaaagtagagacataaccggatctactggatttataataaccaaacagcgaatattaaacgtgatacgaacctcatacaccggacgactagaaaaaacgacgaagctggccaacgctccttatagaagccggatgatgccaaacagagggccagccatcacaactccggaagtcggagatgctggacataaaacccgattatatattgggacagcaaaactagaagaaatttggtcggccaaaggagatgcttctctcatctctgaaatattttagagagaagagagagagaagtctcatttctataagaacattactggtggaattaagttatgataaggaaaatctatatatagttattattcttttgttaaacgggaatatatttaatcagcaaagaatctgttaaatttttgtttttgcatcatacaaagatatgtttatgtacaaaatattggttaatctttagtctttggaatctccttaggtgagagaccctttttgttgacttggtgttgtataagtggatgttctgagattttcaaattttggtgtggcaaatttacttctttgtttatcagccaagcccaccaatgttaacgagttttaagtttcttctcacaaagattaggaaataggactcattcaaaggatagattgtatatggctccatttgtcaccctacttcagttgtactaaaaagtctggataattgtacttgtaacatatggatatggttgacaaaattcttatcccatctgaatttttctttcgtacggaaatgcatttttctttcgtaaaagtttccaatttgatttagaacgggccaaaacaaaagcgagatttccactattttcatttgggagtaagtgaataaaatattggaaataaacacacaaacttgtacccaagttacttgtaagttattataattttttttttaattggcatggtttcatttgctcgcatttctattaatgtttcgaatttaattgggacatatgagacatttttttacccaaattctcttccctttcctatactatgaaactaggatatgacccgccgtacaccatatattaaatattttattttataaaatagagtatttttttgtatataatgtttgttgttgtttgtgttgattaataatctcgataagattatgtacggtttttagtgagtcgtaactttacgacattaataactcaatattttataatctaagatttgacccatggtgataatattttaatttttattcataattaatttgtattataatttaaactctattacaattacacatttagatgtgtaaaaaaagagatttaacatttagaggtgtcaaagaagataaatacttattatgatatactataatgttgatttttaagacctacaaaaaattgttattgtttgttttgtttactatttaaaattgtatagttgtaatttgattgctaattttaggattccgtcaatgatatatattgtcttatattaattaacatggatccaaatccgtctcatctaaacccatgccgccatataaactcgtctcatccaaacctattttatcatataaacatgtcccctaatatcattttgttcttttttataaatttcttatttaaaatacatataattcgagtccatttcagaatatcaatctgacctaaaataaaacttaatgaaagacaaataaaaatattacatttaaagctattttttaactatcgttaatttgtggtaaatatttttgtttgttataataaacaaaataaggtctaaaaaacaaacaaaatattaaactacgaataaaggttccagatttcgtctttttggctgaaaacagaagaagaacaaaactcatattaaacctcccacactctttccattctcttcaaacctcgatctaagttttctttctacgtttataccagatggtttccaaaattaatcatttcgagcttcaaaatttgacacacagcagaagagaatgacagatacacacgatgaacaaagagaattcgagcaagatgtttttcaaccgaatcaaaatatctcatatttaaaggtttatttgctagtggaaggataaagctttgtatgactaaaagagtttctttctttggttaagaggttaattatataggtccttgagcatgataaaattaggtttcgagcaagcaaaagttttatgaaaatatgacaattacaaattaatgaagaggatttatttatttctcgtcaatttgactaattctttcatttatttatttttctttatttattcgattttataaatttttatgttagcattatttacggatattagttagcataattaagaataatcttaaccaactttgtttaattttttgtaacgcattaaactcttatagttgttttggaagatctaatgagaagatattcgtgaatattcggtgtatccgaatataattaaaatcaataatcatttaaaaaaagaatcaaagatttttgggtcaaaatcaattaaaacccgatccaaatagcttgagcaaatatctacttcaaaaatgttaaatagattctgattattccacccatagcaaaaaaaagaaaagaaggaaattttgcatcaataaccaacaaaaatcaataattcactaactaaccaaaacaaaaaaaagtggatgtattttctatataatatttgccattaacccttgcttcttacaatcactcaactcttctcttttactattctactagagtctgtgcgggttttatattaaaaagcattgttgtactttctttttttttccattaaaattgttttctatatttatagtcccattagagaatgttatagatatcaaaattttaaaagtttattatcctaattatattttgtgatttcaataaactttggaacacaaattaattttgtttgggtatacaaactatgaatagaaagataagtgtgagatatttaatgttgtatacaaattagtagggtggttttggtgaatgatttgttattatgcagattattgttaatcctttatattataaagcacaagtcacataaccaatcagtttttgccatattatttgtgtgttttttcaaaagattaattaaaaaaaaaaaaatgcaaccggaaaataactttcacaaaatgcaatctgttttttcaatatttattttgctatgatcctgatttcctaaaattgttcacatgatcacgaccacgttcactgtgaaaccatatttcaaaagctcaaactgtttcgtttttgtaactcacgatagttcaatcttctcttactctttttcttttttatctcacttacatcttttttcttttttgtcaattgtggtctattgcaacgtttacagtgatagtaatggaggagaacgtgcaattagggtttggaggctggtctctacgaatgagcatcttaattcatggcaactctcatggaacgtcaatacaaagggtgaggttgattatttccaagtggtcatgcatcctataaactttgatgaattatttacctgtgaagttggaacaagaacgccctcgtcttgtttaatttgaggacacaaacgtctagtcttcacagagagggaaagaagagcaagtctatggatggttgcatcttgacattcaacaattgtaaagagtacatggatgcgatttaccatgtatgactattctcaccatgtcttcttcacacagttagtgcttccacgctggctgaacaagctccccaagccgaagctttcttcttgattgtgcaagtaaaatctactagataacaaagggaagtttgccacaaagtaggatgtacaatataatccatacactccaaaacatacatataaatccaaatgtatacgcatttgaacaaaagtaaccaaattttcgcatcaaaacaaatcttgtacatttttcaaaacatttatataatccaaaactatcaaactcctaagatgattcaattaaaagataaacctctggcaatgataaaacataaacccaattctatcatactaaagatcaacctctatgcataggaaccaaaaagtcaccaaatttgctcatgactaaatgaaactgacacaaactaacataatcagatccaaaacctatcaaacgcagtcaaagaaaggaatctcggagctgaacttcttgaatgaagatagaacacccaaagttttttctttctcaaatagttgcatatttattttgagtgattctgaatttgatgcacattctactatgcacattctgaattacatagtttatttattgtattggttgttggtttctttaggtgtggtgtacagatggtggagatatgttctatttgtgcagagtggaaacaaaatgaaaagcttcagcggattttcttaatagacacaaacaaaggtgataatggaggaggaaatggtggggatggtggatgtggtaatgggggtaatggagtaggaaatggtggggatgatggaggaggaaatggtgagggtaatgtaggaggaaatgggggaaacggaaatcaggaggctgttgagatacaagatgttggggatttcgggttagacaatgatgatgatggcgatgaggacgatgaagaaaacgaagcagcagcagatgaacaaaagcaagcaattgtagttgaagaaaacaagcagcagcaacggaagtaagcaaagcagcagaggaagtaaccaaagcagtgaatccaagaaagaggaggaggattgatgttcatgtcccaatccactaatctctttggctcaccttcttgatagcttaaagcatagtattctaactctacagcaccacacaattccattacaatgtgtatataattcttatcctcctaagaacctttgatttgtacgatgttaggctgtcctgaaacatgatccatgatttgaatctttgtaaggtttaaggttttaagaagattaaatcgaagagaagccaacttactgtttatttccgaagtatatgaaaccatattacaaaaataagtataacacactttataaggaacacaaataccaaaagaatgacttcttttaagtggatcttacaagaaagtgcattacttgcaacttacaagaagccaaggacaagactagagagtttccaacacataaatgatcaaactaattaatctcactatggttttcaccggtttagctcttcttccctaaaccgttattgtgggttacacttacacacaaaaacaacatcatatgattctattgattggaagaagttccccttctgcctgcttgctgctgccacttctcatcattgcaattcatgttgtcggttatttatgattgaaaaatataaataaatcaataaattaattgataccatattttcaaatattaagtatatcacacttaataaggaaaacaaatacaaaaagaatgacttcttttaagtggatttacaagtgtgttacttgcaactcacgtgaaagtttcaacagatcaaactaaaactttcactttggttttctccggtttaggacttcttccctaaaccgttattcaagaagaagagcacaatatgattcacttgatcggaagaagctccctttgtggctgcaagctgctgccacttctcatcattgtgcggaattcctcaaagtttattttcccatcctgtaacaaagttgttcattacttactatgtttcgaaaaacgggtctaatgtttgatgtattggattggaccaacttacattatcggtatcaacttcggttatgatttgtttgatgctaacttcatctcccacaccatgctctttcattgccatctccaactcttccttggttatgtgcctattgcatttcatatttcagttttaactttatagtagtgataagctaaagtggaagaaacttacccgtcattgtctttgtcaaagtgttggaatgcttggtacacatgatcatctctatccaatctatatctatgcatcgtggcagagataaactcgtctatgtcgattgttccattaccatccacatcagcctgagaagtttataattatgtgttacaaagttatatatttttctttaaagacaagtcggatgcaatgagtaatcaatcaactcacagcttccatgagttgctccacttcggttttagagaggttagatccaagtctagtaagacctgttttgagttcttcaagagtgattgtgccacttttgtcggtatcaatgttggtgaacagtgttttaagacctttgatttcctcttccgatagatttgctgcaataacctgcaaaaaaatcagacgcacacatcattaactgaagataggaagaggtagcaagaatcgggaatggttactctttacctttagagctactttctttagcttgttcatatctcgaaattgcttcaatcgagataaaacaacgccatcaataggcttatctgaagcttctccgtctttcatccaaggatgtcctatatacattacagacataacaagaaacaagacttcaagattaacatacacaagccctcaacaaaacatagtgagcacaattctgaattcttgaagcttctttcttttggaactcacctaaacttaacaatctaatttgattgctttagaatctcaaaaagatagaacagtcataaacgaacttaccaagaacctctgcagcagagattcgttccttggggtttctgttaagcatcctattgacaagatgttttgccttcacatctataaacttccatgattcgctgtcaacgtcgattttggcactctttatctcagagaacatctgtgcctcaggttctacaatatacatacaatagatacgtatatataacaaagcaaaccccaagaagaagaacatttatgttagctttttaagtttgaacctgtcacaaagggaggtttgccgcagagtaggatgtacaatataatccctgcactccaaatgtccgcttctttaccgtattttccctgtaacacttcaggagcaatgtagtaagcactcccagcgaatttccggtgtacttctcctgtttttgttggtttagacaaaaaatacatcaaaacctgattcttgtatgagtcaccaaatccaactctatacgcatttgaaccaaagtaaccaaattttctcaaactaaagagacttgtgcaagaccaatcttatacatacaaaacatttcttatatactcctaagatggattctattaaagatcaacctctaaactcatttttgagtcgcaatctctaggcacaggaaccaaaagtcaccaaatttaaaacacaagacacaaaccaacatactccagtaccaaaaccaatcaaaggcaatcaaagaaaggaatctcgaagctaaccttcttcaatgaaaacagaacacccgaagtcgatagctttgaccgtagcattcttatcggtactggagagcaagaaattctcaggctttagatcacgaagcatcacacccatgtaatgacaattcttgacaacattcacaatcggcctaatgatttcaacagcttctttctcggagtaagactttccatctttggacaaagcttcgatctttttgaataactctccaccaccacaatattccataacaatatgtacagaatctctgtcctcgtaagctttcttgaactcaacaatgttcggttctccagacaaatgcttcatgatacgaatctctctcttcacggcttcttcatcttctctactctttagattcgtcttgagaatggtcttgcaggcgtaagtcttacctgaagtcttctcaacgcattttcgagttataccgaattggccttgacccaattcatccccgaggatgtaaacctttccgatgtcaacgaatggtttctcaagaatggttctttttgattgttttaggttcttactgctgtagcaacccattgagagttttcagagacttttctggtttaaagaagatgaacttcgaggaagtcagattgtcaaaatgtaagatttcagaagatggaggtttatggagaatcatcatctcaattctgaactcgtacatttgtggatttggtctttaagtcaatgttctttaaaatatttaaattcacatagttggtcaaaagcaaacactctggtgcagctagagggtttacaatgatttggtctttaagtcaatggtctttagaatatttaaattcatattatcagtcctaggcgttcggttatccattcggttatcgtttttttcggttctaaagtttagaatccattcggttattttgaaagttaggtttcggtttcggttcttttgctcttaaaaaatagtatccattcggttattttactttgaatattgtcggataattcagttattttcggataataggataatttttggttattttcgaatatttttactattttatatatattctcaagtatttttatttatttagtttagaaataactaatacttttgaaatttatttatatttcggatattttcggttatccaaaatatttcggtttatatccattcggtttcggatatttcggtccggtacattcggttcggtcaaaagaaaaactctgtttcagctagaaaggtttgcaatgatcaagaaatttacaagagaaaaggcctctgttttctccggtttagctttgaatctttgggtttaccaaaaccggaaaaccactatttagtgaaacaattacagagcttaatgatcaatggatacgaagaagtttcccttgtggctgcaaaccgttgttgtctttatcaacaatgctttctgaaaatgttcatctcgttccaatctgtgtctatgcatcgtcgctaatggaagatgagagccattgacactcgctgtagcagagagatggtttattgaataacaagaaacctttctcagttaggttaccttaaacgccaaggcaaattgtgaaagaaaccctaaaacgtagagcgtccgaaatattctattgaattctctgaatatttttgatgtttgtatttctcaattccttaggtcaagtatctataaaactacaacacactttataaggaatcacaaatataccaaaagaatgaattctttttaattggattttacaaccttgacaaacaaaaaatgtggattaaacagatcaaactaaaccatacaaatatgtattattcaataccttaaagcatgcaaatatgtattattcaattgatgatcggaagaagttccccttctggctgcaagctgctctcagttctcatcattgtgcggaattcctcaaagtttatttttccatcctgtaacagagttgttcattacttaacagtgtttcgaaaaaaaccggtctgatgtttcatgtttgatgtattgaccaacttacattatcggtatcagcatcggctatgatttgtttgatgctaccttcatctcccgcaccatcctccttcatcgccatctccaactcttccttcgttatgtgcctattgtattgtcaagcatttcacattttagttcaaaaacattattcgactaataagcaaaaagtggaagaaacatacccgtcgttgtctttgtcaaagtgttggaatgctttgtacacatgttcatctctatccaatttgtatctatgcatcgttgcagaaataaactcgtctatgtcgattgttccattaccatccatatcagcctgagaagttaatcattatgtgttacaaagttatattttttctttaaagacaagtccgatgcaataagtaatcaactcacagcttccatgagttgctccacttcggttttagagaggttagatccaagtctagtaagacctgttttgagttcttcaagagtaatatttccacttttgtcagtatctatgttggtgaacagtgtcttaagacctttgatttcctcttctgatagatttgctgcaataaactgcaaatcagacacacacatcataaatcgatgcttcatagacaaagataggaagatggatcatttcccagggtatgatatgtttccagtgactaggaaaatcacatattagtaagctgtttaagataatacttaggaggtagtagcaagaatagggaatggttcactctttacctttagaactaccttcttaaacttgttcgcatctcgaaatctcttcaaacgggataaaacaacgccatcaataggcttatccgaagcttctccttctttcatccaaggatgtcctatatacaacaaggagcattacagacaaaacaagaacaagatttcaatattcacatagtctaaacaatggaatttcttttgaggaaacaagccctccacaaacatagtgagcacaattctggatccttgaagcttcttttggatccagatatatatatttgtgttggct

SEQ ID NO: 531 - DNA, 91470 bp, Arabidopsis thaliana
ctagaaaggtttgcaatgatcaagaaatttacaagagaaaaggcctctgttttctccggtttagctttgaatctttgggtttaccaaaaccggaaaaccactatttagtgaaacaattacagagcttaatgatcaatggatacgaagaagtttcccttgtggctgcaaaccgttgttgtctttatcaacaatgctttctgaaaatgttcatctcgttccaatctgtgtctatgcatcgtcgctaatggaagatgagagccattgacactcgctgtagcagagagatggtttattgaataacaagaaacctttctcagttaggttaccttaaacgccaaggcaaattgtgaaagaaaccctaaaacgtagagcgtccgaaatattctattgaattctctgaatatttttgatgtttgtatttctcaattccttaggtcaagtatctataaaactacaacacactttataaggaatcacaaatataccaaaagaatgaattctttttaattggattttacaaccttgacaaacaaaaaatgtggattaaacagatcaaactaaaccatacaaatatgtattattcaataccttaaagcatgcaaatatgtattattcaattgatgatcggaagaagttccccttctggctgcaagctgctctcagttctcatcattgtgcggaattcctcaaagtttatttttccatcctgtaacagagttgttcattacttaacagtgtttcgaaaaaaaccggtctgatgtttcatgtttgatgtattgaccaacttacattatcggtatcagcatcggctatgatttgtttgatgctaccttcatctcccgcaccatcctccttcatcgccatctccaactcttccttcgttatgtgcctattgtattgtcaagcatttcacattttagttcaaaaacattattcgactaataagcaaaaagtggaagaaacatacccgtcgttgtctttgtcaaagtgttggaatgctttgtacacatgttcatctctatccaatttgtatctatgcatcgttgcagaaataaactcgtctatgtcgattgttccattaccatccatatcagcctgagaagttaatcattatgtgttacaaagttatattttttctttaaagacaagtccgatgcaataagtaatcaactcacagcttccatgagttgctccacttcggttttagagaggttagatccaagtctagtaagacctgttttgagttcttcaagagtaatatttccacttttgtcagtatctatgttggtgaacagtgtcttaagacctttgatttcctcttctgatagatttgctgcaataaactgcaaatcagacacacacatcataaatcgatgcttcatagacaaagataggaagatggatcatttcccagggtatgatatgtttccagtgactaggaaaatcacatattagtaagctgtttaagataatacttaggaggtagtagcaagaatagggaatggttcactctttacctttagaactaccttcttaaacttgttcgcatctcgaaatctcttcaaacgggataaaacaacgccatcaataggcttatccgaagcttctccttctttcatccaaggatgtcctatatacaacaaggagcattacagacaaaacaagaacaagatttcaatattcacatagtctaaacaatggaatttcttttgaggaaacaagccctccacaaacatagtgagcacaattctggatccttgaagcttcttttggatccagatatatatatttgtgttggctctagaacaatcttgaaaagagaaagaaaggaacttaccaagaacctctgcagcagagattcgttccttggggtttctatcaagcatcctcttgacaagatgtattgcccttgaatctctaagaggccatggttcctcgctgtagtcgatttccaaactcttaatctcattgaacatctgtccctcaggttctacatacaatagattacatataaataaaaaatcaacccccaagaagaagaagaatccagttagctttttaagtttgaacctttcacaaagggagatttgccacagagtaggatgtataatataatccctgcactccaaatgtccgcttctttaccgtaatttccctgtaacacttcaggagcaatgtagtaatcactcccagctaaatcctggtatacttttcctgtatttgttggtttcagaaaacaatgcatcaaatcaatcatatgaaaccaagaacaaaactaactaaatatggtatacttgaaaacaatctgtaacaacaaaagacaatgtaaaacccgattcttgatacttaacagtcaccaaatccaaatttcaacgcattggtacaaaagtaaacaaattttgctcatgactgaagcaaactaaagagacgtgtgcaagacaaatcttatagattcaaaaatgttacataccaaatccaaaactaccaactactaaggtgattctgtcaaaaaatcaacctttaaactcagttttggtttcatctctaagcattggaacaaaagtcaccaaattttgtccatgactaaagcaaagagttacataacaaatccaaaactaccaaactcctaagatgattctatcaaagatcaacctctttgagtcccaatctctatgcataggaacaaaagtcaccaaattttgttcatgagtcatgactaaagccctatcaaacgcagtcaaagaaaggaatctctcggagctgaccttcttcaatgaacacagaacacccaaagtcaataactttgaccgtagcattgtcatcgttactcgtaagcaagaaattctcaggctttagatcacgatgcatcacacccatgtaatggcaattcttcacaacattcacaatcgacctaatgattccagcagcttctttctccgagtaagacttcccaacatcgtacaaagctaggatcttgtcgtataactctccaccaccacaatattccataacaatatgtacagaatctttgtcctcgtaagcattcttgaactcgacaatgtttggttctccagacaattgcttcataatccgaatctctctcttcacgtcttcttcacattcttcgtcctttagctttgtcttgagaatggttttgcaggcgaatgtcttacctgtagatttctcaacgcactttcgggttagaccgaaattacctctacccaattcctccccgaggatataaatctttgtgatgtcaactaaaggtttctcaagaatggttcttttcgattgttgtagctccttactgctgaagcaacccatctctttgagaataaaaccttaaaagtgtgagatttttggaaatgggtctctttaatctcttttggctgaagcagatttgttatataatctctttagttcgaatttgttttattgttcttccaggcaagtggcaatattaaatttaagattttggtctttaaatattgaaattggtcatttctttatataaattgacttagtcctcgaagacattttacacaattggtagtttttaataggccttgaccttgaaccgaatattcgaaccgaaaaataactgaaccgaattcgaatccgaatttttagaattatttgaataggtcttagaccttattatcctaaaaaatctgaaccaaacccaaaccgaatctaatacatgtgggtatccaaatataaatgtaaacttaaaaatattgattatatatatttttataatactttaaatatccaaaattaaaattataaatccaaatatattagatttttttaataattcatatatattttgatttatttaagataaaagtaaccaatgttataattttctcttagataatttaagtattttgattaaatttagttatatttaggtaaaaagtaacaaacatatttttggataatcggatatttcgggtagatttgagtatatatgaataaaacctccaaatccgatccgaacctaaatatattttgaatatttttgcatttttactaaaataaccgaactaatctgaatcctaactgaaaccaaaccggattttttacaatagttctcaattccctacccagatagattcgatagccgaaaaaaaaagaaccgaacgaatacccaatgcccacgcataacaagttaacaacattaatggtgaatttatgatgaacctatctttgcctggagtcatataaatagtgaattttggtttggtctttaaatattcataatttatattggtcagtttgcttattagacgacttttgtaataaaataccgaattggtttctttaaaattttaaatatatagtattggtctttgggttttttggtcaacgttaatattggttctttaaatattttaacttttgtcgttttcaataattcttacaactttctttattagtataacaacaatataataaaactagtcttactgtaatttttaatttactaaactacattaaataagaatgcttctttcgtgcatctcacgtatattgaacatatccagcttactgacagattaccaaatcataaactcttttgttaaaatattccaaacctgttataaacagataaaatgatacaaagcatgtgacggttttagaccaataatatacgattaatcatctaaatgataaaaatatagcaaaaggatttttactctcttaaggtcttcataaggattaagcaagttctcaagaaaaataccaaaaaaagaagtaaacttgttattgttacaaagaactaagacatgacagaatctcaaactcagtttcagactaactaaggagaaggataaataactctgttcaaacacagagaagatagaagaacaatatgagacagtgtatcaactacgcttacactgttcttccatcctgtaacagagtttattacaaggtttcaagaacctgtttaatgtttgagatgttggctatatgttggagagtgcaacttacattgtcggtatcaacttcggatataacttctttgatgctagcttcatctcccattccatattctttcattgcactttccaactcatctctagttatgtgcctgttgtataaccaacatattaacattggtgcctcaaaatagttacacacatttgaatcttgattctcttgacacaagaaatgatcgatggagcgtgattcgtaaactgcaaatggaagaaacttacccgctgttgtctttatcaaagtgttggaatgctttgtcgatctaatttgtatctatgcattgtcgcagagataaatcgtagtagtcgattgttccattacaatccaggtcagcctgaaaagttatcatcacgtgtttcaagctttgtctttttcaaaaccttaactgtggaaagtgaagccaagatgctgaagataacttaacttcagtttcagagagtctagacccaagtctagttagcccagttttgagttcttcaagattcatatagagccgttttaactccacaaagatagtgagcacaaatctggatttttgaagcttctattggaactcacctaaattccacccaagttttatggagaatcatcatctcaatttctcaactctcaaggtctttgtacatttggatttggtctctaactcaatggtcttttaaatattcaaatttatgttttggtcaaaagccagaagatttgcaatgatcaagaaaattacaagaaagacatacaaacaatttcaaagataaactactatcacctctgttttctccggtttagttcgggtttaacaaaaccgattttgggtgaaacaaaaaacagagcttttatatgtggatcccaacaagtttcccttgtggttgcaagatgccatttctcatcatcgtacaaaactcctcatagtctatttttccatcctgtacaaaatttcataaccaagattcagtaccagttaatagttaaacctctaaaaataagggacactaatggaatatatagagggccatttacgttgtttttatcgaattctgaaatcaaatctttggcattagcttcatctcccataccatgctctttcattgctatctccacttcctccttcgttatgtgcctgtcgtataaacaaagccatatcacatttatgttttcaagaatctatctcactgcattttcaagtctttggttcgatcttgacacatttttttaattttttttttgaataccaggaggttctgggccgaaacccgtaatcccccagacccgaaaccacagcatgtaatattagtttcgtcctaatcgtcactcgaaccggcgacctctaagtttcgcctagggtctttacccattgagctaacgacacttggtcttgacacattacttacccgcttccgtctttatcaaagtattggaatgctttgtataaatgttcatctcgttccaaacggtgtctatgcatcgtcgctgagataaactctatgtagtcaattgttccattcccatcaacatcagcctgaacaaaaaagaaaaaagttaccatttttttgtttttgttaagatcaacaaatggaagtaaagagaagtggcttatgatgataacactcactgcttccatgagttgcttaacttcagtctcagagagtttagagccatgtctattcagccccattttgagttcttcataagtgattgacccgcttttgtccatatccatattctcaaacatggttttaagacctttgatctcctcttccgatagaccctccgcaataaccttcaaaccaaacgcacaaatcacaatccaaagttgaggatcataatcttgaagctactattttaccttaagagcaagcttcttaagcttgttcattgctcggaattgcttcatacgtgataagacaacattatcaataggcttatctggagcttcgcttttcatccatggatgttctacaaaccacaaggattttttagttagacacaaccataaactcgcactaacatttcagactgtaacatttaagacttcaagattcacatagtgtcactctaaggcctaaacaatacactagaagcttcatttggtaaacactaacaatcatgttttcaatttaaatgtttcaaaaatcagttagggcttaccaagaacatctgcagcagagattcgttccttcggttttttggtgagcatcttcccgataaggtgcttcgctttaaaagatatcaaaggccatggttggctctcaaaatcaagcctgcattctttaatctcagcatctacaatacaaagagtagacacaattatagattcaattcctcaagaagaacacatctcaaagtatttagctcaaggttttaccagtttgaaatggcggtacgccgctcagtaggatgtataaaataacaccagcactccaaatgtcgatttctttcccatagcttccctctaatacttcaggagcaatgtagtatttacttccaacaactctctcaaaagttttccctgtaaagtttgaaaatatatcgacgaatcaaacttactataaatagtatacttgacaatatgatcaaatcttgaattctaaacaagcttatgttattgagtattgacacgaagataaaaaaaattttggctcaccttctttgatgtaaacagaacacccgaaatcgatagctttaagcatagcattctcatctttactagagaacaagaagttctcaggcttgagatcacgatgaacgacatccaaagaatgacaaatcttcacagcattcacaatagacctaaagattccagcagcatctttctcagagtaatagctatgagacttgaccaaagcatcgatcttgtcgaataactcaccaccaccacacaattccattacaatgtgtatagaattattatcttcgtaggaacctttgatctgtacgatgttaggctgtcctgaaacatgatccatgatttgaatctctgtcttcacagcttctttttcttcttcgctgcttagagttctcttaggtatggatttgcaagcgtaactctttcctgttgaattctctttgcacaagtatgttgttccgaaattacctttgcctagttcgtcaccgaagctatagtgcttcttgatatcttccaatggcttcccaagaatcgtctcttgcttttgatccgagacgatatcagaagctgttaggggtttacttccgcagcaattacccatgaaccttggttagattttttctagggttttaggaagatgaatcgaaccaagattgttaaaatgtagtaggaatatttaaggagctgtggttttgtgatgaacatctctttggctggagtcatataaatggtgaatgtgttgttttgtttttgttttttttccgcccgattttaattagagttcaaacgaagcaaaaatgagaaatgttgtttacataagtgatataaatcggttcaatgcgaatatttcgcgccaaattatccgcttttacatttgcattacgaaaaatgttcttttggtcttttaaattcgtttttggtctttaaatattcaaaatttatgttggtaagtttactaagtcctccaagactttattagacgacttttgtgtataaaaccgaaagtataaaatgtaggaattatgagctggaatttgagttgtatacttgtattaataaaatactgacttggtctttaaatattcaaatttatagtattggtcattggttgtttaacttgtttttgtcaacgttaatattggtccttaaaataatttcattttgtcgtttaatctaattggtgtgtttttcttgcttctttatttattagtactgtaatttattctttaattgacagattgatcttaaaaatgcttctttcgtgcatcccacgtatattgaacatccagatttataattacaaacagataaccaaacaaataaattaaataataaactcttgaaaatatcttaaaatctttataggctaaatgatacaaagcgtgtgacgttcatagactgatactactagctaaaggccctatatctctgagaggcgagaccgacaccaggttagattcatctcttttgggagatggacccacaccaggttaaatacatcttctttggataagagatctctctcaatatacctcgaacccagcacctctacataaaaaatttaacactgggccaacagctcgttggtctccactcgctctttttgtatttgagaataactttttagctcttcctagaaacaaagacaaccaaagtgataaatacgaatcaccaaagaaccaaggaagaaatgtgcgcaacatgaagtcactaagcttgagaaaatcgaatctgacatgaagcagaatgtgtctcaaggagttgaaacatataaaaagattcaatcagtgcttgagcagattattgggagtagaagtcacattggatttagtaacagtgatgcaacagcaaaatgtttttcttttgcgcctgagaacaagctacattattcgagggcaagagtattgataagctaggaggcacgtgtggtagctcaaaaggattcgttgaggctcgtgaataagcaaagagaagcagagaaggcacgtgaaacagagttaaaacagagcaagaagaaacagattgtgtaaccaattgagagttgtatataaatagatagaagagtattgaaaaagttatgcattaatgcatgtatagatgtgtgtgtaacaaacttatcgtttgctagagaagagttaagaaatctcttgaacaaatctccattgttagagttcttgagtttgtatcttggattgagaagtgataagagagattcctaaggaactattactagcaaaagattacacttaaagctcataaggattaagaaagttctcaagaaagtttcaaaaaaatataagtggatatgttactgttacaaggagctaagacatgacagtctctcaaaatcagtttcagactaactaaggagaaggataaataaatctgttcaaacacagagaagatagaacaacattttgagacagtatatcaactatgctcacctcggtttacccccggtttagctcttctactctgggttcaagaatcgctttcggttgataaaccgttgggatttatgccgacttgatcaatggaatggaagcagtttcccctgtggctgcgtgctgccacttctcatcatcgcgcaaaattcttcaaagtttattcttccatcctgtaacatagttcattacaaggtttcaagaaccagtttaatgtttgagatgttggcttatatgttagagagtgcaacttacattgtcggtatcaacttcggatataacttctttgatgctagcttcatctcccattccatattccttcatggcactttccaactcatctctagttatgtgcctgttgtataaccaagccattattaacattggtgcatgataatagttgtacacatctgatacttagtctccatgacacaagaaatgaacaatggagactaattcataaactgaaaatggaaaaacttacccgctgttgtctttatcaaagtgttggaatgctttgtatacatgctcatctcgatctaatttgtatctatgcattgtcgcagagataaactcgtagtagtcgattgttccattaccatcgacgtcagcctgaaacgttatcatcatgtgtttcaagctttttcaaaaccttaacagtggaaagtgaagccaagatgctgaagataacttacggcttccatgagttgcttaacttcagtttccgagagtctagacccaagtctagttagcccagttttgagttcttcataagtgattgtcccgcttttgtcggtatctatattcgcaaacatggttttaagacctttaatctcctcttctgatagactctccgcgataacctgaaaacagaatacacaaattacaaccaaaatttcaggcaccagtagatatgaggcattgcaatatggagcatagagagattgcaagtggataattgaaatgcaaaattagtaataaagaaagataatttcataaaaaatttcagccacttctttacctttagagctagcttcttaagcttgttcattgctcggaattgcttcatgcgggataacacagcgctatcaataggcttgtctggtgcttctccccctttgatccaaggatgttctataaaccataaggatggctacatattagtaaagcattactagttagacgaccataaactcaaagacaagaacaagatcagacttcaacattcactagagtctatttagacctagaggtcctatacaatggactgactatcttgttctggctttgagcctctaaaatatgtaatcacgcattctatacaaacaggagtgggaaaaaaatactggtattcacattgtcttaccaagaacctgtgcagccgtgattcgtctcttcgggtctttggttagcatcttcctaacaagatctttcgcgctttcagatatagaaggccatggctcacttacaaaatcaatttcgccttttatgacctcatcgaatattcctttctcattttctaaaatataacatatgaatatagatcacacctcaagaagaaaacaaatcaatgaatttggttagcttaaaggtcttttaccggcccaaaaaggaggtacaccgctgagtaggatgtataaaatgacacctgcactccaaatgtcgatttcttttccgtaacttcgccttaatacttctggagcaacgtagtaagcactcccaactatatcccggtaaacttttcctgcatttgttggtttcacagacatatcatgaagcatattaacataagaatcaaactaatgaaaattacatacttgacaatatcataaagatgtgtacaaaagacaagataaactcgattctcggtactaaagtgtcttgagtctcatccctatgcattggaacataagacaacaatctagctcatgatcaacggaaaaaaaaagtgcagatcttaaataccaaagaatatgatcaatcttcaatgaacagagaaaacacaaaatcaattgttttgaccatgacactctcactgttactcgaaaacaagaagtactcaagctagagatcacaatgcaatgaactaccaaactcttaatctttgacactaaagagactagacaagcttatagattccaaacactaacaatccaaaaccaaagaccaaaaaaggctatattgagtctctagctaaccttcttcgatgaagacggacaaaccgaaatcagtagctttaagcatagcattctcctctttactcgaaagcaagaaattctcaggcttgagatctcgatgaaccacacccataaaatgacaaatctgaacaacattgacaatagacctaatgataccagcagcagctctctcagagtaatgaccttgagctataatcctatcaaacaactcaccaccagcacacaactccataaccaaatgtatagattgtctatcttcataagcacctttgatctcaacaatgttaggttgtccagacaaatactgcattatctgaatctctctcttcacatcttctttatcttgcttactaattagcttcctcttaagaatcgatttgcaagcataagtgttaccagtaccaatctctttacacatatacgtaatcccaaattgacctcgacctaattctttccccaagctgtaaaatttcctgatgtcttcgaatggtttacctaaaatcgtatctggatctcgaactgagactggatttgaagacggtgttgaaatctgctgatggattggttgagtcatgggttttggtgttggggtttgaggtttacgatgctcggggactacatgggtttgaactggattgatcgggattgatttttctccgccgtcgttttgagttttccggtgtttactgctgaagcaacccattagtaaaggaggagactttcgttattgggtagaagaaaaagatgagcttgaaggatgattggaagagagaaaccaaaatcggaagaataattgagttgtgaaggttttgtttgactggaattggaattatctatcagtcgcgtcaatttctgagtgtaatagatagaactgtttaagtaaattgtcttttgtctttgtcaatttgctgaaaataaaatatccacaataaattaattatatttaaaataaattaaatttgacttacatttttcaaaggaattttatggtaaaaaaatttcgaatatttgttctggaacggaaaaattccttgttttattggacgggtacagaatattccatttataattagaaaagtattgaatttcgaactgtcaagtgtcaatattatttttaatttcaaaaaaaaaatagtgtcaatattactttgatatatttttccattacagctgatataaaaaaaaggttaatgataaaaaataaccataaaattaaacaaaattaaaaaaataattttttgtcagaaaatttagataaataacattttttaaagtagaataaatactaaaaaatatctttctattttcttgtttctacaataatgccagtgataataaatcagagttgattaacatctgaataaaaaacatgaattatttacagacaacatagtatctaaatgaattaatattttattaaaacaatacatgacaattataaaaggaacatgcattattcagaagaaatacatcttattgttcggataggtatgaataatattacagtagagaacatgaaatatttaaaaggtgtagatcttttatataataccatgtatttttagaaaatgcatgtctaatataaaatgaacatgcattattcaaaagaaacatatcttattgtttggatgggtaggaataagatacgtgattacaatagaggacatgaattatttaaaaagtgcagatcatgtcaaataaatacactgcttttagacaaaatacatgcctaatataaaagtaacatgatatatgaaatgataacataacattgaaagaaaatcttaaacttttgagggtgaaagcaaatctcagattctaaaaagaaacgatatcggaaataggtaaatcctatatagaccaaataaatggaagagctcaatggttgaaccaccaaattgatgaaaaccaacaccgtgaacggctatagtcaaatgatttactagagcttgtggtggttattgtgatggagatggttatggagaaggtgatgatggtttcggagaaataaaaaattaatgtacggtttggtttagttagggtaaaagtgtcataaatgaggtgtaaaagttattttctctctcatactttttatctatggttattctctttattcttttgttgtcaaaggttagttagtatatatactctaaaaaaatagtatcgatctctttaattcgccgctacgaaggctttgattgggccttgtataatattgaattttcctttgcgatgatgactagaagttgttgattactcatgagagaaagataagtttgttttttcttgggataatgagagctatttacaatgttatttaaagccatgaaaaaacaaatttaaataaaagatatgatttgaacttaattttgttgtgttgccacttcttaagtttgataagctagtaagtgtgataagctagtgagtttgataaactagtaaactctaaatatattatgagtttgataagctagtatgctctatatatatatatatagttgtgcaaaaacttattataagtttgataaactagtaaatatatatatgtgagttgtgcaaaaacttactataagtttgaataagatagtaagctccatatctactatgtgtttgataagctagtaagcaccatatatatattttgtgtttcatatgatttattgcataatcaattgttcatttagtaaacttactattatgcatagtaatttactaaaggaaaaaagattgctagctacacgaagtataagagaatacatggtcacacataccaactatactattgtatatccagctacacgaaatagatgtattccataaccacgtatatgaagtataggacgtcatgtagttaacaccataaacatacaattccggtaaaccggtcagttgactccggcactgactagtgttgaccggcgttgaccaaaaaaaaattcaaaaagaaaattaaaattatttttaatattcaaaaatacgaaaatatttttttgcttttatatattccaaaacatattatatatttcgtaaaaatatatttgtattttcaatgcattaaatcttataataattagttttatttttaatttcaaaactaaaataaaactagaataaaaatcattattaaactttagactaaagagtcatatactcgatttcattaggaagcaatatgaaattgagtatatgactctttactctaaagtttgcatggtaaagaaaattataattttattttacatattctttagtctaaatttatttttgtatactatttagttcccttttgtaacaaatattattaagaaaagttctcgtaataacacataaacaaccaaaaacttgcaatttttctttttaatatataaaaagatagaaaatctaacaatgttgatttcagcaaaaaagtttgtaaaataaaattcatgtgtattatgttttattctaataatttttgtggttgaaaaatatttttttaaaaaattgtatagaaataattgaagtgttttaattgtcaatataaaaataagcaatttccttacttaattaactctaataatattttcctattttaatttaaattttaaaatttaataatgatttttattctatttttagtttagttttttttttattttaaactaatgaatatagaatatgtttttgaatatacaaaaccaataaaaattatttttcgtatttttgaatatttaaaataattttaaagattttttaattttttttgttggtcaacgacggtcaacactagtcaacgccggagtcaactgaccggtttatcagaattgtatgtctatggtgttaaccatatgacgtcttatacttcatatatgtggttatgaaatacatttacttcgtgtagctgggtatacaatattatagttggcatgtgtgaccatgtattctcctatacttcgtgtagataacaatcttttttcctttactaaatgcacgataatcaaactcactatcaattgtaataatttattgaggattgtggaaattcagttggatacttaacagtttatttcatagtcttttaagtgttttaatcatagataaaagaaagtatgtggacatgtagtcgatttatttgggctaggttaaatcactttatctatgtgcaatatttgatgatatttgactttttggatcagcagaatggctggtcaacaacaacattttttgttggtctcgtgtagattatatgtttctagatggaaccatttgatcaatctagtcaatacgtggtcgttgaacgcggcacatcataatgaaggacatgttatccaagatattcgcgtgtggttgcctggagtagtgcatactattttctttgacatggatgggaatattattggtgataatgttggtgtgcaaaatgagggtatttttgttatttagatttggtttattttttagtttaattatagacaaagtttaattacaaaaatatttatataattttaatgtatccttaatatgttaacttaacgaaaataatttattatgtactcaccaaatcaaattcaactgtgtttgggttgatgaagtaaaagaagatttatcgaaaataatgccacattcaagtattatttgatacacttctagtaattttttttttttctcataagtgttgtcattcattgaaactaaagtatgtcaaagtacatgtgtggaaacatccacttacaatcttcagacaacaacatgtgaaacttaaaacataacagaacttttaaactgcagactaacaactatggataaaccaaagttaacacagaggtatccatgttgcagaacaaaagctgaaataaaagctgaaactaaaacaacataccaaagcagatatgtcatttcgaactccaaaaagtgatacagagaccatatatgagttgttattcaaacctgaaactgaggctgccaacatgaaatcatggcaaccttaaaccaaaaaatgtgacaaaatgagcagagttcttaacgtttcttaggaggtttgagaatacctcccattctttgctcagtttcttgttgtttgtgttgtcttgattccttatctcgctgaagaatgatcaagttcttcctcttagatgactccccaagatgcatgttattgtgagattccccatcttgagcacctcttgatgattttcccacctcaaaaacttgccttactccataagtaatcgcagctccagaggcttgactgatgttagagtcagggaaaacctgatgacgtctaacaccagcttgagtagtcggaactgtgaaagcttggaaagctgaaggtcttgaagttggaaagtatggagtaactgctgccaattcttgtggattcaatggaggtgtaggcactcgtggaggtggatgtaaaggaaccggaagagagctatcagtcatttgagattgagagttaaagcttaatctcaaaacactatccctgaaagcagctctttccctgtcaatgctctgaaaccgttggcggtaaggacagtagtttcggttatgggcctgagtctctcatattgatgtataaatatgtaaattagtaaatttgtttgatgtataaataatcttctaataatgcacacatattaaaaatcatttaaaaaataattttcacacacagattaagaaatcatttaatttttttttatttgtaaagtaaaacatcatttattatctattcaaatatgattcaaccaataaaaaataatctgccgaatataaatcgccaaaactaataaaaaaactaattaatccctaatttatattaaaaattaaaaatatcatctaattttgaacaaatttcctcttaaaacatgaaatggaaggttaacgtcatttatactaaaggtttatgactaacgttagtatagagagccaggtttgtcaaatgacgtcttataagctgacttaatatcagaatttatgaaagtaacgtcggtttaaaagcaacacaaaatttttatagaccatttctactaaatttttatataatttgtttttatcaaatctaaataaaatttgctgtcaacaaaagaaatcttttacctaaattagaaagacaatcgaccgaaatgatgatatttatattgtttgaatatactaattttacataaagcataactttgtccttgatatgtggaactgttgtattcaaagccacttcacgaagtctttataagctgacttgctcgaagtcccagtttccctgaaagaaaaaagaaaaaaaaggagcaaaaacgctttaagagaaacattatactcaagattttcaagtgaaagcacaactatttaaaattacaattacgaaagggagaagatccaagtaggaaaaagcagattacagattcataagtgagctagtgaaatgattcccactatagctcaatgaccaatcctactggtgtcatatccaaaacacataagcaatattcagaactgttatctttacatgtatggtaaacttgactacaacaaacaataacatacatgatctaagtgaaatttggtccagttcataacatctcactagcaaatttcgtatcaactattgtagctacaacacaatgggttgcttttaataatattttttttcccgaaggaagaagactcggaagctagacaaagagaatatggattttaacaagttttacctgatctatcacaagtgcagaaagatccatcatgacttgagcaagatcgtttactgattcaagaacgtagacaaagtgtaagcacttgcctaatgcaactctctgactctacccgtaattcctctgctcattttttttatcttggtcatctggtgctcgtcaaactgaaaagaagatttcaggtatagattgcatcaataaagtacatatgaggaatgatggctataaactgaaagaataaaacacatatagaagttggacaatatcgccaaagtcatcttcttcaggtctacatctgtttctcagatcctcagaatctcagatttatctctatattcatcccatcaggatagtacattagagtcgtaataaagtttttgatgctcaaagggttcctaaggatgttgagaaaatgtagatgcaagataaagttattactaagttaacaactactcaaattcaaattcctttgacttttcagatcatttctgtatattttgagtatttgacaaacgcaggaaaaaggcaaatcagaagcatataacataaagtgcatcaaatcaataagattctcttaagagattggagaatagtacaaagaatgcataccttgagggatttaataccatgcaagctgcacaatggaaagcaccaaaaatgtaaagccagtcataggtgtcctagtttcttctacaatgtatccctaaacaactcaataggcaattgactaacgatttggagtcaatagaacatggaataatgcaacaacatttcaaatcaatctcttttacctgaatctccttaaaattcgcaaagagattgaaatctcttacctagaaaactttcatgaatccatcatcctaaaaccaaatcaagaatccttgttagactattcaatcgaaaaacacacaaatatgttatattctaccattcaatcttatcgatttcgaccaatggaaaagagaaactctcgacagaattagcaaaccacatgatcggattgagatgtttttttacctcattccagaagatcgatttcatagaaatcagatgcgaaattcacaaaaagcttcggataaagtattcatctatcatcttatatgcaatctccataaagtatccagcgtgacttgagatctatctcaaattaattgctgcacagaacgcacccgtaagtgccaagacccatcaattgttatcttccaacgagtctcttggtgagtctaggtttctgtaaatctctggaagaagattataaacggcaatctttatcatcaagccgcattgttaagcactggaagatataaaccatcttcctgaacattgttttgcttgaatgtgttcactggaactcctatttctgcaaggccaaagatgaacaacggctggatttctctaatctctaaaacacttatctcccctttctaagcagtgtgatcacaaagtctcatgattgctatctgtctcgacatattatcaattttacctaacgcaacctctctcatgatttccactggagataaagcctaaaaatgtccaccaattctcagtcatcatctactccaagatattgactttcattgcgagaaggactgaattcgaaggctgtattgtgcacatacttgtccagttttgtaaccattcgatatatctcccattgatatatctcgaactgagattgggtttgtagacggtgttgaaaatctgttgatggcttggttgattcatcttttgccaccgtcgttttgagttttccatgtttaagaattactttccgttggatctatgtagtcttggtcagtggaatggatactgtttcccttttggttgtgtggtgccacatctcatcatcgcacgaaattcctcaaagtttatttttccatcctgtaacatagttcctttcaaggtttcattacaagcaccggtttactgtttgagatgttggattatgttagagagtgcgacttacattgtcggtgtcaacttcggatataacttctttgatgctagcttcatctcccattccatattccttcatggcactttccaactcatccctagttatgtgcctattggattaccaaatagcattaacattggtgcctcataatagttacacacatttgaatcttaatcctcttgacaaaaaaaaagaaatgattgattcgtacactgaaaatgtaagaaacttacccatttttgtctttatctaagtgttggaatgctttgtgtacgtgctcatcgtgatgtaatttgtatctatgcattgtcgcagagataaactcatagtagtcaattgttccattaccatccacatcagactgaaaagttatcatcatgtgtttcaaactgtctttttcaagatcttaattgcggaaaagagaaagcaagatgctgaagataacttaccgcttcaacgagttgctgaacttcagtttcagagagtctagatctaagtctacttagcccagtttggagttgttcataagtgattgtcccgcttctattggtatccatattcgcaaacaaggttttaagacctttgatctcttcttcggatagactcaccgcgctaacctgcaaacagaacacacaaattagatccccaagttccggcactagtagatatgagatgtttcaactgattagagaacacaaagagatggaaagactataagcgagatgcataattagtaataaagaaagatttaatttcataatattttgagctacgtgattacctttagggctagcttcttaagcttgttcattgctcggaattgcttcatacgtgataacacagtgctatcaataggcttttccggtgcttctccccctttgatccaaggatgttctataaaccataaggattgctacatattagtaaagcattactcggtaaacgaccataaactcaagactggtattcacattctcttaccaagaacttgtgcagcagtgattcgtctcttagggtcttcggttagcatcttctcaacaagatctttcgcgctgtcagatatagaaggccatggctcacgtacaaaatcaattttgcattttagaatttcaacgaatactccttcttcattgtctacaaaataacatatgattacagatcaaaccttaagaagaagaagaaaaaatcaagaagttttgttagcttaaaggtcttttaccggcccaaaaaggaggtacaccgcagagtaggatgtataaaataacacctgcactccaaatgtcgatttcttttccgtaactctgccttaatacttcaggagcaacgtagtaaggactcccaaccacatccttgtaaatttttcctgtaattttggtttcacaaacagataaacataaaaatcaaaataaactaaaacgaaaacataaacatagttaaatctgtacaataataagacaacataaacctgattctattactaaagagtagagtcccatctctatgcattggaacataagtcaccaatctagctcatgattaaagcacaaagtgcatattttcgattcgtgaaagaatatgatcaatcttcaatgaacagagaaaccccaaaatcaattgctttgagcataacagtctcatcgttactcgaaaacaagtacttgatactaaaagagatttgtgctagacaatcctataggacccaaaacctatcaaacgcaatcatcaatacactaagaatatgatcaatctcgagctcactttattcaatgaacacagaacatttctgataagcacataaccagagtaaaccggtgtcatagaaaagagatgtggtcttgttatggctcctaaattaatgggattgtattctccactccccacgatgttagtagtagatttagtggttattttctttcttatttttgtgtatttaaagacttcaatgtcaagttaaggaatcagacttgaaaattgacaaaacagagtttatctctttggtactttgtgtgttcttgtgttaagacaaaacacatctctttggctttgaggagggaccacctatcaatttcaaatcggactcctttatgcataacattctattcttattctagagtatatgacatcacgattcagtgaactcctaagatgaatgtagatactaaagagacttgtgcaagacaatctatagattcgtaccattagcataccaaatcaacctaagatgattctataaaagatcaatctctatagctaaccttcttcgatgaacgcggacaacccgaaatcggttactttaagcattgcattctcctccttactcgagaacaagaaattctcaggcttgagatctcgatgaatcacaccattcaaatgacaaatctgaacaacatccacaattgacttaatggtaccagcagcagctctctcagagtaatgaccttgagctataatcctatcaaacaactctccaccggcacataattccattaccaaatgtacagaatgtctgtcttcataagaacctttgatctcaacaacgtttggttgtccagacaaatgctgcatgatctgaatctctgtcttcacatcttctctacccagctcactaattagcttcctcttgagaatcgatttgcaagcataaatgttcccagtcccaatctctttgcacatatacgtaatccctaaaccacctcgacctaattctctccccaagctgtaaaatttcctgatgtcttcgaatggtttacctaaaatcgtctctggatctcgaactgagatgggtatcgatggtgatgggatttgaggtttacgatgatcggggacttgatcaacgatatgggtttgaactggaattatcggaattgatctttctccgccgccgtcgttttgagttttccggtgtttactgctgaaacaacccattagtaaaggaggagacttttcgtagactttcttcttggattgaagaagaagataaacttggaggaatttgattgagaacacatttgtggtttgtattattgtatatgtttgactcgaactgtaagaaatttttgaaagatttgaattttgagctggattttggacttttttttcatataccggaaaaaatatatcgagatctcagattgggctgctctggaggccttaattgggccttagaattattgatgtcataagagaaagataactcttttatatttcttacaaagagatcagtttataatctttattctttagattggttggttaaaaattatgttgaagacaaaaagaaaataagaaaataagttaggcaaaatgtcaatggtccaatattagtttcagaaaaataattaaacttaaaacaagttaggcaaaatgccaatgatccaatataaaattactaaaatagactaattaatatttggtaataataaaaaagaatataaaattaaaacagaaaaactcatgaattaatatctgataactaacagttttaaagataacagttttattttaaatattaaaacaaaattgtccaagaacaaaaaagataaaggaaaaacaatctatgaaagattgatcttttttataacgtgaaaaatattaagtgatagactttaaaatattaaatttcgaatattgtttttaatttataaagaatgtggcttttcttttaaatttggacaaaattgtcatttacatattaaattttttaatctttattaaaagtagagaaatgtatatttttcaaataaaaacttaaaaataaggtaattttcaaaatctaaaaaaaaaacacaataactcttctttcataccatgcacatgcaccgcactgaatcattactcttacgtaaccatcaacgacgccgtgaagttatatgtttacttcccgtctgggaattgtcaaaactcagttgtatactaaacgggttattgtttcagtcatgacaattagattgtggacttgtgtttgtttcagttaaatcaatttatctccgtgttttatatgctgatttttgactttttggttcagtagaatggctgattaagaacaagaacagttcttgattgtcttgtgccgcctatcagcatctagatggaaccatctgattagtttagcaaatgcttggtcagtgaacacgggacatcataacaaaggagcagttgtgcaagatgttcgcatgtggttgcctggttatgtttgtttttttatatggatggcaacatcaatggaggtggtgggggaacggaggtggtgggaatcataatttaattgaggtgcagaaccaggattttgttgaggtttcacatgacgttgttgaagaggaagcccataggaagaggaagacgttgaggtagaagtggttgtagttgaagttgaagtcgccgtagttgaagttgaggcagaagtggctgtagttgaagttgagccagaaaattcacgttagagaaagagggttggtgctaactaatggataccatacaaacggcaacgtcttttgtgagtttaggcggtcttctgtacaaaagattagatcatcctcaatggtaggatattaatcatatttaatgaataaattttgaaattttgttgttaagagttttagtaagtttttaattttttagcaacctcaatagtagtatattaagttggagttttttaaaaaattaatttttaaatttttaaatttttttgaacttaaatttgatcaatagatgacataataattttttaaacatacatgtaaacataaagtttaactattgatttctcgtcgatttggtcgtggacaaccagagtcggttgagatgagagctaacatcgggaggacgcccgggtctaataaacacaggaccggagaacgcgagacggccatatcgattttaaggagatcttctgcttcctaccttcaatcgcgaggaaagagagaaagaggggagaaaaataattaaacgcaaaaaaatgtttttttgtttaatatttttcttccaaccaaccaaattattccatgtcaccaccgcattttgcttaagagcatctcttagcttaaaccacctctaaactgaattgatcaattaacatataaatttaatgatttataaacctaaaaactccctaatatcctccctttaatgatgctcttagacaaggttttatttgactagaactgcaattggaattttcagtttcatcaatttctactgtcttttgtcaattgaatatgatggaattggaaatttcgaaaagttgtgaattctgagcattttggattttttaaaatatcagaaaaatataatttgaggtctgagattgggctgctctcgaggctttaattgggccttacatgattgatgagagaaagataaatcttttatttgttttgtacaaaaagatcagtttataatttttagattgtttggttaaaaattatgttgaagacaaaaaaaaagaaaataaattttttggttaaaacaaaatttggtttatttcgaatttcggattttagatttactagattagaaatattaagtttttctttcgatacggcttgaaacttttacttcgattatagacaaaatttacttaaaataatgaatttaagttaatagttttaatgtatctttaatatgttaaattcaaaaaaaaagtcattaacttatgaacacacgaaatcgaatttagtagggttttggtttactctgtacaataatatataccgtttggaataatgtgacattcaggtcgattcaaatatttgacccacttctgataattttgtttgatgtgtcgcaagccaaattcaagtttggcaaaaatgcgtaagtgaactattagactataaaaatactaaaatagtacgtgtaaactaatgcacattttaatctatttaatcatagtcatcataaactatgacatgataaaaacaaagaaagaaattagaggtcaacattctacccaaacataatcgtaagtcaacgggaaagagctaatggctttgaaatatgatcaaaattaaagaaccgacaagatcgtgattgatgaatgagttatgtggccatgttcggtctttacagctttttccagtttctcttcacacacatccattttccatttattacattgaatttatattattacattgagttataatatataaatcgtatatatatttccaaaatattagtaacaaaaagtcgtaacgcattacaactatttttcctcgtcatgctttaggggttgagaatattatgagttttttgctttggaagaaaacaaaatttaggtaaacattgttgttttataatgtcttcgaccattagtggccagtacattatatggcaagctacaacttccaaaacgtatagaatttttcaaacaggcttcgacatctacctgctatatatacttagaatatgtcatgtataaagccgaatatgctatatgcatggtgatatattacttgttagaggcgtagagcatattcgttcattcacagttaaactgctttttcacaactattaaatgttaatatgtcatagtgcatatcgaagaaaatgttttctatgcaagtatatacatgtgcaacaaaaacaatatatttggtctctttggtacgactcgttgcaactgaggaagagtacgagccgatatgtttgacgaaattttgcttagtcagtgtaacaaaaaaaaaacagatttatgttttgttcttttgcttttagaaattagaactggtatttcatcaaatattataatccattttgacatagtttaatattatctatgtagctgttcacttaaaatagtcattttaatataatttaaacatcacataattttttgataaaacatatttttctaactttctcatcagctttaacctaatcccaagcctaattaaacaagccatatgcaggttttttgtgagccatgttttcacaaaatcaattaattctcaatatacatcgacaaatcaatcttatgatcttttccatgttcaaagttttagccggagctcccaaattaaccgaactttcctttttttttttttttttttgaataccaggaagttctgggccgaaactcgtaatccctcaggcccgaaactacatcatgtaatattagttttgtcacaaacgtcaatcgaaccggcgacctctaagcttcgcttagggtcttataccaattgagctaacgacacttggtattttaaccgaactttcgacatacacaaataattatatttgtttcacaaaatttaagtatattataaaatataagacaaaaacaaaatcaagttcatcaaacttgaagagagaagagaggaggaagatcagagatagttcgagaagaagaagatgaagaagaagaacacaagaaacgtttaaaagatttgaggaaacgagtgataagattattgcatatacaagtgttggtcttcctcagcttcctgagcttcttaccaattctcattcttatcccaaccactctgatcataatcaacggtccagatgatctcctcctctgttgatgctgtctggtcttgctatcggctcgttctaaaaccttttgaattagaaattgagctcgtctgtgaattagctcttgagggtcttctttctccatctttgtgtactcgtatggactattcttcaccattaatgccattgattctatcttctttttttgagttcttattctatatattgtagtatgaagaaagattgagtaagctaataacatgaagcagaagtatatatatagtgaaagatgggcagagaaagagagacaccatgtgaggattattaattaggtatatgaataatattaatgtgtgtacatacatgtggattaatgataaaattattttccagttggtttgccaagactatattatcttacacacgaagagtgtgatcggtagtttttagagtgaatatacttggacaaaaattgagatattggcttgaaaaaaacatccacaagggtaaaaatgtttattttactattttagattgaaaaatttatagtttatttattacaaatatttcaacatattggaattaagatgatgatttataacgtttacaacaaacatatctattttttatgaatggaagattcaatttgcaacatatatgaataatcatgataacctttcaacttgcagaagagtttctgaattaaaatatataatatatatattctcaataaaaaatctctaaaatatcaattgactctatttccaataaatagaaggagagagaaaagaaatatatttttaatttttttgttttatcttgattagtataacttgaaccaaagttgaagtaattagtttttagtttctttttctattctaaaagcatattcaatgtttatctctatttttttctttattttagatattattttatttgagaggcactttgttccaaaaaatagactaatctctatttatgttttctattttagagaaatacattagagtaaaatcaactcaatttcctctaaaataaaagaaaaattaaggtgtgcattagagatggtctaaatttctaattatgttaaacaataagaccattaatttgatatgttttatcaagattaaaacatatttagaggcggccatcacatgaaagacttaaatttagctttgacttcaaatgattatataatcatcattattgaccctttaatttgatattagttaattttatgtcaagtttgctttgttttttggcctttaacttttggtggtatttatgtggcaatacttgcatgcatgagctctttttctaaagtatccgatgatggacgcaacatgataaagaatctcttacgtaatagtagtacgagtaatttattaatcatgtattgattgtttaatcgtcttcaacgttcgataatgattaactagtcaaccatgtatatttccaaacatttaccattgtaaaaacttatttatactactctttctgtttctttttctgataaattttaaattaccctttacttcttcaaatcgtatgcatgttttgagattttagatttccacacattttaagaaatcaattgcaataccaaatcaaatctagtaacacatgtgttatgcataaaaacatgaacattatagaaaactgaaaatattggtcactactaaccaagtgaatttctagttattttgggaaaaaaaaactcaagtcttatgaaatagagagaaatgatccatgtttacattaatcataagctctgaagaaataagttcgaaatcctaccgtggttgatatttttttgtaagttaatgagaatttttttggttgcgaggaagctgtaagctgtacgtctaaggttttgaggcttgacttggattgtaaagctcgtggcaactaagtgaccaaatcttactcgaataagctttttgacgatcgacgcttgtttaagatgatatctcctcgttatttcctagtcgattgatgcttgtttgttacttttgttatgttgttgtgtttgtttgtctaatttcgtagatctttttagtattttctgctacaactgaatcattgtaacttctatcaaaatttgaaaatggtttaaatttaatcttttaccaaaaagtaaaataataataagtttgaaatgtttcctttttgtaaattaattgtttttgattaattcaaaaaaagacttttaaaatataagaaattttttcatccaaatagatagaaataacatattagttatctcatatcatatatttctctcaaatgttcatcgtattcatttgtagtgacaaccatttgcatcctataaaccccaaaaaataaatcattcgtcaggcccaatcatgtcaaaattaaaatacttgaaaaatacacaatcctatatcatagctgacgcatttatttcatacggcatgccggcaaaaacgtcaacagaaattaaataaaaagaaaagacaaaatttccaccggcaataagctttgaaaattatttcatatagtactaataataataaccaaaaataatgctgatatgaatgaaaaaacaaagaaacggtgtcataatgatgggacaagcagagttgagatctgtgtgagtgagtgattacctgaaaagtcaactcaccggcttaagaactcggcttttgccagctctctctttttaagccttctttaatcaatcatgaaacgatcctcttgtgtagttgcaataagttgctatttttctattgaattttgtattacaaaactaattcaacaattatttacaactaatttcctcaaaagagctattattcagaccagtttgtatatagtgtcaatagaaataagtgtggagttctttacagaatccaattaaatcctgaactattttaaaaattgtctctaaaaaatgacttgacatactaacaacaaaaagtattttaaggtagagattcaaattcgtcaaaagtaaccaccgatgggagatttaattgggactctagtcactgaaagtcgaatctggagatcaagacggcgaagaaattggtttcaagaggttagggtttgattaagagagaattgctaaaaaagaagaaataggttagttttttttgtagtttctcaaacataataagagtacttttgtcatttaccagatataacgcgtttgacgctgactttcattagcatctacaattgttagccgcaggatgctgagtttgctgcagctacttgcgtcaaccaaacgaacatacatactcagttacgtttgccaccgccacaacaacatgtgatgaccaaacgaacacgctaattatacacgacaaggatcctcttattcttcttgcgagtcatgatcccttttacaaatttataaaccttgtgatattatcttcactaatataaaacttcatatgggttgcacaagtttgcaaatatttctagctttcgaccaaaagcccaaaataatctacccctctgccaaacaaagtcttccaaaattttcttatttgcttcccattagaccatttgtagctatatgcattaggttcttttgaaagagaaagaaaaataagagaactgcatcatgttagtcttgatatctattcaattatcgtaccctaaatttaaaatatttcttaccaaaaaataaaaattttggaacgaaaagcgagaaaaaactcggcttttacgaaaaacaaatatctgatgacaaaaaaacaacaaaatacaaatatctttcaaattggtaagcaaactctttaacaattactaatccgagttagtttgttttcatatgtcatatcaacaaaatccatcctacatacctcagatttttagaaaaccgaatccggatttttgtagtctacaacttaaagacactattgaatctacaccatataagtatagtgaactgtaacattaataaacatgttcacctaaaaaagaaaagaaaagaaaagaaagtaaattatcaacaataatgaatacttgttttcttaaacgggcctaagtaacaagaaaagcccaatacgtgaaacataagtatattcactaggctataagcccataaaacatatgttgaatagactcacgagtcacaagtccccaagtctcaacagacggtggatgatgctccgagtctgactccggagaagaaaaagtatatgtgtgggattggtagttgccacgtgagtacgtgaccctgcgtggtagttggctattgattagtatttgttttgatgtccccagtccccacttttgttactgagctcgacgttttctttcttagtaaataattgattccaacctaaagcgttgtctaagatgactttagtttttataatattgtcgaaaacgaaaatatgttttttataaaatgcatgtttgttactagcatagctcatatacattatggtccgcagtaaaacaagattctgtttactctacttgaatttcaaccatttctcatgttgaaagttacttacttgaacttggacattgaacatatatagatgaatatccaaaacttaacacaccaatgattttagaatttcatgtgtctctcttattgcattatttaagaaaatttgccacttatgatatgaactaacaccagtactaattccccaaacatatttattaaccaattattttcacgcatttatttgaagattcgaattatgatttttgtcttttcttttgagtaagtttttttttttttttttgaacaaagagtaagtaatacttaaaaacaattccatgtccataaaattttactttatcaaaaaagaatactattaccataaaagaggtaacacaatctgtgttttaagttccactacttcaggagaccaacaatcttccaaactcaaatacaaaaaggtttgagactttttccaagatttgtctcttctttctttattctacctctaaaacaaaaatcctaatcgagttctctataatattcaataaagattataattcttcttttatcttttgataaaacttgtgctttcatgtgattgtgtttcactttgatttataatctcagattccaaaaatggcggaagaatctttattaccatctcatacagaagatgtatcagcttctcctaataaatcttcatcacttctgtctgaaatatcaaatgcttccacgagaccttttgttcttgctttcactgttggttcttgtggtgccttgagctttggatgcattgtgagttcctaagttccatttttttgtaatccttcaatgttattttaacttttcagatcaacatcaaaattaggttcaattttcatcaaccaaataatatttttcatgtatatataggttggatatacagctcctacacagtccagtatcatgaaagacttgaatctatccatagctgatgcaagttcaattattatttgagctctttcggtctattccggttctttgtttccggttcgatcggttttgttcttggttcaactaatttttcaattattgttcttttttttgtctttttcagttttcattttttggatcgatattgacagtggggctaatccttggagcattaatttgtgggaaattggcagatttggttggtcgtgtctatgtaagtttttccactttaagaaaattactagcactaaatttacgaattttaactatacaattatggatgtaaccaccattttaaattaatcttgaaccagacgatatggattacaaacattcttgttttaatcggctggttagctattgcatttgccaaggtttgcgagtttcttattttatgttatgtttccataatgaaatgttgattaactcgaaaagtgaatataattctttaaatatcttcttattctttttttctgtatttttttgttttgttacaaaggatgttcggctactcgatcttggaaggttattgcaagggatctcggtcggaattagctcatatttggtatgaaaaatgattataaaatataaatagaggtctttaatcaagagaaatgccttgaatgtaggttgaggattaatatttctaaaatttagtttaataaggttatacacatcatttaagaccttatcctaaacttaaaggaaccatatatacttcaactaagttgtgttatttttggaaatctaagatttttatggtaatttggaacacaaagcacaaaatgtgtaataatttaatcctttcagtcaaagaaaaaaaaattcttttaataaatttttcgtttatattctctgatattttgattcaatggtgcgtatacattcaacatatttgatagatttgggctttaactcagcttctaactcgaaaccaattggcaatgaatagagtgaccctaaccttttatatatcactagatatttcctctaacttcggatgtgagactttctctcattaacagtattaatttacttgtaaatgtacttttttagtttcagatcgatgtgataatttggtaaattcaatgtgttctataaactttgagatttgaatttattgaaaatgaaatttcatattagattctggtattgattaatcacagggacctatttacattagcgagttagcaccaagaaatttgcgaggagctgcttcttcgttgatgcaggtaaactaagagaagcagaatccttgaaaactattacaaaaatataacataattacataactataagttttaaatgttctacagttatttgtcggtgtgggtctatcggccttttatgctctcggaacagccgttgcttggcgcagtttagccattttaggcatgtaaaggagattgattcatatcaatgcatgcaccaatggatcaaaaattcttgtttcattcgaagagaaatatatatattgtactaatgattttgtgttttgtctttggacaggatctataccttctctagtggttctgcctcttcttttcttcatccccgaatctcctagatggctagtaagcactcgtttatattatccattttcatcaatttgtttggtcaaaatacatttgcatttacgcttatgtttacgtacgtgttaagtttcatgggatttcattgtctcttatacactacaataggtcccgttaaacttcaattaatgtaaggatcgaaacattgcattttaaattcttggtcttaccttctaagaaaacatgtattaccttcttggtcttcttttctaaatgagggatcatctcaatgttcttttttttttaatatctggattctagaagttcaaacacaaagaccctacatatcctagaggcagaatccacaccaagttaaattcatctcctttggagaagagatccctcccaacgtacctcgaacctaacacctctacttggaaaatttaccactgggccaacagctcgttggtcatctaagtgttttaccttataagaaaacaaaattttagtgtttataccaattgtcttttggaaaatataacaatcaaagctgataagactagaaccttactgaactatgatggtcatctaaactcttggttccaaatgtacacgattaaaaacaaccagatcctgtttgtttagcctaagtctcttccgttcatctccaacccataaaatacgattaaagttaccaaaggctagcttatcaatgatttgatcattgatgaattttgtttgtaggctaaagttgggagggaaaaggaggttgaaggggttttattaagcttgcgaggagcaaaatctgatgtatcagatgaagcagcaacgatattagtaaggatatataaatatacatgcattataatagtcatatgatcaacatatatatttacattgatttcccaaatttttgatgatcatcaggaatatacaaaacatgtcgaacaacaagacatcgatagccgcggtttcttcaagttgttccagcgaaaatacgcgttgccactaactgtaagtaacttttcaaaaagaggtaacaacataaaattgaaaacattattatctttgcattttcttaattattcaacccttttgttttacacagattggagttgtccttatatctatgcctcagcttggaggtcttaatggttatactttttacaccgataccattttcacctctaccggtaaataataaccccattcttcttctttgatatttcttcatcaaacggtcaatcattatctgattgaatgatcaggtgtatcaagtgacattggattcatattgacatctattgttcaggttttactaatataagatcataaagcatgactattattcataagtttatttttcctataacaatctatcatcattcttgtagatgactggaggcgttttaggtgttttgcttgtggatatatccggaagacgttctctcctactggtaaacgaaatttaaaactcgaaaaaccgaaagtgtataaataatcgaatcgataagttatttgaaattatttgttttgaagaagattaaagagaagattttttgagtgattgtagttttctcaagctggaatgttcttgggttgtctagcaacagccatttcattcttcttgcaggcatgtttactagtctactaaaccggtggtttggtttcaattttgaaaaaccggaatgtaatcttttttgggtttcttactctacagaagaacaattgctgggaaacaggaacaccaataatggctctcattagtgttatggtaattaataatctatcatcacaataaatagatatattcaaaagaccattatttaaacaatgccaaaactgtaacatggtgttttgtgtattttatcatattaggtgtattttggatcatacggattaggcatgggaccaataccatggatcatagcatcagaggttgattaatcaattttaaaaaactaacccactaactaaatgttaaatcattataacgttactattatttttattagatttaccctgtagacgtgaaaggagcagcaggaacagtgtgtaacttggtcacctctataagctcatggctcgttacttactccttcaattttttgcttcaatggagttctacaggtaattaatctttaatactccctctgttccaaactgattaattttttagaaaaaaaaatatttttaaaagattgatattttaagtttttcatacaatatttattgattagtattgatgaattgtaatttaaaaaaaattaattaattatcattggtttaaagttatagaaaactgtaaaacacaaaaaataatatatttatattcaacatttaatatattttcttaatatgtgtgtcttttctacaaaatcaaactttaagaaacataaagaatatatttttattatatacaaaaaggttttaactatcataaagaaatatttgagaaaaaaaactataaaaaacaaatgatttattccataacattattgcaggaacgtttatgatgtttgccactgtgatgggtcttggatttgtgttcacagccaagcttgttccagagaccaaaggcaaatctttagaagaaattcaatctgcttttactgattctacttctgaagattctacaattttctaagagataaaataaaattaccttcaaactttaatttcagatctctttatatttcatggggtttgtctttcttttttccatcgtatttttacgattgggtcattggcctataaatatttattaaattggtccctgaaagggatctacagttcaactgaaaagcttggttaaggcatatattatgatatatatcatgtttatatgttttcgacgcaacaacaatatacaacctgataaccataaaattacaaaatcttaatagcatctctaatgattgtctctattttttcatttaaatatagagaaaaaagttaaaaaaaaattatttttacactaatagtttttgaaaaatagagatctctatttgttacaaaattttttttagaaaaagtagagatatctatttttgagataaaaataaatatgaattacagtgaaataaaaacaaaattaaaatataaaaataaaaatagagatgagttggagatactctaattataaaaaaaaaacaaatagaattgatggaaaatgagatcttatgacgtgaaatgcttgtttacacatgtctacagcttttacgtaagcgcatttacttgcatttaagattgaaaaatatttgagaaccttatattcacctcctttattttagccaattaaaatctgaaacctaataataataaaaagaattttatttaattataaaatctaagttgccactaaaatgaaattatgtatcggtttggatttattagaaaaagtcaaggtttaaattttatgattaaacgaggttaaatatcggtttgagtttggaaagtgcgattagagtttagatttgatgattaaacgggttaaatattagtttaaatttataaacagatttagattttataattaaacgaggttaaatgtcagtttgggtttagaaaatacgattaggatttagttttttacgattaaataagtttttaaatggcgatttaggtttacaaaggagaattagggtttagattttgtaattaaacgaaattatatattagcttggatttataattataggtttaatttattatgtaatttaaataagatttaacattgcatgtttttattggttaatacaaaaggagctgaataaatgggtgaactcaagtttaattctttaagatttcacatgttttaaatgagtgaaaatccagaccaacaaataaaaatatagatgattcgattttcagaagttggtaacaaacttgcacgatctaagtgaatccaaaacaatagataaaatatggtttttaataaaaacaattaaaataaaatataattatagttataatttaattacctatgttaattttttatatgttttcttagaactaatattatatgtccacgagaaagaaacaaaagcaaacacaatttgtgtttagttttcagttccgctatttttgcagtttttgctccacgagaccaacaatcttccaaactcgaaaaggtttgagcattttcctgaagcaaatttgattcataatcacagatttctgaaaaatggcagaagaaggtttattattaccagcttcttctacttcttcttcttcttcacttttgtctgaaatatcaaatgcatgcacgagaccttttgttcttgctttcattgtcggttcttgcggcgcctttgcctttggatgcattgtgagtttcctaatgcgttcttgcatgtttaattttttattaaacctaattaaaatgttactatttgattctttatgttcacagattggatattcggctccgacacaaacaagtatcatgaaagacttgaatctctccatagctgatgcaagttcaatcacttttttatttttttgttgctcttacggtttattccggtttatttctggttcgatatgatcttggttttcttttctttgctcagtattcactatttggatcgatattgacggtggggttaatccttggagcattaatctgtgggaagttaacagatttagttggtcgtgtcaaagtaagtttcttctacttaagaatgattagtgtttaaaactttcttataacgaattggatatgattatacaattatggttattaatcatctttatgtgattattctctttctaactaagactatatggatcacaaacatcctctttgtaatcggatggttcgctattgcatttgccaaggtttgtttctttctgagttctttctataatggtttagattgtactgtttttaagtcgatatattattatagttcctcaactgtatcttattactatttttgttctttgactttttggttacaaagggtgtttggctgcttgatctcggaaggttactacaagggatctcgatcggaattagcgtatatttggtatgagtgaatactaaaactagaagggtttggtattttttcttatttatggtgtgactttttgatttagaggtagctagttggtaatgtagttatgtagcattgaaacttatttgatatcttgtaacttgtaagttttatgttcagatatatttagttctcttttgtaacaaatcttatgatctgataattattaattacagggaccagtttacatcaccgagatagcaccaagaaacttgcgaggagctgcttcttccttcgcgcaggtaaaactcaagagaaccaaaagcttggaaactattataagcattttccttcactacaagttttgaatgttttacagttattcgccggtgttggtatatcggtcttttatgcacttggaaccatcgttgcctggcgcaatttagccattttgggtatgttaaaaaagaccgattcttatcgatttgcaaaaatcgaaaacttctcatttctcgaagtacaagaaaatgtactaatggtttttctttgaacaggatgtataccttctctaatggttctgcctcttcttttcttcatccccgaatctcctagatggctagtaagcatttggttataacaaaaaacttttggtcgaatatcttaaaatcgtaaatcaaataaaccaagatgaaatttgttggtaggctaaagtaggaagagaaatggaagttgaagcagttttgttaagcctgcgaggagaaaaatctgatgtatcagatgaagcagcagagatattagtaaggaccttctaatctactgggtttcggtttggcatcgagtccagtataataaaccaaatataaaccatgaaatttgaatttatggggaccaaagattcgaacctccaattgagggtgaaactggactttaacttctattttttgtggactaggattgcgatccgaattctgtatagttatggtgttatataaaacttattaggggagacaggtcgttcatcctttttgattttttttataacataaatttctaaacaatttgatgattatcaggaatatacagaacatgttaaacaacaacaagacatcgatgaccgcggtttcttcaagctatttcagcgaaaatatgcattctcacttactgtaagtaactattcaaaaaggttaaaaaaacttcaaaatctagcattattttgtttgcatttgcttgatttatatatttcatttggtttatatacagattggagttgttcttatagctttgcctcagcttggaggtcttaacggttattctttttacactgactccattttcatctctaccggtatataatccttcttcttcttgtttctctttatttgatctaacataatgatatgattacttcatcaaatggtccttaaatactatccgatgatccaggtgtatcgagtgactttggattcatatctacatcagttgttcaggttatagttatactaatacaataccatagagcatggttagacaaaactctttccgtataatattctatacactttttgaccaatcatttttgtagatgtttggaggcattttaggtactgtgcttgttgatgtatctggaagacgtacactcctattggtaaaacaaaatttaaaactcgtatccgaaatcgatatgttaattttgttaggttttcgaacaaagtttaggaatatattttgagtgatcattgtaggtttctcaagctggaatgttcttgggttgtcttaccacagccatttcattcttcttgaaggcatggttactattccatctactctactaaaccggaaattaattttggtttgttataccggaccttaaaattaccggttatttcgttctacaggagaatcattgctgggaaacaggaactcctgtcttggctctctttagtgttatggtaattaataagggttttaggatttagaatttaaaatgttttttagatataaagttttagactatttaaatttgaaaatctaaaataattttctgattttaattttctaatttagtgttgaattttcataattttcccgtaacaactgtattttgatttttgattatttattttattaggtgtattttggatcatacggttctggtatgggatcaataccatggatcatagcatcagaggtaaataaatatttaaaaaaagtttaaaaatatatcgcagacatttaaattatgttacactcattataacaattatgtatcgcatacatctagatttttaaatcattagttcaataacactgaatttcattagagtttttaaaatccgtgattgaataacatcggatttgtaaattttacacaaataacttaaaatactagattgaatacatccctcttaatgtttttattttcttttcaagatttatccagtagatgttaagggagcagcgggaacaatgtgtaacttggtcagctctataagcgcatggcttgttgcttattccttcagttacttgcttcaatggagctccacaggtaaaaatctttaatacaattgaactaaagttgacaaaaagttgatttggttacaatttctgaattttgaaaagagagttgttaactaaaagtctttgttgcaggaacatttctgatgtttgccacagtggctggccttggatttgtgttcatagccaagcttgttccagagaccaaaggcaaatctctagaagagattcaatctcttttcactgattctcctcctcaagattctacaattttctaaacttctcccacaactgtataagatagaagtatgtaaacaaaaaaagtttattgcaatatagtttttacgtgattcacaaatattaacaaacacctttcacaagattcacatgaaactaccaaaacattacaaaataatacaaagttttactcagaagaaaagctttattgagaagaagcacaaagaccacccctttttttttgctgttctgtaattatgagttttgttttaacccactgatccttcaagcttgatgctcataagctggttaacttcagctccaaactcatcaggtaacttgttgaaaacatctctgcagaaaccagagatcattgccgctaatgctctctcgtgatcgattcctctctgctggaaatagaatagctgatcttctccaatcttagaggtactcgcttcgtgctctactttcgccgatggattctttacctgttattgttccagaccaaccacaaaacaaaagtggaaatcaatcacaaaagagcaaaaaactttacagctttctcatagcttataataaagattggatcattggcaatttacctggatgtaaggataggtatttgcagctgctttgtctccgataagcattgagtcgcaagtcgaagtatttttagcaccctcagctttggactgcacctgaacaagaccacggtaacaatttctcgaatgcccggccgaaattccctttgaaatgattctacttttggtattctttcctttgtgaatcatcttagtccctgtatcagcttgctgatagttattagtcaatgccacggagtaaaactcgccaacagaatcatcgccttctaaaaccacgctcgggtacttccaagttatcgcagaccctgtctcaacctgagtccacgagatcttggaacgatccccagcgcaaagaccacgctttgtgacaaaattataaatcccacctttaccttgttcatccccagcataccaattctgcaccgtggagtacttaatctcagctcctttcccacaatagagctcaaccacagcagcatgaagctgattcgtatcataagaaggagcagtacatccttctaaatactcaacaaaactcccttcctcagcaacaatcaaagtcctctcgaactgaccagtctccatcgcgttaatccggaaataagtcgaaataggcatcggacatctagtgttcttcggtatataacagaaagacccatcgctgaaaaccgcagagttcaaagcagcgtagtaattatcatcactaggcacaactctacctaaatacttcttaatcaaatccggatactccctaatagcttcagatatcgaacagaagataacaccagacttctctaaagtcttcctatgagtagtagcaatcgaaacactatcgataaccgcatcaaccgcgacattagccaaacgtttctgctctgttaaaggaacacctaacttatcgaaatactcaagaagctgaggatcaacttcatctaaactattcaaagttggtttctttttaggagcagagtaataacacatatcctggaaattaatcgaaggatatctattatctgaccatttaggttcttctagtttcagaaacttagcataagctttgaacctaaactcaagcatccaatctggttcctctttcaatttcgaaatcaaacgaatcgtctcttcagataaacctttagggattgtgaaggaatcgatatcttcaacgaatccgtacttcttatcgtaatcgagattttggaaatactgttgaagtttatcagttgagctaacggttgatgtacctgatgatgatgattcagaagctccgatgggacgagaatcgattccaacatcggctctgagtttgaagatcggtctcgttggatttagggatttgggagatgggaattttaaggattcgggttttgggtgaaacccttttggtgattttgaggaatcggaagtgggttgtggagagaagctggagataccgtttgcgagaagagacgccattgttgttggtgtggctcttaggagaagtaaaagaagattgtttttttttttttttttggagtcgtgtgttagaaaaaaaacaacgattaggaaaaaaatgaagaagagatgaaatgttaatatttatggaattttctgagccgtagattgaagatagtctcgtgtcagccacgagacgatttttttgttggattttcacttttcagctcaattataaaccacatacgttttccactaactaattataaaaaaaaaataacgttgatctcttctttatttgttaaaaatctcttttagatattagatattttttatacttggacaaaacaaacaaagatattagatattttataatccgatttacgggttggtttcttgtttttgttaatgaaaaaaaaaattagtttgatcttttatttcaaaaacttaataatattttattttaaaatttgttggttcattcatttcagtttagtttggtacactgaaatcagttttaattctttttttttctcatctgaattatattagaaactaaagtagaatacaagttgaaatacataagccaacagaccaacggaatattttgagaaacttagctgaaaaaaaggaagtaaaaccaaaaacatatataaggaaacattttaaaccaacgaaattgaatcaagagacaaaattcaaaagaaaataaaaaactatgggaaaaataagacctaaacttctcctaaaaaatgtgaacgccggaaacaccaataagatcggatagattttacaccgaagtcaaaactaatagtaaatcgacagagaggaaagcaagaagccgctgaaaccagagacataagtacaaacaccatcacacctcacccaccagaccgagatagcaaaatgtactagggacaaggcataaaccttgaagatctactagagataattaaagcactagacacaatcagtatcgattctacttgggttagctgattttcgagccataaactatttcgattctcagctttcacccccggacttttgggcccttaaatttccaccatcaactttcatattcccaaaattacatcatctactttcggattcatgcttaaacatacatttccaattgaaccattcatttaaccgggattaaccacaaatccgcgtttactgtaccgcgattgcgattaacccgactaatacccagacccgttaagaaaacgacgtcgttttcatttcgtttaactcatcaaaaagagaaagaaaacgacgtcgttttcattcttcttcttctgcaaaatcgatttggtcgattagggttcttcattcgacaattttataagaaaatgagcaccaacagctactactcatccgcttccagttcaggatttcgtgtctgtcctcctggtgtcccctcgaaatgttggtgtggagaagagatcattacattcacatcgaaaacaaaggagaatccataccggagattctaccgttgtgcgatagcaatgaaggtacacatttcgattttgtgatatatttgattgattgaaggagtaaatgattggaaattatgttttatagagagaaaatgaagagcacttgttcaaatgggttgatgaagctctcttggacgaaattaagatggtaaatgagaagtgtaagagagttgtagagaatattagtgacctcagaatgaacgtgatggctaatatggagctccttaataaaaacgctaagcagatggaggaagagctgattaagaagatggagggtgaactcttgaccatgaaggagaatgtggaagagctaggacatgttatggcaaagtcagctttgaagactgtaggggttgctgttgtgattgttgcatctattgtatggctttggggaagagtgtaggtgttgttgaggttttggagtgaaattgtagtattggattagtctctgttataaaattgtcgaatgaagaaccctaatcgaccaaatcgattttgcagaagaagaagaatgaaaacgacgtcgttttctttctctttttgatgagttaaacgaaatgaaaacgacgtcgttttcttaacgggtctgggtattagtcaggttaatcgcaatcgcggtacagtaaacgcagatttgtggttaatcccggttaaatgaatggttcaattggaaatgtatgtttaagcatgaattcgaaagtagatgatgtaattttgaggaatatgaaagttgatggtgaaaatttaagggcccaaaagtccgggggtgaaagctgagaatcgaaatagtttatggctcaaaaatcagccacccaattctacttcagtgtttttttttttaattagttgtcaattaattaaagcagtaggtttaaagaaacaacagaaatcgttccttacgaattctatggaattagggcccaaaaatccaaaggaaaggccaccttaaaagcccattttaaaaatcttcgagcccaaacccaaaacgcagaacgaagtttattaagaacaacaaaacgccccaattcgcagcgattatctgtcgttgccacacccaacagactctgcgtcgccggagaaatcttgtcgacgggtaagtctcttcgttaaagcttatgcttcgttaaatcgattaggtcaattttttccctgaggattcgccattttgatcctctctgaaatccaactggttttaagtgatttatgctttggcactagttttgttgagaatcttgtttgataaattcaggaattgaccaccaattttgtgccatttgaatctcctagatcctctctgaacgttatatcttgcttttgagtatatgttaaaagtctaatatgtgattgattactgtaaattttatacttgttcaaggtcttttaaggttttggaagatggatataatctcacagttgcaagaacaagtgaatacgattgctgctatcactttcaatgcttttgggacactgcaaagggatgcaccaccagtccagctttcacctaattatcctgaaccacccgctacaactacggttactgatgatgctacgccttttcctgagcaacctaagcagctcagtgctggcttagttaaggctgctaaacagtttgatgctttggttgctgcacttcctttgtcagaaggtggtgaaggtgctcagctcaaaagaatcgctgaactccaggtcaaacaagtcacaccgatatgtcgagttcttgaatccgattacttctatttgtctaaccgctttgtcctgttttttcttcaggtggaaaatgatcttgttggtcaagaactccaaaagcaactagaggctgcaggtaaaaaacgatcttaggttttcacttcattgttggtgtgtcttatctgtctgtaactggagcagattcattatgcacttcaaatttcaatttgtatactttcttgttgatacacgcactatggttagatgttatctttagtggttctagaatttggaatttttgttttcccttgcaactgcctctgacgattgagctgatgttaatggtgtgaccttgtttgtgacagagaaggagctaaagcaagtacaagagctgtttggacaagctgctgacaattgcctgaacatgaagaaacctgaatgaaatgcttgtttaccttttgtcgagctgatttagaaactatatgatttggttcagcaacaattatcttttaggttcataaggaatatctattctaagttggttcaccaaaaaattgttgtagaagcaattacaagaatgttagttagctcacaacaacagaaccattattttaaccttacacttttttgacctgtctgattacaatctcagagaatccactttatcattttcacaattacaggccatgattgacacatcatgtttgattctccgggcagtgttggtcaaattactatgatggtcaaattactatgaactctggtatctgtcacattcaatccaagttgctgaaaagaaatgaccagtccataagttgtggtccaaaaccggatcttgattgtgtatttgtactcaagcatgtgaagatatcctaactcatcatccttcttgcgctctctcacaagacttgtatagagtccaacaatcttttgtctgcgtgatgaagctttaggatgaaaagaaaactttagccagtccgatcaatattataaattaacaattgtataaatttaccaatatatatatttatataaatattatatgtaaaatatttagtgaaatatgactctactattgtttttctttaatttttattaattttttgtaaagttcaattctaatacttttactatgtgaaaaaaaaaaattgtattttttttttaaacttaataattgttttctacttataatcggattaagaaagattattgattataaagaaaagatcacttttaaaattaaatttttgtaagaaattataaaatttgtaaaatctctttataaattgataattattaatttatccataaattaattaattttctcggtcccaaacaatattaacttatagatgttttacggtagtttgttgatgaaacactcatattctttttaggtttcttcttgttgggtgcttgagaaaatgcagaccgactttcttcgatgatatgttgtacatctttatcatctattggaattttttatatcaatgccttggcaccttctgaatcccctgcagctagtagaacctgatacatcctgccaaaccataaacaagaaccaatgatataccgaaaacctcttgatcttttggaaactgatgatctagttatcagaattgactgcatcctcttgaaactaatcgaacccgtaaatcgaaacccacaggacattgttgaagaggaagacgttgaggcaaaggtggctgtagcagagggtgctgtagcaaaggtggcagaagtggttgtagcagaggtggctaaagctgaagttgtggcagacaatccacgtaagagaaagacgattggtgctaactactatatcccagacaaaagacaacgcttgttctgactttaggcgggagactcatcttagctccttaaggttgttatatagaagactttagttctgagaaaagaatgataaatttgatgtcaaaaaaacaaaaaagaaagaaaattcttttttttttaattggtcaacagaatatggacgtccatataatatttcacttcataattacaatataaagaaattttgtacaaaatcactactttgttgataaaacaatcattttcttttttggtttcttcttgttgggtgcttgagaaaatgcagactgactttcttcgatgatatgttgtacatctttatcatcttttggaatttttgacaccaatgccttggcaccttctgaatcccctgcagctagtagaacctgatacatcctgccaaaccgtaaaccagaaccaatgatatactggaaacctcttgatcttttggaaactgatgatctaattatcagaataaactgcatccacttgaaactaatcgaacccgtaaaccaaaaccctagtggtaaacttgtaactctttttgtgccaatgatagtacaaaattggtcttttgttatgtaatttcaagatatatcttttctttctgttccttaaatctatagttcttgagcaaagagaacaggagtggcttacctcagaaagctcaggacgttgcaagggaatgctgcagattggtactctttccacaccaatagaccgtgctccaggtccttggcattaacacatgcatgtaagagaaaatctagacattttcttgaaggaacaaacccgagctcatctttcataaatcttagcaaatccattcctagatgcactttggatggctctgtctctgcgattgcccaaaacacctgatccaaaacagcatatcactgagaggcttaaattactgaaggctaattcagtaaaagagaacatagctactagttacagactcgatcactcgagcttgatagctgttctaattaaatgttcttgcttagtgctttacttcaaacttcttcgttgagaaaccccacaatgatccaagaacatggaatgtgaaagttgcacatattggagacatctcagggttatcatagatgagtaaatgaacaagtttccagaaagaagcccatgagaaaaacaaaatcaaacctcgtcaaaatgagcttccacaggtatgcctttctttaacaaccggaccttgttccgtttcagcagatcaacaatatcgctatacaacaaaaagagcaaatcaagaatgagacattcaacattgggtagacaagaactaattcgagagcatgggtgatttactctaccttgactttttattgcggacagcgaacaaaatcattctgaagaaaccgtcgatccaactagtatcatcttgtaggtcatcagccagttgaactagcgtacttaactctccctttgaatcagagtattcctacagagataatcaattcactgattatcaatcaactaatatatgatactaagaaaaatgtggctgaaagtgtaatacttactataagagatataatcgatttcgggtctacgtggcattcggctttcctcatttcttcatatatatgtaaggcatctgcccattttccacgtgatgcaagagccgaaataagcacacttttcagttcattttggtttatagccggaacatctggatctacgagcacctatggtagaataaaaatttgagctcttactctaattacataaatgtattccacttttgagatcttaaaaaaaaaaaagagtatgtgtgcctacctgtttcgccttctcaaacttcccagatgctgcatatgcatctatcagggacatgtaaattcgcttagtagcttgaactcctgcttgcttcatctcctcatagtacttaaaaaaggcacaaacatatttctcactcataatacacaaagaaagagagtagagatattttgtagtggcgttgacttgacacgactccaagttaagaagaacaagtagacaaaagatctaaagaacagaaaattctgaattttaccttagtaatagcgtcctcctgggtacagttgtttattagataaccaaaagttatggaatcaggtttaacgccagcttccttcatttgcttgacgaccattaacgcactactcacatttttcttcaaaacatacaaaagccatcagctgaaaacgatctaagagacgttgggagctcacagaaacatggacaatctctcaggtcagaatttgcaaacatgaaatgggagcttaagatattacctccctaaaatatccagccaatatacaattgaacatgctagagtttggttccaaattgaagttctttaaattaccaagcatattatatgcaccttcaaactgcacatgaaaccaaaagatatagagaaacattttgtggttagagaaacaagcgaagcagcaactgtaagaaacagcacagacatgtcctcatctgtaacatagggtttgaggaagttacatctttgattcttgtgcacaaacgtataatgctccggaagttctcagtattaggtttcacactctttgtgcacataattgaatggattcttcgcaccttaaacagcaaaagtatgaggaaatccgtttcatatatgagcagagttcaactgtatattgtctggatatagattcaagctaaatgaggatgcacaccaaatcaaactcaagaacttcatcaatggcatgtaacaatgaatgtaggatatctgcggatatcatcaaacctgcttcacccattttttcaactacatcaagagcagtgactacctacggcacagagagaatactcattatatatagcacacgaaatacagccaaatttattataaaacaagcataataggaatacctcattcgagtcacagctatacttaacaagcttttcgtacgatgtagatgaaggcataacatcaagttcttcatgcatcttgttaaattttaagattgtatcctcaacctttaattgtagaaaaccagtaaaacatggacaattaggaggcatcgattatctaaccaaagactttaacaacactaatctgccactaatattcatgagaagtccttaccgttggatttggggtgcaagtagaatagatagagatgagatcagaaacgttcttcactccttcatctacgcatgttaatgagaaacatataaaacatgctataaaaatgatgttctacaggcataaacatgttattggacaatgcagccttaccactttctcttagctcccaaaggaatctactcgcaacagaatccaatgaaaacctcccaagatattcaaatatgtttgccaataggtccgacgaacgaacttttgttatgtctacaatctctaagagcctctcaagatggtacttttggtcttttttacatagtgcaagcagataattttctgtttttttaaggatcaaaaaggttaaatctttcagagtaagagagagccacaaaacaacagagtgcacaaaactgaatattgcttaccttgcaagactgataagctttcaccgttatcaccatcaattgtactgcaaagttcctcaatcttctctccatcaccaagatggatccaaagaagcatttcatagtaaccaagtctctcaacggaaccgggactagcctccctaatcacatccttgaaactatgaaactcatctaccatatccataccaatcaaataaccaagaagaggaccataaactctttcttcaatcaaaaatccacgatctctcatagatttcaaaagctcaaaagccttctcaatatggccaagagcataatctagatcattgcttttctcagcatgctctaagtaaacaccaatcattgcattgtactctgtcacactcatctctttagctactctatcaaaagcaccaaacatagcctcagtgcctaatttctgagcagagtctctaaatatcttagcgaaacgccgtgacagaccgttctgcttgtaaacacgtctctctttcctttcacgagacaactctttcgttcttaacgaaatatcataagggatcttagtggtgaaacttggtatctttaaaaataagttcttctccaaagagcttttatctgatgttgttactgaaatgtgattcaaactatgaatgaatgagagtttgttgaagaaaatagacaaaattggcaacacataccatgtaacaatttcgatactcgatcttgtaatgatgcttcctcaagatctacacacaattttgcatgaaatcaatcgaattctaaacattacccagatacagaaaaatatcaaatttacaacgaattcattctaaagatcacatttttcttatatttgttcatatcagaaaatccgaattacctgaggaagagtttttggaagagagaagatctttgacagcttgagaagttccggcgatgtctttgttgccggaagcaattgaagattcgccggtgggtctaatacgggatttgaagactgaacttaataagcttttgttaacctttgagacaaccatgttcggatttcaagtgagattgagaagatgaagaagagcaagtttataaaaccctgaacaaaaaccccgacagggttgttctatccaattttaaaccttaggggtgataatttaatcaatcatataaattaggggtaatcatgtaaattaacaagattagttgaagaagaatcgtcaaattttgattttgtcttgtggattcttcaattcaaagattataaatttattgatgaacatcgtcaattcaaagattctctttttatcattcacgctacttcttcttcttcaatcgtcaatcgttgaatccgattcgatttgcctctcttccggcgtagcttcgacggtggcaatggcggctccgggatcggttcagaaaggagatgaagagtggcgtgcgattctttcacctgaacagtttcggattcttcgtcaaaagggcactgagtaaagtttttaacctttcctcagcgattttcatggttcaatttagctttcaaaatttgagcaaatttggtaactatcttccattaggaatcctggttttagaaatctagggtttttatttcataactcgcttaatttgtgattctcagagttaataaaggtttgaacttttttttttttgccaattgttggaacatttatttttcaggggtgtgtcttgatgatgagcactatgttgatgattagatcttctctctgtgtagattacatagaaagtttctgctatagatgttgatctgttaggataaagtctattcttttgagtgattggaaacaatacaaatttcctgctattatagatgttgagctgttaggataagcttacatgaaaggttatagttcttcaaggatactatctttcattactcttaaactccagatgagtttgtttttttttcttattaaagataagatctgagtattggttttaccaagaatgtgctacgactttaagagctcgactttagaacttggttgctctgtcaggttttgtcagttcctatagagcctttactattattagcttctgtcttagaatggattgctatgtaaatgaccattaatatgtctgagttcgtcgttggggttttggtctttctagtatttggatatcttattgaatagggaatgaatgtttatattgcgggtttgtgttttgttgatttcagatatccaggaacaggggaatatgtcaacttcgacaaggaaggagtttacggttgtgtaggatgcaatgctcctctttataaatccaccacaaagttcaacgctggttgtggctggccagctttctttgaaggaatccccggtgccattacccgaacggtaaagaaaatactctcagagcacaaacacttttttcatcaaattggtaacaaaaatgaactctctcttctttgtgtattttgcttacatttgttggtttatcagacagacccagatgggagaagaatagagatcaactgtgcaacatgtggtggacatcttggtcatgttttcaaaggagaaggtttcgctactccaaccgatgaacgccattgcgtgaacagcgtttcgcttaagttcacacccgcagcgtcttccttgtaaatcttggccgaacaagattatttgttctttctctggattttttcactcaagtgagtgggagaaaaacagaacaagaatcttgtatgagtgtgtgtgtctatactgtgtactgtattttttctttcatgactatttaaattcatcacctcgagcattttgacaacaactgtagtctgtagtatgtatgatttgtaacttgaataaaacacactcttgtcttgtaatacaaaatctatactatgttacgcatctgtgagactctattgacacgtgcatgatacaccagtctaaagattcacaacagtttcatatgaatctagactcaaaactaggaaccatacatcactgaaattatgtacaaatagatcactgtaatgattcaagaacctacctgatcattacgcttgcttgcctctgttaatatttcagcttctggttactctctgttgtagtagcttcttcgtggtggttgtcatggcggatcttgtgacggtggttaaaaaaacagaggaggagtggcgtgcagttctttctcctgaacagtttcggattctccgtcaaaagggcactgagtaagtctttgttttctttataaatttgggtttagggtttcatagtttgtgatctcaagttaggccttgttgtttatgtactcatattttgaaagattggattcagaagattgttgatttttgataggttcactatgttgttaccttttcaaggataagcactgtaattaggcttcaagtaatcatagactgaatcttgaaaacaaaattaggggaaaattggatctagatgcacatcaaacaagtgtagtgttgcttcttgcttttggtctttgttttgattgtttcaaacgcggtttctgcaaacggtttgcgttttgcgtttatgttttcaattaacaaagtctttttagcttagaatgcttaagattgttgatttattttgaaaagaaaaaactacactaaacgcaatcgcaaacaaacagtaacgaccttaaaccctaaaccctaaacctaagtgttttattggttttctcagttactatagaactttgtttttagatttatccaagtatagattgctccttcttttgttacgatttttggggtgatttatttcagttcttactttgaaacatagtatacaaatgcataatacaattcaatccaagtgttcttatggttaaaaatatttcagaacgccgggaacagaagaatatgacaagttctttgaggaaggaatcttcagctgcatcggatgcaaaactcctctttataaatccaccacgaagtttgacgccggatgcggctggccagctttctttgaaggactccccggtgccattaaccgagccgtaaagattatcttttgtatgtttaatttagtttattttcatgactactggttagtaaaacattcttctttttgcttgatttgattctacatttaccagcctgatccagatgggagaagaactgagatcacttgtgccgtatgtgatggacatttaggccatgttcataaaggtgaaggttatagtactccaaccgatgaacgcctttgtgttaacagcgtttcgatcaattttaacccggccaaaccttcctctataacctgaggactagttgatcgtacattactttcaaatcagattgtggtgttcaattgtagaatcatcatcacgttacaaggatcaatgtaacagataataagaatcattagtggttcttaaaatatgtctgtttagaaaatatatatatatatatatgtatcctgtttataacgacaattctcattttaatacattttagtaaaaatgttcagcttaatttccccactacaaaagtttccactaaagaaaacagataatatcaaattaatggaataaataagcctaattttctttaaaaattgtaatgtcatttaataattattgtgtaatactaagaaaagatagcccaacaaaaaaatcaaaatatactgaagacgaatacgacgaaggaaaataacagattaatgaatctgttcgcgtgtaaagcttaccaacattcggaagcaacatgtttttttacactttttcgtgctacttaagtattggttgtatggtttgctgaggtttaatgtatatgttcattgatacatttgtattattgatttcaaattaataaagaatgaagatgttaaataaaaaaatattgcgtaatacatttgcatatatttttttctcgaaaagtggaagcacgactctgttgcgcaagccatactcttttggcattctcttttcttaatgataagaagataagaattcgtgtcgtcttttcttttctttttcaaaagaattcgtgtaatggtctagtcacaaatccataaacaagattaggtttctgattaaaaaaatcttgtaatttttagaaataaatatctgatctcttcccaataacaatttttgtcccattagtatgtttaactcagcgatcacttaatataactcagtcgtcacttaagctaactcaaccattacagaacatatctcagtcgtcacttaatataactcagccattatagaacataactcggtcgtcacataacatatttgccaaaaaaaaagagaacataactcagcctttacagaaaaaatcaaaacattaactcagccgtaacataaatattgataaaaaacagaacataacagagccgaaaccgtacctcaccaccattcgctttaatatcttcagcaatgacctattctatagttgcacgggtacggctaccaccccatctaagcaacggaatctcatccgtgttaacaacgttcccaaaacgctcggcgatggtgatgattgactcatacgcccaagcctgcaacacgaaaaccagaccactgacggtgtacgtcttgccaataggcctcagcaactttatagaaacgacaagggcttcatatgctgcccgaccccatggataagtcttcatggcttcgtcgtcgaaaactcttttggcactctcaaatggtatcctagagttagtatgcaagccaaaaagtccaatggatagaagagtcaataacccaaaccatctacgcttttcaggaggccaagctctgcacgttactaagccctgcctaagttcatctagattatgaccttcaccggttggcacacgcaattcactgaagaacgctttgtagtcagcttcaggctcaaacttttctgtaggcagttgatctatatttaaacccgtgatatgatgaaattcgttcaatccaaaccggatgggtttaccagccacgatacaccaaagctccttcttcagtattctcagctgtctgcatagtagataatgtacggtcttaccagaccatagaaaatgactatcaacaagcttagcaattaatccaagctctgtctctttcagttctgcccatatttcttttcctattgattctctaattgcagggaactctcccagctttatattatgattaatgcctttaccctccagattagaatccccctcttggtaaagtcttggagggtactcccttgcttggtcttcagacatctgtataaccataaatcagccgtaagcattccataactcagtgataacataaaacaaactcatccacagataccataactcaggcaaaacataaatctaactcagccatagataacataactacgtcataacataaacctatctcagccacacataacataactcagccataagataaatctaactcagccatattttaacagaaactcagtcaaaccataacataacaacagctcagttaaaacataaaccagactcagctatatcaaaacagaaactcagccataacataaacaaactcagccgtcatataacagaaactcagacatcgatgtaaggttaaaccataactcagtcacaacataaaacaaactcagacacagatgaattgataaatcataaatcagtcggcaaacaaacaataactcagccgtcaaatcaaatagatcttagaaatcggccaccatatgtcaatcaacgacgacgttaaaacccagctttaaaaactatcgttacgcatcggaaaacgatttcagtgacgggaatcacttgcgattgaacttagatgtcagagtcttacttaatggaaacatactcaccggaacttagatgtcgaatgtgacttcgcgcttacggaaatgcgactgcggcgtctgaatttcggccggaacagacgagaaaagagcaaaacggcgaaagaaatcgatttcgttccgtcgagagagaaagaggaagaaagcgacagttttttttttttgggagatgatgaacagtaaagccaagaaataagaaacccaaacgttatgcggtttggagatgattaatgacgtggattatggtaatgacatggaatgatgacatgtataatcactgtttttttatttaatttttagttaaaaacgaattaaataataataattaattaaaactagttaggggtgttaattgtaattacacaattactaaaaacatctgagtaataaaaaaaagatgtgttctattttaggaataaacatacaaatgtgttttatcttaggaattatttcttaaaaaatcttgtaatttttagaaataaatatctgatctcttcccaataacaatttttgtcccattagtaccaaaaccatatttcaatttgggatttatttctataatatcaaacccgaattttgtaaaccgaaccgggacaggataatgggacaaatgagcacttgtattatcacgtgcattaatcattcaccagttttatagtagatcacagtggttcatatgtatctagacgcaaactttgaatcattcatcaacgcaatctaagtacaaatatagatctcactgcaatgtttcaagcaccaacctgatcatcatcaaaaccatttcatccgtagtggtcaatggcggcttctccgttggtggttcagaaaacagaggaggagtggcgtgcggttctttctccggagcagtttcgtattcttcgtcaaaaaggcactgagtacgtttttgttttgtttttctttcccttttggtataatttcttttaatgaaattttgggaatgattttgatagtgcccttacgtatgttggattagccattagacttgagtaatttagggtttcataattagcatcatacatgtgagtatgtgaccttttgatttgagtctttttacccaagaatacctacgtggcttggattcagaacattgttgctcgtttaatatattaattaggctgcaagcaaccgttgaaagattattatagatgtagaaccaattagggaaattggatgatgttttgtttttggaatttggttttgtttgtatcatatataaggagagtattgattcagtgtttcactgtttcatataagtagtttattgaagtatgtaatgatctcaatgttcttaaggtttgttgtgtttttgttgttcaaaatattttagaaagccaggaactggagaatatgacaagtttttcgaggaaggaatcttcgattgcgtaggatgcaagactcctctttataaatcaaccacgaagttcgattccggatgtggctggccagctttctttgaaggactccctggtgccataaaccgaaccgtaatgattctcttttgtatgtctactttaggttaaattttggtgaatgttggtaactaaaatctcttcttttttctttcttgattctacatttatcagcctgatccagatgggagaagaactgagatcacttgtgctgcgtgcgatggacatttaggccatgttttcaaaggagaaggttacggtaatccaaccgatgaacgtcattgcgttaacagtgtttcgatcagttttaacccggcaaaatcttcctctataatctgaggatatgattgatcgatcatacaacatcttctaatcagattgtgttgttaaaattgtcatcatgtagtgaatatgcactttctgtggtggtcaatataatgcaacaaataataagactcattagatattggatggttactggtttctcttaatatgttatagaacatttaataacgatttaattatctaagggatcattactagtgtttcttaattataactctttagaactgaaaaaaaatattatagagatttcgttttgacagaaaaaaactcaaaccgatccattttactttccattttgagtgtgttgattttaaaaaatatgatacgtttttattactaatgaaaatagaagatattatttccaatagtggatctcatatgtgtatccatatcattattttcataattgcgtaaaatatctcgtttcatatatatttgtgtgagataatgggttgagattaggagtgggcattcgagtaagcgggtcgggtttgggtaaaatccaatcgggtacgggtttttcgggtagataaatttaggacccaatagggtaaatataaaatatcggttcgggtttaatcgggtttggctataaatttttgggccttattttgaaactgatagccggatttccgggtaaatacccagatttttcgggtaaatacccggattttcgggtaaaatttcgtgtttcaggtaaaatttagatttttgattaaaatattcgggtatttttgggttcgggtttggatcgggttcggattcggtttttcggatagaggaatttaggacccaataaggtaaatcttcgggttcggtttcggttccaattttttgggtcagtttcggttctggttgttggttccgattttttcccagcccctaattgagacgttggtttgtttgccaataatttgtcatgtggaaaagtactcgaatgtgtttttgattcactataaatggttgtcccgttttgagtttgataattcattagcatgtgactatatcatatatctatttattacactagaagcattattctctttttaaagcaatattctctgttcgaattaaactctagctatcttttacatacctactaatggatattttcatttgggatatcgaccaatcaaaaccacaaattttagctgatcaagatgggatctcaagtttggtaggtatggaaaaatacatacgtacacatccagagagcgaagaatttgtgatgaatttctaataaatatatgagttgttgagaaaacaatatttcaactaatcttatatttataatggtcccatgcatgatacaaacgtggtcgttatctcgtccatatgaccagtgaccacatatgtttcaatacgtgtttcatctcaatgcttcacaacctccatttgtattgttccgcacaacttaatgttatgtacaagttgaatatgcttattatgtagtaaaatgtaaaagacataaatcaattcattagtagtaaaacaatatattctcgttgtcatcagtcattactcatcatttggcaccaaaatgcggaagccaagccagctgtgaatggtaagtatattaatctctattcacatgcaacatgcactagtgtgtcagtaatttggtccatgacaatacacatgtgtgatctagatgtccttgcttcttcaaaggttacagcacaaccatatctagtatattactagaaagagaaaagaaattttgttatagcattcatctaaaatgatcagagaaaagaaattttgttatagcattcacctaaaatgatcagaacaaatctgaatgaaaattcagtatatatatatttagacgtttagattgtgcagacaaaatgtatttagtgctacaactgatgtgtaatgtatggactactttcataaaaagtgcagaataatatgcacggaacaatattattacaagttctaagattattcatatctacaaagattgatatttttaataataaataattcgagtttccaaatcgatttttaccatttttattttaaattgaaaaagcaaaacattcatgcaagaaaagttaaaaacaagttagtggaaccaacaaaaaaaaaacagtgttaatgaatgtcccaagtccgaacttttataatggtatcttttcccatgatttattcatgatttagacaataatagggatttacggattttgccattttttgctataatttttacgaatttgttattttgttaaaattttacggatatactatttttctatatattaaaaaatgttcacatttatgagtctttttttgcttaaatacacattttataagttataacaaataataaattctataaacaaatagaaccgattaatttaaatataataggtaaaacacatgttaaatcgtatttttatattataaatttttttttattcataaaactttagacaaaaattgcaaaatccataaatatcactaagaaaatggcaaaatccgtaattgattccaaaaatatgacaaacttttgaatcttttaaccaaaaaaagaaaacagaggtttttataacaagttcagtttacaattttcaacgtgtggtttctctattagaaccaaaagaataatatatatccaaacgtgcacaacgtgtcaatttttttgttacaaaatgtgaagaacaaaaaaaagtgtgaaaagctggttatgagttatggatctgcgcctataaatatacaaacatttctccatccactccatagccaaaccatactctccaaagtccaagctcacaatgaacacttcgtaagtctctctccctctctcaaaatgttctttttgtctgaaatgtaaacacaattttttgttgctctcgttgctcagcccaaaaatggaaatggaaatgaaaatggaaacgaaggcggctcctgaagctggtatgatcaaaaagtccaacgaggagtggcgtacggttctatctcctgaacagtttaagattcttagagagaaatctattgagtaattagatccaaactttttttcttcttcctctcttaaattcattttaggtattttgttttcttaagcctcacggtaggtttgatgacgtttttttcttgttttcgactgatgaatgtagaaagagagggtcaggagaatatgtgaagttgttcgaggaaggaatctactgttgtgttggttgtggaaatccggtttataaatcaaccactaaattcgattccggttgcggttggccggctttttttgatgctattcctggcgccattaaccgaaccgtaaacctaatctcctcttttttttttcttttttttaatgaatattgaatttttatcataactctaaagaaacctaaactaatctctgataaatatattttctattttcataaaaaaaaatgggcatgcttgcatttaaaacgtctataataatcattttatgtatatttaaaaatattggtatgcttgtccgtattagtcacgtgtataggaaagtgcagacgggttagctaactatgcttttttttgtcattagagttttattctttggaggttgttcctattgattttgtttctgttgtaagcgatgatgtgcttaggttgggtctacgtgactaaggcaagtgtctatgtagtttttttttgaagttttaataaaatttagatagattttttcccggtgactagaagcttcatcgagataggagcgatactacgaataaggtatatggggcagagtgccctaccaaaaaaaaaacactaaaaaaataatgaagatatgtggagtttaatgtagttattttgaaaagaaatgtgattgaatcctaactatactcatctaaccaagcttataattcgtataattcgtataattcgtattgggctgcatgtttgagaaagactgaccatattttttagtatcataaagttcgatcagtaaaaataagaaatgatagcttagttagattctagtaatactatcatgttttaattgtttatatataacaattgtatcttacgtaatataattcatataacaattgcatgttgtaaaattataaaatatcttttcatttaaaagattcgactaaatacatatctcaaaaatgacatttttagtatttattaaataacaacaattgtttttaaaacacatgcaatttgaattgaatgaatgaaaataacacaacatcactagaatataaatcactactttagaaaatcatagtcaatgacatactttttaaacaatatttttgcaggaggagagagctggattaagatatgagataacttgcacaaaatgtgatggacatctaggtcatgtcttaaaaaatgaaggttttccaacaccaactgacgaacgccattgcgtcaacagcgttgctctcaagttctcttccgctatcacatctcagtgataaacggatccggtttagttctccggaatcaactctatctatctatgaacgttgattactaagagacctttctacttctgttagaatgagaacgttgtgttcttcaattcatcgcatttatgaactattataaaattgaatgttttgtgttttcattatttttagtaatgcttatgtacgtatcattgaaattgtttgtgtcatatattgtgccatttttctattgagtgttaatgtattatcgtatttaccaaaattatatatagttattgtctaagtctgcgaatcatttgccatttggatacacatgcatgtctaaacaaacgtacacatggggatgtgaccgaactatttttttgtttgtttgttcttttaatatcattgacgtttttaccttacttctcaattgttcttctttttccgtaatcgacaccgtagagtttcgacgatgacatgacgcggccaaattcaaagcaattttaatccattcagttcttgtctatgattagatgccttgagttccttcctgtcatcaaaacgaatttaactagatccattggattttcaatatgttggtggcggagatgtatttttttaatcgcaaacaaaagagataaagtttgtgaaattggtagagaatgtgttgatggagttgacagatatggtgatggagttgatggagaatgctttgatgaagaaatcacggtgttgatgaagtaatcgcggtaaaacaaagtgatggagacaggaaaaaaaatgacggaaacgatgatgaacggtgtttgagatagggtaaaattgtcaataaaattttaataagtatccaatcctgtaaacccaataagagagtgtcatttttcaaaatttttggccccaaatatatctgattgtataaaagtccctaccaatcacaccctatgttttccgttattgttttagtcatatataccatattcaaattttatgtaaattttatgtaaatatgttcttcaaattttttaaaaaatcctggctgacccggtccaagtatgtcagttagctaatagttgtgtttgttagtcggagaagtctatttagctatataccacctttcatgatactattactatcccctgttgttttttttactaatacgttattgggatgagatgccatctaaaaggggaacttctccaattctgttcgttgggaccactccagattttacaatcccggcttatgagttttgagaccactctcacttattttatctacattttgtaagagtgccgtgtttcatacttagttatttctctgataacaaacaaattggggttctgttcttaaaatatataaaagcccgtgaggcccaacaaacggaaagtttggcccgtgaaagaaagaaaaacaaaacttatttattgaaaaatgacacgtgcagaatcatttactaaaccagacaataaccggttaacggtttaatagttagcaacagaagaaccaaaggattgtcttcttccacaatcagaatctgtctgtgtggcttgtaacgcttcaatgtcagtgaagtctttagctatatccacaaaaataacataacaagattaaaaaaaagagagaatattttatctctctagacttgacaatttccctctctttctcactccctatacctgtatatgtatatagaatcgtatatatctggagaaatacacgaggtgttctcgtctctgacgacgtggtctattgtcttcctcagctttagtcaatttcttctttcggaaacttggttctgtgatattatccaaacttaaagtttgagtctttagggtttatgggtgacaacaaaagtacatgcctttaggctttagttttgtgggtttcatctcaaaatggcaattagtactatgttagggtccatctcttgttgcccctctcccaaggtatttccttccttgtgcttacttgtgtatctgtcgactgaaaaacctctcctttatgtatttaagtttatgtgcaaagccttaattggtgattgaatccttagttctgatttgatttcaggggtatgagatggtgaaacaacatagtgttcgattaaagcattgcgttttcacggtgaaatcgagtgtgcctgtgtattcggaaggcgtaaacgatgggattaagttgcattcttttgggaatttagttaaaaagaaggtttttctggatacctctaagagattctatttccaagggagatggtctgaatcgtcagggaggagagtggagacttatgctggagtagatgtagcgagtgctgttgatgtaatcaacgatcttggattcgatactttgaccttcttgatggttactgttattattgtccctgcattcagaattctcaaagctagtccggtacaacaaaaagctacaagaagttggtttgtattctcggttataactacttggcgataacatttgtgtttttggtggtttcccagatacttggtttcttctttgctggtgttgtactcaaccaatttggtttgattagaaatctcacagatgttaaagttctttcagaatgggggattcttttcctggtgagcattgtgcataattatgttcataggctttacgtgttgaatgagtagtaatgactggccttatcctgattatctttggcagctctttgagatgggtctcgagctttcacttgctcgtctgaaagctcttgcaaaatttgcttttggcatgggactaactcaggtttggttctaaaagatgtttcttggtttgctttaaactccttacattccttcttatattttcacttctgtcagataagcatctcaagagtcatcagtgatctttacgacccgatttcgttatgaaactttatagaccatatcattattgccagatcattgctgcaaagatgtcatatatcgtttgtttaacgttaccttactttgtactgtttttcattggttcaaaggttttgttatgcacggctgcattcactgcttttgaactcccaccaaatggagccatcggaacaaaaattctggaattcctctttcattcaaggcctgacttggtaaggtttttcacttggggtattatcatgattctcttgtcgtttttagtatcttttgtatcatgtatttcaaatttagcagacgcctcttttcccaatgtgatcatggtctaataactgtcaatctctgatgttttttgttgggctgttagagctatatcctaatatgatctataatttctgtaaaactctaggtcaacattagaagcattgatgaggccgttgtcattggcgctgctctatcattgtcatcttcagcttttgttctacaggtattagcacagttgcaataacttttagtcatctatatctagaatggtaatggagaggcaaactcaatcaagaatttagtacattcttattgacaattttgaaatgtatagcttcttgcagagaaaggtgagctccctacaagatttggctcagcaaccttgggaattcttcttctacaggttctgcttatcctgtataatctctatcttctattctatgactttttatctgacattccaaaagatatgtcaatatgtatttgggaaaagaatctcctgttttgaaaattcatccaagataagcaaaaatcttgtgcaaactcctgaagttgacaaaccttttcacttacgcttctcgcattgcttgcaggatatagctgttgtgccgttactagtcattcttccagtgttggaaagccaggtaacttggttatcgccttcttgagcttttgtggactgtttgttataagaagctataaaagctgcattgaacttttattagtatcatttaaacctttgtttatatctgaatctctgtgtttttgaaaggatattggtggggaaagcatatggccaatgcttgcaaaagaaagtgcaaaggctcttggtgggttgggcatcctctctcttggaggaaagttctttctccgtagaattttcgaggtaacttatttcgtgtccttatagtttgacaaaaccctttcctttgaatcccccctttttagagagtgaatacaggacactgttttatttggtgcagtgcttaaatactaagcccaaaacaatattcaggttgttgcagaaacaagaagctcagaagcttttgtggccctttgccttctcacagttgctgggacttcacttgtgactcaatggcttggtttcagcgatacggttagaattaacacccctacaaaaatataatttccatctaatatccttactttaatgtcctaactcaattttactctgaagcttggagcttttcttgctggagcacttctagcagaaacaaatttccgaacacaaattgaagctgatattaggccatttagaggtttacttctcggtttgttctttgtaaccacaggaacttccattgacatggaggtaaactgttatactgcattgcataagaactcagttatttccactgaaaaatatgatacatttcatgttcatgctcatgtggttaaaatcttttgcaggttctgtttcgagaatggcctaatgtcctctcactcttgggtggtctgattgtgatcaaaacactgattataaccgcaatcggtccccgagttggcctcacaatacaagaaagcgtaagagttggctttcttctttcccagggaggagaatttgcatttgttgtgttctctctagccaacaggtttttccaactgccaatattattgctcaaacatctcctcattatttcattagtttcgacattttccttactaattaggtggtcatgattgttgcaatcatttgtgcaggctaggagtgcttccaaatgagctgaacaaactgctcattatcgtagttgttttgtctatggcattaacaccttatcttaaccaacttggaagaaaagccgccgattttcttgatgagagacttgatcccggagaggtaacttttaaattttctacttttgcatttatatgaaaaataaaatttgcattcatcttgaatctgttgacaattgtgcagaaaataggtgaagatgtgaacttcgatgttagtgaatcaattgtcatcattggatttggacaaatgggtcaggtaaaagtcatcatttgctttcctggaaaagttgtgctaagtggtttctcatcgagtcgatatgattttgcaggttctggccaattttttgtcaacgccattggtctcagatagtgatcttgtgggatggccttatattggttttgatctgaatcctgctgtagtgaaggtctgtaacagataacttcgtttgttcctgacctgatcaaatttttggcattctaaactagttttttctttatggtggtggtttggtaggaatcaaggaaactcggtttcccgatattgtatggagacggatctcgaccatcggttttgcaatctgcaggggtttcatctcctaaagctatcatgataatgtataaaggcaagaagagaaccactgaggctgttcaaagactccgtcttgccttccccggggttatttctctcttccttcttccttttgtcaataaaatcgtttgagacatcaagtttaagtgacaacaactgttccttttaacatattaccagagtcctatttacgcaagagctcaagatttaccgcatctccttgaactaaagaaagcaggagccacagatgcaattctcgaaaatgcagaggtaaaaaacttccaaaagatgtctgctcttttatgatcacagtaagatttctttctgaacgagtttggttgtttgtttcgggtttatagacaagtttacagctcggttcgaagctgttgacaggatttggagtaatgtctgacgacgtaagctttctaagtaaagttttcagagattcaatggagatacaagctcaagaagaaatcacagctagtgaaacaaatgctggtttgaagccaatgcaaatgaaagcatctgatataaacgtagtgtctgctgcaacacaaaaacaagtccagctcatgaagccaatgcaaatgaaagcttctgattcaaactcagattctgcagcagagattcttcaagaaacagctggtttgagtcagcctcctgagattgatgattcttctgtgaatatagataatggatttgttggtaaagctgataaagctcaagattaaaattgctcaaaaattctaacacttttttttttttttctgaaatgtgcagccaatattccaaactaaaagaaacaattttttcttttcttttctgtgattattattattattattatttttcctcactatcactgtcgctaaaaagccaatagttagctcaaattcattaaatatcttcactgtctaggtactattgaatcatggatattagtgccaatataaattcgaacataatccaatgttggtctttacaatgaaatgaattgaaacagatttgattatattactaaagaaacaaaaaaaaatatagtaaaaaaatatgaaatccacacaaattaaacatggaaatttagaaagaaaaaaagtagtttctaaatcttaaaacatagatattgattttaatccttgatcaaataatccctcataaaattgtaatttaagtcgttttgtttagggttatattactatctatactcagatgatcggaaaattaataaactatgcatgataaaaaatggggttgcgggtatgatatttatggggttgtgggtattataaacataacgatataatatctatttgtgtttcgacacgaatcaaagatagtgggacgcttaagtaacattaatatcacgataatctcttatctgctaacacgagcctttttattcgaagccttttaaaataagtctcaaacaattgtgtacgaggataatttgataacaggataatttcatatcgattccacacgttgtcgctttgggttttgaacaagaatcaaaacttatattgctatttaataatattagtatcgcgataatctcgtatctgctaacgcaaaactaataacactctctgattactaaccgtgtacggctaacatgataagtttgtatctgataaacacgataacgtttagttagtttttttttaaaaacccataagcaaaagcctacaagtggaaatggtaacgaagttagtcgttaaaactactagcagataattaaaataataacgagacgatgtcaatttgtgttttgacacgaatcaaagctagtgagacgcttcggtaacattaaaacatacactcttatccgctaacgcgagcctcttgtttgtagccttttaaattaagtctcaacgagcttagctggtgacaatgttagtcgatataccttctagcaaataagcaaaacaataatgagagtttcgcaggttgtattctgatgttttgcaaaaataatcaaaactatttacattttctgataatcaacggtatcacgataatcttataaccaataacaaaataatttcgtggctgctaatcacgatatcattttagttaatttattaaaaaaatcccataaacaaaggccgagaggttgaaatggtaacaatgttgggcgataacacattctgataacattagtatcacgctaatcccttatcttctgataaacattaatcctctcgccgcgaagttctttgccaaaagcaatcagacggggagggagaagaatcggcagcatcgttcctagaaaaaaaaacataaatccttgtaaaacaactcaagataggaagtcaaaatcaaaataaaaaggaaacatctatatcgattactagcaaaagacgcgaggaacaaagcacaaatctgatagatgaacttctgttcgaaaaacagaacgaaataaaacaagaatttggaggaatcatttctttttttcttacgcctcaaaacgacagtctcttatcttcatacaaaactggaaagagacgagtaactacgtaagaaaaaaaaaccattaataaaataacacaacttcccaaatatatctacataaaatcttcttctacactactgcaataatatccctctacaagctacaacttacgcaatcgataatataggggtacatgtgtaaaatttttgttaacagtgttgggcaaacagtgcaaaatgaagagagtgaattaacaagttttcgaagcatatcaagtgatatttttgtttatatgagttttgaggactgacttcgtctaaggtttgttcgtggcaataaaaataaaggttcgagttttttgggagctgagacaatcacgcagatgtctgagcttcacagattattctcagacaatgtttattcttcaaacgactactgatatcgtttgtgctttctttgtagtattttttgttgtaatcataggttttttagttttagttatagattttagttttctgtttttcttttctaaaatgatatataaattataaatactttttttgttatcagatattgtttaagactcgacccaaaattataaatacattgatgaaaaaaaatagtatatagctgatgtaatccacgcgcttgctgattagtcgtgctcatgtaattaaacaaatatcgcaaatgttaaactattatacacatataaatttctgtatatacaaaacaaacgaagaagacgaatctctcagtttcgtcgttcgtttcgaagttgtgcgttggtgaaatttgaaatctgaatacactcattgcaaaccttagaagaagaagaagaagaagaagaagaagcttccatagattccgttgggcttttactgtgtttgattgatcggatcgattgcgattacggagaagatatggctcaggctgtagaagaatggtataaacagatgccgattatcactcgctcttatctcacggcggctgttatcaccaccgtcggatgttccctcgatgtacgtgcttgcttgcttattcgcgaatcttttttggggttctctgaaattctctaaattagggtttcatattctgattgtttttgttttgcagatcatatctccatataacctttatttgaatccgacacttgtggtgaagcaataccaatattggcgtctcgttactaatttcttgtatttccggaagatgggtaattttcccttaacactactctatgaaactggatacaacatttgtgtgcttattactttcatatgaagctcttgtctttgtcacattattagctctaggctgctacttgttaatagcgttgtgactgattgattgcttataaacaaatatgtgtttggggttgttgtagatttggacttcatgttccatatgttctttctcgcacgatactgcaaactccttgaagaaaactcattcaggggaaagactgctgatttcctatacatgctcctatttggagcatctgttttaaccggtattgtacttatcggtggaatgataccatacttgtcagcatcatttgctaaaatcatcttcctcagcaactcattaactttcatgatggttggtaacttctgtttcccacaaatctaagtcgcctctaaatatcagcttatagtctcttgtgttccacaggtctatgtatggagcaaacaaaatccttatattcacatgagtttccttggtctgttcaccttcacagcagcttacctaccatgggtgagtttaactctctcgtttccctaaacttccaccggaatgaataaataacatcttctgcaaattctggcttttgcaggtgcttcttggcttctctatccttgttggtgccagtgcttgggtggatcttttggtatatactcagattatcccaaaaaatttcttctccagtctcttttgatcttttgtcacccaagttaacttcagtctgatcaaaacatttcagggtatgatagcaggtcacgcttactactttctggctgaggtttatccgcgaatgactaatcgtcgtccattaaagactccatcattcctcaaagcgttatttgcagatgaaccagttgtggttgcacggccagaagatgtgaggtttgctgctgcgcctttcgatgaaatccaccaagactgattctgtcatcttacatttcccaaacctaaacacccgaatcagtagtttggcttgtggatcagatataaatggtgcaaaggcagatgatacacaaaagtctattttgactctgacacgtagttgcgacccacacaccctagtttctagtagttgggtgtgttttggttccttctctttcctcccatctcttcatctttttgtgtatacaaacatcgtttgcttttagtggttattgatatgaacacactcaatttgtacacaacctctactagtgtcgcaatgttttagcgagggaacatgttttgaattcactgcccgactcagatatcagaagaaatgtacttttgttcagatatcagaacaaatgtttcattgcttttagtacattttttttccttttctatttcagttagcagtagaaaacagtgagagctgcgtattccggaaaacaacaagacatgttcaagcttctttaattaagcatgtgcctcgtgtgtgaagtttataaatgttggaaactagaaactatgatctcttaatcatagatataggtctcttcttccagtattgtacaccataagctgcagttgaagccatagtcgtcgaagcaactaaccagctggatacaaaacaacatgagaccaataacaagatttcagagaacacacttcatatgtttataactttaagggtagtgattagtccagctgtgtggtaattcgaaaaagacctattaccttagataagtgatccatgtctgggtgtctggattcccaaactctggttgaagtattgcaccagcgactagagtcaactggaaaactgtattcacctgtcgatagacatgttccattaacaaatcagttacacataccaaagatgccaagatgagaacaagctgtatcacctagagatcataccttgcttataaacaatggttctactttctgaggacttgaaccatctagattgaagaagtcactccaagttttccactgaaagaaacaagaccaatatgattcccatcaataaatttattcgtgttcttgttaaagcatatggtcgagcaggaaaaaaatgtagggaaacaagagaaattagtttagtggtctagctcaagttacaaaaattcaccttccagtccaagtttagtgcccttaggtaaactgcaccaccaacgagtgcaacatcccgtaacaacacaattccaaccagtccagctttagagcacaaatgtcccatgcatccaccaaaattgagtatagtatcaaagatttttaagaagtttaaaaggtagtagtgcaatctaggactaacacacacagccgagtttagcaactagttaattaacttagtacggtttcctcttgatacatccatgcaatcttgtaaggaggtttgttcaaggagatcaaataactgtgcttatgaaattatgaatacgacaattctgatacatttttcccaggcgatcactcaattggagtgtaaatcaaagcacatgttccttataagagaaaattccgcccttcaactttgtgaactctagctatttcaaagtttcaattgtaactgctaacttattatctaccaggagtaaaagaggtagaagaatactcacgatgtaagagatccttctgcaccattgctactgctacacacccgataagaacctgaattcaaaacacgagcacaatcaagaaaacggaattgaaatgaaatgaaacctcacacatgtttgcagcttgaaactaaccttaactctcaaacacattcagagaacatccacaatgagccaacaaagtaaaacacataatagataaagaaagactttaccttgtctgcaagaggatcaaggtacgagccaaccacagagttaatcttcatcctccgagccacgtaaccatctaactacaaaatcaagcatctattaatacaatgttcttcttccaatactacaaaaaagaaaaaagaatcacaaagaagatgcatacccaatcactagctccagaaacagccaaccctaagaaagcagaagaatacatctcattcgagatcatcctacaatagaaccacaaacaaagtctcagattcttcattctcctaatattatcttcctgaggaatatatacttctatacttaccaccaaagcacaggaccagatactaatctcgccattgatatcatattcggcacattaacaaaactcttgactaattttccaccatcttcttccttggaatcgttgcgatccaccgtcaatatgtttggtaccacagactgtaaccctaactgtctcggaaacctagttctgcttctaattcgatccaatctaagattcagagcttcgacttttttcaaaacagagccgtttccgcgccagtgcaaaggtgtcgcagactggagaagtttccaaggaggagaagataagaagagaggtccattaagaggaacgaaccatttcgaaagcggagataaacggtgtgagaaatgtgggaacaacggcgaaaactgcggtggagtcagagaaacggttccgccggaagctgtagcggcggtgaagaatggtcttgttttccggtgattgatttcaactagctttcttagagatctgtaaatcgccattgatcatcaacaaagcagcttcgtcttcctcattaattttaatttaattactgtttagttaggaatttgaattttgttttgattcctttaacaccggaaaggaggaagaagatgtatcagagaggcgactaggttttcgctgctggcttgtgccacgtgtaatcttcatgaaacacgtggatgctttatgtacacgtggtgagatcattcggtatagctataccgaatcgggatattaaccggaataagaaatcggattagcaacgttcagcccgattcggaaaattggatcaaatgtttgtttagggctgagcataaaatcagaaatccgaaaccgatccgaaaaattcggtttcgaaatcgaaccaaaaagttaaaaaatctgaccggataacgaattttcttatctgaattattcgaaccgaatcatatctgaaccgaaaatcgaactgatatccgctaatccgaaataaaattatatatttaaaaatattagttatatttagttataatttataaccaaaaaataataaataacacaaatatctgaaataactttgatatccaattttgttttagttatatttgttataattatacaaagtttgcaaacttaaaccaaattttagtaaaagtaaacgatttattattaaaattaaacaatttttagtcttttttttctcaaaaactgttgcgaaaccgatctgaatccaatatcatccaaaccgaaaccaaactgtatagtcatataatccgaacggataataaacttcttcatccaaattatgcgaattcaaaaaaattcgatctgattccgatccgaaatccgaatggccagacctatgcctatatttgttgaaatcaatttttatttttaacagagaacaaaagtttgaaaattttaaattataattatattattacaatcaatattcgagatgaatgttattttttcgaaccaaccaatgaaccaaaacaccttttgttcggtttggtataaaccaacaaaatgaagtaaaccggtaaaatctgaagcactcaacagtctcactaaacgtgctctggcgaggctgaatcaaaaatgaacctaagttgttgcttaacttcatcttctgcaaatgttgcgtctatggctgctctagccaatgcaaaggtttcacttttactaagaccttcacagaagaaacaaaattagattatttggaaatgtagtttctttgtgaatctaaacttaatcacaattctcaaaaatcagaaaagctctgtaactgttggatttgagctcaggttctggaagctcaccaagagaacgaacagcgagggcgtactcgttggagaggctagtggagaatactccaaaatcatcagtgcatagaatcaatggatgctttgcattgtaaagatcagctgttaagatcagactaagatcttgtcaagattgctttgattttaaatgaacaaggaggaatgtagaaaacgaagcagcggaaagagaaaatctaaccgaaatggtgtatatcgatggaagatatcgatttggttacaatgttggatgttaaacatatttcaacctgcaaaacatagcaaactcttgaaattggttaaagagattataagaaacagagaataatggtacatgcaaatctattaccggaatccggaaagatttcaactttgtccaatcttcgtctttgaagaaacaggcatgtccaatccgatgcggtttaaaatcaagcatggcttggatctctttcggattgggaacctacaaagcactaagatagagaaagtagtagacaatctgaaacataaacatttgaaaatcggttaagtggattttcaagagttaatacctctccacagtgaagagtgatgtgaagatcattgtctttggcatattgtaatgcaggcaagaaagtgctcctacaagaacatggaagatttcaaaaccaactcataaagcgaagcaaaagataaagaggagaactaagaacagtttaccattctccaacaagaggattccccgaaagatcgataccaactaccccgacatctctcatttccaatgcgagcttaacctttaaagaaaaaaggagagtatcaaatgttttctgcattagtcttttaagtattctgagtagcttagcttgttttgaaacactaacagtttccattgcggactctgttgtttccctacgatcaatactaagaagaagtctaacataaatcttctttcttccaatcccatcaccagcattgtgcagtttttgagaatcagatgcggtaacaaaatcaatatcgacttcactgacagatcttagaccttggattacagcttccatgtaagaacgtttactcatacctattgaatcactcctctacaaacaaacaatctccatcattcatataacttaaccacttgcaaaaaatatgccaaaaggtgtgtacctttggagtagttcgtaactcaagatacaccacattctctaaagcaaaatcttccacaacctgtcaagataagatcatcagtcaagtctatagaattactaaaatcaagctaatgaatggaaattagaattagggttttacttctcttgtgatccttgtcacagttttgtgatcagtagtgagcttatggatcaaatcaaacaacttgaagacttcaaccaaagatcgatcatcttaaaaaaaaacatcatcacacataccaaacattagaaactacttgcgacactagagtagactaaaacttaagcaaaatacagaacaacgaattcaaaaaattaaagactcttacttttttgaatgacatgttcaacatcagcaaacactataacgcctttctcaccaagaaccctagcaagctctctgattcatcaaaagaaacgaaacccatcagttcaaaatatcaaattgggtaaattcataattgatcagtgcaattgcagaaagttgcagatacgaaagatagagttaatggaaacaaaactcgtaagaaagaagataaatttgggggatttacagaagagtggagtctctaatggaaccgttgagatgagcatgaagctcgattttgggcagtgattgtatccattccattttttttttgtccagaagaagagaagagacacaattacggattaggaagacaaacacagacgcaagttgagtagtgaagaagcgtgtaaattttatcagttcagttgaaaaaagaaaagtaactaaataatcaaaaatagttttgagcccaaaaacttcgtttccttacggaccatacattagaccggcgacacaaatttagcaaagctacaataatgaatttatcataatttgtttataaatactttgataaaatcttttatatgttagtgttcatgatacatctacactatataaaagttgagactatttgcttaccaaatctttaaaacgacaaattggaagctgctacatcaataatttacatatttagcagctatttaattaacgttttcgaaaacaaccaatcgggagttgccacattaataattaaaatatttaaaatctaattaattaacatttttgaaaataataattactttctattttaaaatttaaaataaaaaagaaaactaacaaatattaaatttaaacttataaaataggaagctatataattataatcttgtaatattaaactcaaatctttatgattttctacaactaatccaacatttttaaatataacttaaagaaacgtaacaaggacgtggtttgatggtggtgtttttaaccgtgtcaatttgaatcaagttctcgaagatataaattgaggtttttcagtctagaaagcgtgaaggtgaaaacgatctaaaatgcatcaaaagagaaaagtgatagagttaagtaccaatttagaagttaaagcattttcttagaataacataaaacaaaacagagtacatcttgacgagcttgaaaaatgcttatcaacaccataaaaacactacaagtctctcttctgctgacacctccgctttttcagttaatcacagcttgacacctcattaaaatcaacagccaatcagaacattttgattaatacacctcatttacgttgaccaataaaaacttactatttttccatgtcatcccatcaacttaacaaaattaaaattagacatgggcctaccccaaccaaactattttcaaaattaaaatctatataaaaacataggcctaaacttcctaatctagaaaacttaggcctcggaaaataaaccgcagcgaatgtaccgaaccaaaactgatgaaaaaaactaaaccgaaccgaacaaaatatttgaaaataactgaatggatattaaattctataactgaaaccgaatggatacagaccaaaagattttggataaccaaaaatatccaaaatataattatatttttaaaaatattagttatttctaaacctaataattaaaaatagatatacgtataatagtaaaaatactcgaaagtaaccaaaaatatatgaaaatatcaaaaataactaaaatatctaaaaatatttaaacaaaaataaccgaatagatattaatttttaaaaccgaatccgaactgaaacgaaccataattttaaaataaccgaatccaattcgatgcggttttaaaaattttaaaaccgaatccgaactgaaaccgaaccataattttaaaataaccgaaaccgaatggatagagaccaaaagattttggataaccgaaaatatccaaaatataattatattttaaaaatattagttatttctaaacctaataattaaaaatagatatacgtataatagtaaaaatactcgaaagtaaccaaaaatatatgaaaatatcaaaaataactaaaatatctaaaaatatttaaagaaaaataaccgaatagatattaatttttaaaaccgaatccgaactgaaaccgaaccataattttaaaataaccgaatggatactaaactttataactgaaagaactaataaccgaatggatacgaatcgatactgaatggataatcgaatgcccatgactaagaaaacttatctaaaggcttgactggttgaaacgcagtgcctgcatttgtgactgcatgagtttacggaatcagacagttgcggtttcaagcattataaacctttttgaacgactggtttaacggttaaaaattggtgcatttttggaaggtttatgactggttaacggatttacgtttatggtagaaaaattacgggtttatgtttttagcaagctaattacgggtttacgtttttggcagaaaaattacgggtttacattttttttgcggcaaaattacggctttacgttttttggcgggaaaattgaaggtttaggttttttggcggaaattacgggtttacgtttttggcggaaaaattacggatttctttttttggcgggaaaattacgggattacttttttggcaaaaaaattaagattttatgtttttggcatgaaaattacgagtttatgataatgttatcatcaatgatgatatctatcatgactatggtatgttgatatgatgatgaagaagatagtatgatgatgatggtgatggtaatatgatattatgagagggtaatgatgatgatgatattgtgttgataatgaataaattgatgggttgatgaagccatttgaattttttttgattatattcaatcggtttagagattttagtacaactaagatgtcatttttgttttttaaggtctaattaaatttatctcttttctggtatggttattcgattctccaataatataagtttcaattttcaagttttgaaaaacaaacaaacatagcttttagtttttttatacttcttcaacgtatgaatcaaatatgcatatggaacatcaaaatcaaatatgataactccatataacatattcttaagaatcttcaatgactttaacctcaccagaatcagcacctggtgatttttaactcttttcacttttgttttttaatgactcttctaaaaagatgttcgtaatacaaaaaaattagcttccaaaacttataaaagctatatagatcttactttaaaaaattaacaaatgcattgagctcttaatcactttctaatgaattcttttgttctacatatatcatgaatcatgacaaataacattcaatacctacatacaacttaacaaaattacattttttaataaaaaaagcccgcgatttggttcgggtttcgccctagtactaactagagaagaaagagattttcgaagaaaaaatatggaacatgtgaaaagtttagaaggtatgacacatattgcttaaacaaaatcataagaggatggaaagagacactgtaagaaaaaatgaaacaaataaaacgagtgcttgcaaaaagatagggagagtgatagctctttgtaaaaaaattgtgaagacagaaattcatatacatattgaaaagaatgtgagaaaatatgagttgttaaagtaaagtatagataagcttatgaatatacttctatataatatcttatttttagacgagctatactaactaatgcagcgaagataaacaaaaaagaatagtaaatttacggatttcaaaatgagaaagtcgtcgaagttattttccataaaacaatttatttcatacataaaaagacgtcgtgatcctaaatatctaaagctaaagagagagtcatgagccaaaaaaatgttcttttgataaatgttgtaaacctaaaagttgtattaaagttatttttagttttgtatttaaattgtaactattgtcatggtaattttaaaattcaaagagtttataatattaacaacaagtagacatataaaaacatatcttttaaaaaatttctataataattttattcacacaaaaaaatattaaaaagttttacaaatagacccatgcgtagcgtggattcataacctaggatttagaacgactaatcgggagttgccacataaataattaacatatttagtatctaattaattaacatttttgaaaacaaccaatcgggagctgccacatcaataattaacatatttagcatctaattaattaacatttttgaaaatagcaattactttatattttaaaatgtaaaaacaaaggaactaacaaatattaaatttaaacttataaaataggaagctatataattataattatgtaataataaactcaaacccttataggattttatacaactaatccaacatttttttaatataacttaaagaaacgtaacaaggacgtggtttgatggtggtgtttttaactgtatcaatttgaatcaagttctcgaagatatgctcgtggcaactaccatgagaattccactttttcggtcatgtgacaaccacacaaatttccgagtttcacgagttcaaaatcggtgtttcaactcgtaacttagccttgaacgcataaaagcgaactgaatgaattagagttgtaatgttgtatttatttttgtagattgttttaatccgcttcttgctaatctctgtatttctgtcaaaaatcaaaaataatataaaatctaattgtctaccaaaaaaaaaatcattcatagtccatgagtagaatcaaaacaagatagattcaaactttatcaagatagataaataagctaagaaatgaaatagttcctcaaaactaaatttagtgtcaccaagaggcaagatcaaacttttcaaataagggaaagaagagaattgcaacgtgattaattgatgaggtcatagtaaaagtcaaaaatctgtgtgactcaaaacgggtaaaaacaataattgggatgtagttgataactctaaaaaaaaagggacaaaaatgagatttgcataaagtagagatacaaaattgagaagaaaaaaaaatcctcttcactaaaaaaaaaaaaacttccgttatcgatctctatctctctcttcccccacaagggtggcgattcgaggagtttccatggtggaacagaaaccctagagcctttatgctgccactaattatcactcttcactattgaattggggatggactcagagaaaatcctcaatccaagacttgtttcgattaatagcaccagccgcaaaggtatgtccgttgagttgccgcagaaaccgccgccaccgccgtcgttgttagaccggtttaaagctttgcttaatcagcgtgaagatgagttcggtggtggtgaagaggttttgcctccgagtatggatgagattgttcagctttatgaggttgttttgggtgagcttactttcaattctaagcctattatcactgatctcactattatcgctggtgaacaacgggaacatggtgaaggaatcgctaatgctatttgcactcgaatccttgaggtttgctttcttcttatttgtttccactttctagccttattgtatagtatgtaagtgtagaagtgggaaaaaaattaggtttttgattgtcagagattagtgtttggtttgtggtttagtgaaatggctgcttctgagttacctgtgggtgtatatatgcaggctcctgttgagcaaaagttgccatctctgtatcttttagacagcattgttaagaacattgggcgggattatggtcgctatttctcatcccgtctacccgaggtgagcagtctacaagaagatgtttacttaaatgatttgaatagggctgaagcatacccatgagctgttttgatcctattctgctttaggtcttctgccttgcatataggcaagcacatccgagtttacatccgtcaatgcgtcacctgtttgggacttggtcgagtgtttttccaccacctgtactacgcaagattgatatgcaattgcaactttcatctgcagcaaaccaatcttccgtaggggcttctgagcctagtcaaccaacgagaggtatacatgttaatccaaaatatcttcgcaggctggagccctcagccgccgaaaatgtaagcctttctctttgtcattatgaacagagatgacattctttttttaggtgcatctgcaaccttgaagctatggtgtgttaattttatataagtgtactaagtaaaacgggtattagattagtttggcctcatagtggtcttatccattgtatttctttaaagttttgttagttagacgagatagatgtttacattcttcaagtaatcaatcttgactggaagggagttgttgttatggcctctctcagttatacatgatgagtaggtcactgggactctggtacattagaaatgatcttgttagcacatgtagagggtttttttttggttatagtacagtagatcactgtttatgcatcatgtgtcgtttggaactgtttttatatgttttttttcaaagagtgactatacctgagatgcatatttccttaattgctcttgcttgacatgcagaatttgagaggaattaattccagtgcaagagtttatggccaaaattcactcggtgggtataatgatttcgaagatcagttagagagcccatcttcactgtctagtacaccagatggttttaccaggaggtctaatgatggagctaatccttctaatcaagcttttaactatggaatgggtcgagctactagcagagatgatgaacatatggaatggcgaagaaaggaaaacttaggccaaggaaatgatcacgaaagacctagagcgttgatagatgcatatggagttgacaccagcaaacacgtaacgatcaataaaccaattcgcgatatgaatggcatgcacagtaagatggttacaccatggcagaacactgaggaagaagagtttgattgggaagatatgagccctaccctagatcgtagcagagctggtgaatttttgcgatcatctgtaccagcattaggaagtgtaagggcaagacccagagtaggaaacacaagtgattttcatttagattctgacattaagaatggtgtaagtcatcagctacgagaaaattggagtttgtcacaaaattatccacatacatccaaccgtgttgatacaagagcaggaaaagacttgaaagtattggcttcatctgtagggttagtttcatcaaacagtgaattcggggctcctccatttgatagcattcaagatgttaactcacgttttggccgggctcttcctgatgggacatggccccatttgagtgctagaggacccaactctctccctgtaccttctgctcatttgcatcatttggcaaatcccggtaatgcgatgtcaaatcgcttgcaaggtaagcctttatataggcccgaaaaccaggtctctcagagtcatcttaatgatatgactcaacagaatcagatgctagttaattatttgccatcctcatctgctatggctccaaggccaatgcaatcgttgttaacccacgtaagtcatgggtaccctccacatgggtcaaccattagaccatctttatcaatccaaggtggggaagccatgcatcctctttcttcaggagttttatctcagataggagcctctaatcaaccaccaggtggcgcattctctggtctgattggctctctcatggctcaaggtttgatctcattgaacaatcagcctgctggtcaggtaattattcaaatcatgtccttgagagtcggtttgttcttagttattgctttatcttgaattgttggtttatatattcagggaccattggggttggagtttgatgcagacatgctcaagatacgtaatgagtctgcaatcagtgctttatatggggatctcccgaggcaatgcacaacctgtggtctacgcttcaagtgccaagaagagcacagtaagcacatggattggcatgtaaccaagaacaggatgtccaagaaccataagcagaacccttctcggaaatggtttgtaagtgctagcatgtggctcagtggtgcagaagcacttggagctgaagcagtaccagggttcttgcccacggagccaacaacagaaaagaaggatgacgaagatatggcagttcctgcagatgaagaccaaacttcatgtgcattatgtggtgagccatttgaagacttttatagtgatgaaaccgaggaatggatgtacaaaggtgcggtatacatgaatgctcctgaagaatcaacaacagatatggacaagtctcagttaggtcctatagtgcatgcaaagtgcaggccagagtccaatggggtaagccattccatgcattttcattagcttcatttgtgtctagttgaatccattttcattttcgctgctagacatttatccagtgacgacctcttgatttcccgatcatggctttttcagggtgatatggaagagggtagtcagaggaaaaagatgcggagttagatcccttagaccgaattttaggtctttttcttgactacatttaagttacattcttatttcttcatcatctatatgcacttagtcacagaataccaccaatgaagagaaatgatggagagagtcttctttctcctaaaactgtaccattgaaaaaaagaggtttacacccacatatattatcattctttatgcctctaaattcctgttgtgccttaggacatggatatcgtgtaactgttctgcattctctgctacacctaacctggggtgcttgtagtagtaaaatcagatgtcgcaacagtagtttccccatgtaaatggaatacaatgtctctgtttcggattgtctttttctttttcatctttagatattgcagggaaagcccgagaagactgatattcgaatgtgaacagatttcttatgatgaatggatctcatagatgctgttgctaagagaaccagtttcaggtttcttctttagagctttccctgtctgagttttacctttctatgttaggctgttagctaaaaatgttagttaacataactctctttaagcgtatttgttctcttgactttgtctataatgaaacaagttttacttttcttctatctgaaccttttgcttttgaaatttccactacttgtatcttcatacctacatgatacagagccggatttatgtcgaagtagattgaacgatagttaaagctt

SEQ ID NO: 532 - DNA, 53778 bp, Arabidopsis thaliana
taggctgttagctaaaaatgttagttaacataactctctttaagcgtatttgttctcttgactttgtctataatgaaacaagttttacttttcttctatctgaaccttttgcttttgaaatttccactacttgtatcttcatacctacatgatacagagccggatttatgtcgaagtagattgaacgatagttaaagctttcgaacttacttggctttttgctcgatcaaactagagttttttcatgactgttacatttgaaatatggaattataaagatttaaaggttatgatttagttctggtagtaccttataggactgcagagcaaactcagttcaaatctggctttgtctcaaccgttagtctctaaacaagagtatgtgatgatcaatagatgtaatggctggagtaaaattcatgtttgttatatacattgtgaaaatagtctattatagtatgaatataagaaaacagcttgcaatatgcaatatgaactaagctagaacaaaagatcaggttaagaacacacatcattgcccttttattttgcctttgttagaaaattggaccgttggttgaatgggataagagagagctaacagaaactagtagtgtactaataacaaagattttaactccatatctgtcaagtgcaacaaaagggcttacaatacaaaacaacaaagaaactgacaacttgggtcggagaacgcaaaaaggggaaacccaaaaggtgttcaaaaaactgtcaacgaaacgcaaaatagacaatttaaaaccgtggtttccagcagaagtcaatacccgaaccactttaccttttttcatcagcttgagatgaaattaaacgcaaaaggtgcgttcttgacttcctttggatttcaaaaaacacaaaatgagaaaccataaccgctcttaatccttccttttctcttattcttacttcttctgcataaggaaaaaacacttgttacttgctccacaagaatcccattcggttaagatcttagttgtggaatcatacctgaaaaaaaactacgctcctcctccaacatcacaagaaacagcagctttaatcctctccaccgtacatttgatcagactattaaccgtagccaccgagccaagtgagagtttagctgtaggaacagagtcaacaagaatctgaaacgcaacggttaaaagcgaaccaccacaactcccagaagaagtagtagaaaccatttcctgatgctgattcccatctcctcctccaaccgaaccatccggtaaaatagcaaaaccagacggcaacaacgccacgtaatcaggatctccaccgcttagaaccacattcatcgccactatatccactggcgcgtaaatcacatacgatcctgatgcatctgtacagctctcttgtagaatcaacatgttgctctggctcgagtttccactctgtttacaacaacaacaaagtttcctcaatctgaaaacgataaaacaaagagaaaatatcgatagttaataatgtcaagtcttacattgactcggagcaaggagacacagtttccaggttcatgaccattggctatatgagccatttcctgaaccatacctccatttgacagaatatcccactgcatcaaagttcaaaacctaaattaacaaacctaaatctacaaatcgtgactcgcaaggttctaaccctattttctttgtttattcaatttggtctgaagtaataattttaaacttttgcattacctcttttcttgaattttcgtcacggaggaaatcaaaaacacgtttgggagcaactgggatccagaatgaagtagctgcactaagaacaatacccggaggtcttcctggatcatccatactcttgcgggtcatgacccgaacatcatcggatcctgttgtcgacattgttgtccaagcgtgtgcagtcgacgcgccaacaccactgcagaaactcataaccattctctcagctagcttcaacatactcttccttccttcaggactcgttatcactacatatattaattaccataaattataaggaccaaattagtaaaaattaaaactaacgttttcatttaatttagccccaacatatttgaattgatcagaatagcccctaccggaaagatcaccaggaatgttgctggccatggagctagcaagccgctcgcattgtcgttcgagtgtagccacccaacgtttcgcaccgaaagctaaaccggactgaaccaacggtttatacatgttgtgaactgatctatcatctacctccatatgctctatccatgtaacctttgaacagagtaatcatcatcacacaatcagtttcataaaatttaaatttctaccataaactttataaatactcaatttaaaccctatataccttagaataaccattaggcaattcttgaatcagacaacctgaaggccttcttctagttcttaagattggagtacttggtctaaggctgtccaaagagacatcaaccacagcccaagagccgtcactgtgttgtttgcagtatctcacaaagtagttctcacgcgttgggactaggggtgatggaacttgaaactcagctgtcatcttcacatacccaaaataacattcagaaaccgattatcatagtattcaatgtataggtttcttgagaagcaagtaattaaacacatgtacataccacttgtaaagcaccgttgtagttcccagcaactccagttgaaagaacttcaagtgtcaaggctcttgacacaatcccagagaaaacacaagaccattgattcttgaacccacatcaaaagattaaaactttagttagtttattcaatcatttttagcccttaagttacttgaagaacaagtaattaccacatccatgagaatctcaacgagattgatgtgattcattataacaactgcagattgtcttgacgcctctgatcttaatcctaatggctttggtccaattcctctcggaaacgttctgaaatactcttcttcgttgagaatctcgactgaattatcggttgaaagccataaaggatctccagtttgagccattctcacgagttcctccatagctgcaaccgctagctccacgattataggcttatcagtctcagaaggaatcgaaactgacctcaaaatgtcccctgttccatacatttctcctacaaagcctgtctggttcccaaagtttccaacttcaagatcaagcgaacgagaaggcgcgtggatcgctagtggagcgaaagacgatcctaacggcttcccaacgtatttcgcagcaatagcagagatcctatcaatctgtagaatgaagaggtaacagatttagagttcaagttcatcaaacaaaagtaatatagacagatgtatgtatatacctcttcgcggagccgagcattttcgatcctgagatgttgttcgtcaaaagacatttctccaatagcagctggaccgccacagttagggcatgtagcattgcttagagcttctttgtatctattgttctctgctctgagcttgtcattgtctgactttagaatctggttctcatgcctctcactttgtgcctatatatattacacacaatgtattgtactgagaaatctttgactaatatgaaactagattacttaaaatattgatattggctttaagaagaatatatatactagttaatggttacaaaccttcatctgtgtgcgtttgttttggaaccaaaacttaacttgaagaggctctaaattgagatcacggctcaactcttttcgttgcttatcatctggatgaggacattccttaaagaatctgtaaaactccaaaaaactcaaaatataagagaatgttttcaatctgttgtgacatatatatgagctatgagttttcagtgtgtttttcttacgattcgagctcttgaatttggcgttgcgtgtggcgatggtaacgcttctttttgttgggacgttggctaggatcttgaagctcttcaccagaaggattctcagtagtgacttcggtacctgacttggtctcaaagtcatcttctcggctaccggtgattcccaagtcgttatcagaggtactctttggggtcatatcgaacatatgatggctctcaaacatgtttggatggtacattgttatggatgattgactatgatcactcagttagatattaataacgaaatggatttttggagttgtcaactttggtttccttcaaggcactgatcaatatattttcgtgatttgattttcttctccaagtatatcttccactgcccaaaatcaaaatcacaatcgaattagtaaaagattatatatgaaacgctcatatatgtatacagaatgaagaagaagaaaatcattatggaaatggaagaaaataattatattaagggaaagttatttctagctgttatgaaactatatattaaattaataattttatcattttcacaagtactaaaccattaattgttaggtttttgtttactctccattttttcggttggatatgtatatatttttgcatacaatttatagataaattcatctaatcataattatgtaactattaattaaaactcttaattacgtatgaaaactatctaagatgttatagtatagaaatttcagatataaataacataaaatatttatataatgtatacatccctaaaaaattataatgaaactaaagattaacgataatatttgttaaaaatgaggcacatatacatacaaattatgtatacgtacatatgtataaatatatatattacaaacgtaatatttacatatataacttttactttataacataacatataaactctataatcaatatgataatgacctaatatattaattttacaaataatgagatggaaatatgaggagagatttgaatatagacccaaaatgatatttttacttcaaagtttttttttttggaaagcgattttctttacgaaaacggataaattgttttagatttataatgacggccttacaaaaacaacaaatgagataagaaacaaacaaaaatgagatttgggtagtttttattcacacttaagatggatccatccatatgcacagtaacatatatgagagtatatctatctccaagtatgtgtacatataaacaaacaaacaaaaagaaaaatcaatcttgaaagtcacaagacttctcaaagcatcagatctatcggacagatctagtgtaggaagaagcgagagagagagagttatgatctttaagaaaccctagtttggtgtatggtcagaaatgatacagtaagaagaacacttaaataatataaatacttactcaattcgatctgaaactcaagaaagttttgaaaccctaaagatagatctctttgtagttattttttctttttttcccttttgttggttgaagttttggattcgagtttaatgatcttttctctctcttttgtcgactcaaaagctagtaagagaagagagagagagaaccagattcacaagcttctgatctctcaattgaatttattaaagaattaaattgaccttggtctttgtgcactaaagacgaaccgtttccagtaacaaaactaatgaaaaaggctaagtttaattagtttaatacaggatatatagggttgattaattaaaagcgattaaaaatagtatatagtatatagggttaattaaagcgttgacaataagtcaatggtcttttttttgtgacacaaccaccaagtagatttcgtcaaaccccttttgaaactgctaactccaagaaagtttttggtaacgctttatttatcttagatcataagtctccgcaaaaagacacaaaaaacattaaattaaattaaactaaaataatctagaaaaaaaaacaaatcataggcatcgagatcttgagaaccaaaaaacaccataaacaaaaaaatagaagatctaagagtctcaacaacatgcaatatggatccgatctataaacataacctaagatacatacacacaaatgcatatgcatacatatatgtgtagagagagaaagatcttttttgataatagagatcttacttttggagacacagtgaaaccctaattcacaatgatctttggtttatgcccatttttgcctttgaagaacagaagatctgagacaatgataaagagaagtaaaagggttggttgctccggaaaaaccgaccggttacccgagaaccggtgttattttgggataatctcaaaccggggaagagctagctaggtattaagaacaatggaagtttgttgttgaagaagaagaaggagaagaggacaagagaggaaggaaaagaacaggtggagttgcaataagaaatttaaaaggagttattgatgagcgcatagagagggtgcaatgcatttatgatgatctaaagctccattaatgctatagtgagagaaacttactcatttctttgtatatttatctctatagagtgatagaaagagtttcggtttatataagtcaaaaccaaaatcactgtttttcttttacctctataggttaaataaaaaacgtttaagcttgtaaagaataatcaaaaaaatttacatgcaagtgtttcgttggctacttggcttccacatatactaatgtgtataagaattcatattacaaccatttcgtacctcatctatgtcaacaacaacgcattagttaggttaacaaagatttagttacttgtcatattgcgtagttctcaaaatttagacctaagtgctagtgtactacaacatgtatatattcgtgcgtgtgcgtgtgtgtgtgtgtctaaattatgcatgaatacataaatgatttttattgttcaaatgctaattaagcgtttgatattattgtttttgtattaatgatagtagatttactcatatgcgagaactatatccaatatagaagcatggacgacgacatatcaataagagagagtttcttctattaattttcttagttattagctagctaggtcttccaactaagtatttataaccttttttctaataatcatcaattttaatggccctcgacttgatttcgagagaatatctaatatcttcatcattttctaatacgtatttattacagaaaatgacttttttttaatatgattttaaattatagtcaaaagaaaaagttactggatattacatatgaatgtaaaaacttttcagaatatatacaagaaattaagaattctagtcataatctcttcttgttgcaaaccaaagtactatgtcatcttcgtacttcgatgtgcctccactcttgagcgtgctaagccggtttttaatgtttttatcgaacgtcttgacaagcgttgcagttggtaaaggttgtttcccttgcctcctcctattattgcagaaaatagcttttaatatactaaatagatcgagtttaaattaaagaaaaatatacatgtcagaaactattgatctacagttttttaaaaagaggaaatatatgccacataacaagatgaatgtataatttgacattctactcaagtcagagctaaattgtacctgttactagtcatagccgcataaatattgatctcgtgatatgcaaatggaaaaattctgatgagatcaattttgttaacgatcagttgatctagaaaaatataggtgagatggatttagttggctagattatgtaatatatgatacaaatatcttgcgtcttgtttttttttttatcaaatgcactttttaagttatggatatgcatgtttccacattttcaaatgttttgctttttgcatatgctgtataataacaaacataataccgccgtacagcatctaagtcgtggaggatacaaattgcatcggcacgacggcacaaaagcattttatttggctagtatatatggttgttaagcaggaaactcaagactaatgaaacgaggaatacaatatgatcctatttgtattatgtgtgttgagaaggaagagacagtaaaactttatgtcttgcaaagttggactatatgatcatgatcaatatcactccacaaggtttctttccaatgacatcaattaattcaactttggtttctttttggaatcaacattaaaatgatgattcagatcgatgaatatagttttcatgagtttggagttttttttttttttttgataatttgcaaggatcatgagccaaattaggggtgtgcataatatctaaacccgaacatagcgcccggaaacgcatacccaaacgtacccacaatttaaatacatagtaattatataataatatatatttctaataacataagtgttcaaatattcagattatcagatattttaatattttttggatatttaattaatctattttttgagtaaatttggatagaaatattcaaagcttttagacaatttgcatattttggaatagtttgaataaatttagttataaaatttttgattttggaaatctacagtaatgcgaatctaaatctgaaatataaaaatacccgaatatatacaatatttttaaatttaaaaatccaaaatatctgattcgaaccctaacccaaactcccacctctgccaaacattgaattttttttttttcttctggccatctattatcatatgtcatatgttctagactaactatgatatagtttatttatacgaaaattttgttccattattaaacaaacaaaaaaaactgatgggatacgtcaaattcaaacggcagacattgtgagtatgtgagataaacgacagtagttcaacatgagttttagatgaaaacgtcagaatatgcaaatttagagcggtaacttaacgaatgtgccaaaggtaattaagtaaattaaagaagatgaaacgcttggagcaatgcggcaacgtcaccttcaaataatttagctagtgggaaagagtgctactgttacctaccaactaactcatttattgactctatatatatatttttttttcttataaatttttcttttcttataattatttccttatttcaaaatttcaaattctcagacattgcgtaaagttacagacagattttgtttttctctttcaatgagaaaaataactttcagaaatattattaacttatatttcattaaaaaaacacatttgtaaaaagtaaaaaacataactatgtaattttatgacagttgttttttaatatgaaaaggtaacctatgtcttcaagtctatagttctcctatggtttttgttattaacaaatgagtggaacaatataaactataaacttcaaagtcaatgtataaaagagactacaaattaaaatgggggtaaaaaaaatgaaaagccatatagtgagtgatatatacacatgcatgggaccgagtcatttaatttatttaggaacatttcagtttatgttttgatttatttggccccacattttccaagttgaatttttgaatttgttttcatttgaacttgtattttgtttaatgtagattgttgatagattccatgcacttttcttctcattaattttcaaagtgatttttggagaaaaaatgctatatttataagagttattactagtaaactatagttcaattaacaaaccttttggcaaataacagagttttaagatatgtgtaataagactattaaataaaagttcaaaaactttcataatcctactaattttctctttaagatatggtgaagtaatgtgccgtagagggactcaatttctagatattttgttatcttctggaaatttagctattataacaaaatttgtgagatcatgcaaatctaactccattgccaagtgaattgctcaaagcctcaaagtgttactcgagatgacgtttcagtcttttgtcgctttggagatattgtttgtcttcacaactagtgcgagaataatcaacatgcaaatttacgttctttttattttttttaataatatttccttgctatgttttgagttttgactttcttcccaaataacacaaaagataattccactcaaattcaccatcatttcatacaaattttcttacttttttctttccctatttctaagtttacattaaaataaatcaaacgccaaacactacacgatgtctacatatgtgaaaaaaaatcccaaaatgaatcagcagaaaatgcaaacaaaatccccttaagtatgcacaaagatgaccaaacttttgattttttttttctttcacctattatatgttctagattaatcgtgatacagttgatttatacgaagatttggataatacagatgatcttgaagattttggagatgatgatgatgaagaagatttctttcttctactgcttttcttcttgttatttttcggtaaatttatcggagtaactggaggtatatctcgtagtgtatctgatattcctcgttgactcgatccttgatcaaaatctatatttacaaaaagaacataatgtgattagtaaattttgactaaaagcctaaaactgtagtaaaaaagacattaggtgaacaaaatgttttgatttaagaaaataaaagggtgaataaacctcaaatctttttggtagaatgaataaacttcaatataccaaattgggtcctaattttcaaagattaaaaacaattcataaatcataacttaaagtttttcccatcttgcaaatttcattctgaaaccttcgtaaaaagttataatattttggtgcttatttcaataaagttcatttttggttttaagttaaatatatattaccaaattccatctcttatctgcaatgatgatatacaaatcttctatttattcaatctatatataaaatttggataacccatctatatttgtttacctattcaaattgtaatttgaaagtaagtggatggttaatcacatcaattttaaagaaaaaaaaccaaggaaatgaaaaagttaaaaacaaataaataacttaccagtggaagaagaagaagtgaagaaagaagtagaaggtcttgcattactgaaagatgatggtcttggagataaaagctcagccccgaccttaaactcactcatcttcacaagaaatacaaatattcactgattagctatatgaattttacttcttttttaggttttacttgttagaaactagaattttcacatataggccgaaaaggcactaaagagcttacccaaccaggagcactaccagatgaaccctcccagccaatatgagccacatgttttacatctgttggaaacccaatttctatttcatctctctctttctcaacggctgaaacataagataatattcttaaaagccaaacaattacatgagaacactctacaaatatgtgatagacatttggtataagtactcaaatattcttggtacacatcaaaaacataatgtagaagcaaatatcaaaagatatatgcactaaatgactatatatatatatatatatatatgttgaaagtttattagcaagaataatgcagtagtaaaatcgtaaaatcataaaatgtctattaaatagcatgaaaaacccctattatacatgaatatcacaataatttgtctaaaccacttttgaaaccacgctcatttacgattttatcatcgtgtcattttgcaaattaataaatcttcactgtatccctatttagcaattttcatcaaatataggtaaacaattaatatattatatgaagagagaaaatggtaaagaaagtatattaccaaatatttgagagatacatttgaagcctttatagatgcccttcattttcattgacatggtgaagaagatcacaaaacctccaaactataatgctgaatttgtcttcgattatccttcgtaagactcgattacctgaaaactatgtgtcctttctattgccaagattgaagaagccaaacaacaatctcctctctccggatgctacttcaatgttctatgttttgtttaccaaaagttctggtttcagtatttagtattttactaatcaacccacaatatatatacaaaaggaaactagtagcaaatgatcataaagatataatgcatgtgatagatgaataatgtttctcctatggaacaagattggaatttattcgtttgataaaagatctaattaagcttcaaaatttaactttataaaagcacataatgtgaaaatattttaagttcaagattggtatacatgaccattatcatatgattttgagatttttgacattataaacccatgaaattgaattattgatgatatatatcattaagaaacttaattacgataaagtttacctgtaattctataaactcgttggaaaaagaatgatataaacaagaatagcagaatagagaaacagcctctcctttgattctatgcttctttcatcttttggagaagcctctcttgataaatcacaaagcatattatgtacaaaaggaatctcaattaacaaaacataatttcgtgaatttctcacgaaagtatgaaaaaaaaagagtttcaaaagatcgaagatggtgaaggccaagagaagaagaagacgaagaagaagacgaagaagaagacgaagaagaagacgaagaagaagacgaagaagaagacgaagaagaagacgaagaagagggagactaagtcaggcttaaggtaagagataagtaagtggagcaccatgaaatggcatctacacatatatatacttaaatttttaaaaactagaaaggaatatttcaggatggaatataatcactaatcaatgattagtttgtctatatatttgacacatatttagtaagaggagctgataatgatatatcaccagctataaattgatgtggatataattaaccagcaactattttagtttcataagaaattaacctcaagtgtttaagattttattatctggcgttggggattaatctagggtttattatagaccaaatattatatgaagctagagacaactgtacaagtttttaatgcatgcatattcaaatatacaaatcttatatttcatcatatttgttgaactcacgtttgtctaattgtctttctagctttcttgctggtataaatctcctaactggaatatgtattccagagtgaaattttcgattatgtaagttaataaatagattaatattcatatacattaacaaaaattctgatctgtcaagaaagcaaagaattttgaatgttgtgcgaagtgagagtcgctattaagaccacgttgacttgcataacactcaagtctttataagccaattagcacggtttacatatttgagatcgtggagatcacaagtaagaagatgaacgaggctaggcaattgtcaacaatgcagatcacaataagcgtgaaatagtgcaatttgatatcgatgtttctagccatgtaccgactagtccgaagggggactgaatataccactagtggtcgaggtggtccttaagaaacacaaggacatggaccatcatatgagttgaaatcaggagtcaaaccaaaccacaaattaataactacaatcaaaagaaatagtgttttagccacacaaaaacaagcaaaaaaaaaagcaaaataacatgatccgagtaacataattgcccttctcagttccactccaccaccaaataacataacccgagtaaaatttgtatccaaaaaaacaagatcaccatgagaatatctttaaaaggactagccagtgaagcgaatgaagtctcctaagcaatcatagaaatgattgatattgattttctctctcccagcatagatagcttctgcagatccaccgttttctccttgcgcagccatttctattagcatgtaaatcttcttgattggcatctgcgcgagaaagtaaaaaaccgttgttaagacaaacaaacaaacaaaacaatttcacggtttttgtcaatttccgcccggagaggacgaaaacttacgtcattgagagcctctgcagctgaatcaacatcatcctctgagaagaggttaagctgatttagcacctgaagcaaacgaaaaaaaaacaactgagaatttaaccagctcaagcattggattgttgggcaatgttagaaaagacacagtattgtcttggttaagcaaattctaatcatgccacatcgaacaactaaaaggaaaaaagagagtggatggtggagtttacaaagagaggagctggaaaaacaaattcgaaagtccatatatgaagaagataactcatttaccttctttgcgtcctctttttgcagtgtcggaacagagtgagtgacagagaagcaatcagagataccaacagactctaagaaggttacttcacttgttgtcccaaagacgagaagtttcttcccctgtgaacaaagattttaccaatttaaagatgttcaactgtaagaaattaacttatgatgatcaagcatatataaatatggataagaaaataacaaaacggtaatggaagcaccttaggaggaagtcgtttgagaaggaccatcagcgtctgtgaaattatgtttgaaaagcgaggaccgattgctatgaattccaacaatctgtaaatatcagaaatttaagtactttccagaagaaactacaaacgtatgctataagatattgagccaaggtctgaaacgtagaataaaaatagcaggtaataacctttcaatatcgtcaaggataatgatgctcattggagatttatatgcatcctcaaagacctggtctcattcacaccaaaaccaattgtcagtggatagaacagaataacaagaagtagaatgtttccagaggacagaccttgacaatgtgagcacattttgtgctctcagaaagaccaatcatagtttccgcagaaacctacaaaataagaaatcaatatcacacaaagagtaaaagatggtacggactaaatatactgtacaaagaaagatagacacttactatcttaacatatgggaagtcactatcgataccaattgttgctgctaaagcagttttcccactgtccagacaaaaaagttaaaacaatcagcaacaggttataaaacagtaagccaaaataatgtggctataactacggaagataccttccactgggcccctccagaaggcaagtgactagaggacttctagtactaactttaacttgctcgactagaagcatagctcttttgtaaatgtgattatgccgatgaccacaatctaccatcccattgagtctacatacatgtcagaaatgtaaaaactaaggcactggcaaataaaaatccaaaagtaatgcaatacatgcatgcgaaattgtcgctggaaatacaattggatcagacggaaaacaaaagaaaatatgtatgagtagtagagtactgcgttttcagaccatgactcacggaaaagaagagaattaagtttggctaaatcagcatatcaatgctaaaggcccattcgatcaagaactatcccaattcgtcaaaccaccacacacttattaaagaaaattacctgcagcgctctaggtcatctgtggaggctccaaatgcaggttgaacttcatagatagcgtggagaaaatcctccatagtgatcttgatattctcttcttccacaggctttgtaagatcatccatgcttagttgtctgtttaatgcatatgatgtagcacttttaacaacaccttcaagctctgcaccactgtaattttttgttcgagcagctgccagacaatattgatatatcacgtcagagaaacatttatgctagcaactaatccaaagcttaagactgaatttcttaggtcttcctaatacaaattactagacgatattcaaaagagtacatctgtcatgtagtgaggtggtgatatttggaattacagaacaggtctaccaaacattccatggtttaaacaattataatctatgaagacataccaagctcttggagattgatatcagtcccaaggaaagaattttccttcatcttatttgtatgaatctgaagaatttgtagacgcccagcttcatcaggaaggcttatctcaacctgaacctccaatcttccaggcctatagtccaagaaaataaaagtctaaattcgtatgtactacaaccattccaaaatttcatgtaagagcatatacgctttggatggaatcttttcaaatgacctaagataaaacgcaacttcaaaaccttccgtactgcttctggtgtaactagagtataaaagaaagggctgctatatattagcacaatgatagagataccttaaaagagcttcatcaagcaaatcctttctgtttgtcattccaatcagcaaaacattgtttaaggcctccacaccatctatctataaaaaaaggtgttagtcacgtccgtgaaaactccgaataaactgataatagcttgatctttgactgacctttgtcaaaagctggtttacaatactatcatggacacctgtgccatctctggttgaacctcttgactgaaaatcacaaagcatacaatcgttaatttattgtttaaactcataaccactagatcacttgaaagtatacccaaaatccagagaaaaatacagtcacaacacagagtagcaagatttcttacccagagttaatgggactggtggtcaaaactaaaagcatatttataacttcaaataagcaaaatcatcaaagataagaaaagataaagttgtgtaccttgcaaatagcatcaatctcatcaaaaataatgacatgcaactcactagcatcacctgagaaaataagaatgcccaattagtatatgcactggaaaaagaaaacacaaaagcacagatcagaaagaacaatgtttccttaccaagggtcctctggtcttgctcagcatcagcaaataagtctcttacattcttttctgtctcaccaacaaacttgctcagcacctcaggcccattaacgatctatataatgccagcaaaagaacaaaggaagcattaaacatgtggatttcaggaataaaaggcagtgaatgaaacattaaaatgtcgtaaactattgatgcaaataattaaaataggatctgcggctgccaatgtatgaaggaaatagtgagataattaaacagtcaatagcatgttctcacagaaggtgtacatccaaccagggtaacaaatcatgaagtgataatatatttaggtacatgcaagtgcaatcctgggtaacaaacttacaaaaaacatacaaatgaaattaaggactacaagcaagtaagttatcataattcttcttgatagactattatgaaaatcagaaatacctttggatcctttccattaagcatctttccaatttgccgtgccataagggttttgccagtaccaggaggtccaaaaagaagcatccctttaacatgctttattcccagtctgcaagatcaacaaagataaacttagaaggaatatatatctacaaatacagtctaacacttgcttgaagaatgagccagaaacctgctggtgacatgaggaggaaatacacgagaagcaaaagctcttctaaatatatcagcaaactctgcaccaagaccacctattcccagcgactcaaggttaaattccttatgtttgaatatattgctgctagcagcttcccgttggttgacaatctgcataagaacatacaagtttaaaatgaatacaagctagcaatctacatctgtttccataaaagagaaagcaccaaatgtgatactatttcaaatgtaagattgaatcatcatttgataggaattcttagagtaactgattcaattacacagatatagaaaacttatcaaaatcagacctttatgccacttgcatttgatgcttcaaacacaatatacgtgtctttagagagcaaccctctttcaatgccgttcgtgtgatcctgaccctcaacatccgctcgattgaccgtaagaatgtaattagttccatgatactcaaatgtcgctttctggcctacagtcaagacctgcagcagtgtgaattggttcaataaattaggctactatgattttgtgaggatctaaaggccaaataaccatataagtgataccacatatgaaataaatgagtaaatataactgtaagcagaatattataagatttgcagaatggtcaaccaaatgcattcaataaaaaccaatggttcagcagaaaaataaggtaaatgacaagatccatgtacacattgctacaaatggaaactataccagctaatctgttttatttagaccttatctgtttagaaatcacagttctctcgttttgcctctcagatgcatgcttaaaccacagcacaagacatgtatatcttcagaaaccaaacatgtaacattggttcaataaattagactaatacgattttgtgaggatctaaaggccaaataaccatataagtgataccacataatcaagaaatacatgagtaaatatctgtaagcataatattacaggatttgcagaatggtcaccaaatgcattcactgaaaaccaatgcttcagcagaaaaataaggtaaatgacaagatccatgtacacattgctacaaatggaaactatataaaacagattagctcgtatagtttccatttcccatataaaacaaatggaaaccaatgcgtgccttatctgtttagaaaccacagtactctcattttgcctctcagatgcatgcttaaaccacagcacgagatgcatgtatctttgaaaaccaaacatctaacaataacagagacagcagaacaagaatatctctacctggttggtgtatttcctcttaagctgggtcgaaaggagagcagcatcaacctgtaaagtaatattgtacagagaagttgagttcaatcacaaagcctacaaatatctcaagaaacacatcatagacatcaaacaaacctgctcgcttttagttcctttcttcacaaattccaactccagcgtcagcatagccagatcaaaattttcaggaggaacaaatctgcaagaacaagacaatattcagaaaccaaaaacgtattcatgccagaaaattaatataaaaacaagctgtataatcacctgctaacagataccatatcaccagtcgaaactctagcgtgtcgcctttgaatagcattgagagcaatatttccatcacggatgcttccatgtccagtaatcaccagttaagttcacaaaaatcgaaataaatgacacaatgaacaagttcaacattgtcaccgaccaaaggagcctagatttctataatccatgaaaaccagaaaaacctaacttgtactacgatcatagatcaatcaatcattataagaaccattcataaggccgagattcaaattcgaagatcgattttggtaaatttagcagtaattagccatatcacataaacaatcaactcctaggatcgcatttcgcattgcaatgtaagaaatgaatcgtaaaatggaaataagaaaggatatcagagagaaagaatgaagctatcggcaacgttggcgaggaagagatcggaaccgggaacggagaattgacggagatcggaagaagagcagtaagcgaggttagtaaaagctagatctgcggacggagtattggtcacagtcatcgtcatgacttgcgatccgtaacgacccgccatggctggggtttcgatctcaggtttcttcgagtctttttgatttttgtaaccttaacgaataagaaaatatttgagggagaagcaataaacagaagactacgattgcttccttgattttaataagatcttttatttttcgagtcctgatcaatgttttggaaaccagaccaaacattccggttcgaccaatagccgtctgaattaaaccaaaaagcggtaaattaaatctggtcataccctctcggctcggtattagaatccggtttgcaacacaaatcataattcattttttttgttgttcttttcttatttttttttttttttttcagtctaaattttagaatacttgctcactgattattttgagcaagtcatgcatgagacacatcctcacaattcaatttgagttcggattaaccacatttatttatttttcaacaaatagttcaaaacttcaatcgatgatcaattatgtgaaactagaaggtcaacacataaaagctcaaaagatcttggactgtcacagagcaatgatagatgatggatgctaatgaatggaataaacacaatgagaaggaagatgaggcaaaacaaccttcacatagggagatttttaaattgaacaactagctcaagtaaacttataagtaatgttgtaaacatggaatgaataagtttgaaatttggtgcattcttagatatgagaaggtggttaaaagggtatggtgcaaagacatatccatccctagtatttaatagattgaaagaaggaatttttttttggttctagtttaatgagtgaaaatgaaaaaataaataaaaaggcaaatgaagatgaagatgaactcaaacttttgactctctaatgtaatcttataagcaaataaccaacttttctactgaaagttataagaaaatgaggcaaaagttttatttatattagggaatttaatgaaaaaaaccctcaactttggccagatccatttttaaaccctaaactatgtttttagtaaaacaaaccctgaactaaaacctgttaataaacttaaccccacagtaattaaacaacgtttagggttaagtttattaacaggttttagttcagggtttgttttactaaaaacatagtttagggtttaaaaatggatctggccaaagttgaggttttttttcattaaattccctttatattaattgaagccgcaagcatgagcttgacccgtttgtgctcatggatggctctgcttgtatctagttagaagccgaaacaactagttttcagtacgctatgcatgtaactcaaagaatttggtgtaagcaataagtgattctcattcttggtcgtgctacattgagggagatacaacaaccatgggaaacacttatgcctaagcctaacttttgatttgggaggaggcaaatgaactaatgcctaagcctaatattttgcacaactctactcgcgtggcacctcttatcatcttcaaattggtggatcgtgagcttcgcaacctaatcacttctcgacgacatcgcaagcgttggcagcggctaatgcttttatggattcgttaaacacacctaaatcttttctaattctattgtagccttgtttttattttttttgccttggttacttttctataggttgtacgttcttgtattttctgaactctcattgtaatgatattaacaaatttagcaaaaaaaaaaaaaaactaatgtcaaacaaggatcctcaaatgccaaatgtcaaattaagttagtacctttccatgtttacaaatttgaatttgaagatggtaaattagaagaaaaaatgaaattatgatcattttccttaatcaaaagattcaaaactatcatttaaaatttacttcttcattttttgctcttaaaagaaaaagtaaaaaattacaaaaagaggggaaaaaaatttagagagaaagtgaccagacacgacggcgtttttgcatcactttcaccgagattttttttctgcatcccggcgacgagactgtgactccaccaaaccctaaaatcaaaattgcattttttgttcgattttgattttgtggggattttggaattttccccgcactaagtcgtctcgttaaccccacttaacagtttctcactttgacactttctctctctctcaacgcacagtgctttctgtcgccttcaatcgcgactttttgtcacacttgccctcttttctccgatttttctataaatttagggttttgtttgctttcgttgacatgaatcagcaaaacccagaagaagaagtttctttggttaataatagcggtggtggaggaatcatcgaagctccagctatagtggaggagaaagaggaagaaggattacagcagaagcaggaagagactattgagtctaccgatccgattctcgtcgtcgttgaggagaaattgttagagaaatcagtagacggagagaaagaagacgataatagtagtagtagtaacatggagattgatcctgtgagtccggctacagttttctgtgttaagcttaagcagcccaattccaatttgcttcataagatgagtgttcctgaattgtgccgtaacttcaggtttgactctctctcccatcggaaaatctttaaatttcatcaattcctgtaaagttttctccttttctttgtgttagtgctgttgcgtggtgtggcaaattgaatgctattgcttgtgcttccgagacctgtgccaggattccaaggtatggtttttgttacttttctatgtcttgaatgtatgggcagtgatgaatttctcaattttcatctttctctgttctcatctcttgcagctccaaggcaaatacacctttttggataccaatacatatcttgatacctgagcgccctactgagtgtgcggtgtttaatgttgtggcaggtattttgatatcagttaattatttatgaactcggttgatctagtgggtgataaacgattatgatgcaattttttatatgtagactctcctcgtgattctgtccaatttatcgaatggtctcccacttcttgtcctcgtgcgttactcattgctaattttcatggacgtataactatctggacgcagcctactcaggtttgtgctcctgatcactgggatttacctttatatttcttctttgtcttctgtgtcaagatgttttatgacaccctcagatgattttttttttgtggattggttttgcagggttcggctaatttagtgcacgacgctacctcctggcagtgtgagcatgaatggcgtcaggacattgctgttgttacaaagtggctgacaggggcttccccagtatgtaatcttatgttttgcttatttgccattctatcaaatgcacagcatatttgtcccttaatgagttcgttaaattagtaatggagggcttgcatgtgagagtgggcactgggattactaaatcgtgagtaattgaactggaaatgtctctacgttttggaggaaatgagatggagaaaacacaacgtcctggaaatcccaactctctgtttgcaaaattactagactcctaaaagatcttccaatttgcgtttcttagatgcatttctttaatgatcggcatgaacacataaggaaatgagtaacagatagataataatgccattgcaaagaacatgttctgaaggacttaatatcatgttgtttctggccacctagtttgctgctctagttttatcctaggaaatttatcctctatgttttctttttattgataatcagtataggtggttgtcctccaagccaagttctggtacaaatgcaaagtcaactttcgaggagaaatttctctcgcagagctctgaaagctcaggttttcttctgcgtgcctcttgtgactcattttttgatgatatattcagaattatgcacttaattttaattatgtcagttcctttgacatccaaatatatgtgacaagatcaatacaacatgttctgacgttagtgcattttcctccactttatgtgacggttctgattctctaccatttgttgcagctcggtggcccaactttctctgtgtatgctctgttttctcatccggctctgttcaaattcattggtcccagtggccttctaaccagggaagcactgcaccaaagtggtttagtacaaagaaaggtcttttaggtgcagggccaagtggaattatggctgctgatgctattataacagacagtggtgccatgcatgtagcaggagttccaattgtaaacccttcaacaattgtagtatgggaggtgacccctggccctggaaatggactccaggcgactccaaaaatctctacaggcagtcgtgtgccaccatcccttagttcttcttcttggacaggttttgctcctttagctgcgtacttgtttagctggcaagaatacttaatatccgagataaagcaagggaagaagccctcagatcaagattccagtgatgctatatcgctaagttgctcaccggtttccaatttttctgcttatgtaagtccagaggctgcagctcagtctgcagcaaccacaacatggggatctggtgttaccgctgttgcttttgatccaactcgtggtggttcagtgatagcagttgttatagttgaaggtactgttctcatccttctcggaacctcatactgtttccatgattgaataaacattttcaggtttacgtttagtttttggtcaatcatttagaaatgctcatatattgaagagctgccagatgagaaaatgctaattttgtttgagtgatgaagcgcaacagcttcaatctattgtttaaaataaatgctaattgtttgtgtctgcagggcagtacatgtctccgtatgatccagatgaaggtccttcaatcacaggctggagagtacagcgctgggaatcaagtgttcaacctgttgtactgcatcagatatttggaaacccaacttcaaattttggaggacaggtccccacgcaaactgtctgggtatccagagtggatatgagcataccacctactaaagattttaagaatcatcaagtagctgcagcaggaccaagtgtggatgcaccaaaggagcctgattctggtgatgagaaggctaacaaggttgtatttgatccttttgatttgccaagtgatattcggacacttgcacggattgtctattctgctcatggtggtgaaattgcgattgcttttcttcgtggtggagttcatatcttttctggtccaactttttcacctgttgaaaactatcaaataaatgttggatctgcaattgctgcacccgcattttcaccaacaagctgttgttcggcttctgtatggcatgatgctgctaaggactgcgcaatgttgaaaatcatccgtgttcttcctcctgctcttccgcgtaaccaatcaaaggttgatcaatcaacatgggagcgggcgatcgctgagaggtatgtaatctctggtatatattttctagcttgtctgcttgcaaaggaacttatattgtgacttgagatatgaatctgcattctttcttaacagattctggtggagtcttttggtcggagttgattggtgggatgcagttggctgcacacagagtgctgcagaggatgggataggtatactttagtgctaagtttcttgatttaagtgttatttaatatctgcagttggatttttttgggtctttagttgtggaacaaccactggaattagttttgcttagaaatatgacagtttgtattttagtttgggaataagttctagtttttaaaggctgagtgtcattcaaagaaccttttctctgtttttctattttgcttttatactaaggtttgaatgatagaaactttgaatgatagtggttcaaatattatattgtattgtttgaataatatactgcttaaagcattggatgatgtatttctttttatgattacagtttcattgaacagcgtgattgctgtcatggatgctgattttcactcccttccttcaacacagcacagacaacaatatggccctgtatgtttttactcaacccgaatccaactcattatctttttcctttttaaatgtctgaactgtttgcgttgcggtaccgtttattatgtctttgcaaaatatttatatatatatatatatttttttttctggttttataatgtaaagcttctctattccatgagcatgcagaacctattttgtgttgttcttttatcggactataagatagtgtagctttctctaatttaaaaaaagaaagaaaaaaggaacaaacttcatctgactttagattatttgagtagccaatatacaatgcatctgattgactgattctaagacgctgaacaaaatcttggcagtctattgcccccttgagattcttcgtgttttttttgcttttttcctttttggttggttgcgctttttggtaaagaacttgtatttttatggtttacagaacctagataggatcaaatgtcggttacttgaaggaaccaatgctcaagaggttcgtgccatggttttagatatgcaagcaaggttgttgttggacatgcttggaaaaggtattgaatcagctcttgtgaatccttcggcgttggtttttgagccatggcgagtagatggggagacaataacaggcatcaatccggaggcaatggctgttgatcctgctcttgtttccagtattcaggtatcttgatgccttcaaatctgaggataaagttgtaggttttctttgatgaaagatgaaaattcaggctcaaaccctgggaacggttcatgcagtgttttcatttaaagagtagttgctctttgctgatatatcttagtttttacttttaataatcagccaacacatgctgtattagatttggttatttagcacagcttaagacattttagatcatattgtgacattgcatattctatcatggatctcatatcattgtatatgaaacagaccatatcactatccttttacaagtttggtttcctgttgcagatttttctgtactctaattccttttccgcttcatttacaggcttatgtggatgctgttcttgatcttgcttctcatttcatcacacgtttaaggcgttatgcgagtttttgtcggactcttgcaagccatgctgcttctgctggaactggcagtaatcgcaacaatgttaccagtcccacacaaaatgcatcatctcctgcaacacctcagggtcagtatactattgattttgtcatacctaatttactccagcatgacaacaagggctttgaatggtacatagcgacaaaaaatttcattcccttgtcattcggtgatgatacgaagcacttgtttggtcctagatttattgaatatgagatgagtttcttaagtctagatattcttcatctctgtgaactatagcgtattgtccagctcttttttccacgtagattatgggagatacaactggttatatttgttgttgggcttggcatctctcttgtaggggtgcaattgggggatatttcaactcttttatgtacagtttttcctgacaagtcactgtatcttgcagtaggtcaacctactactactactactactactgctacgacaaactccagcggaagctcacatgtgcaagcttggatgcagggggccatagcgaaaattagtagctcgaatgatggatccaactctactgcaagcccaatcagtggttcacctaccttcatgccaataagcatcaatacaggaacatttccaggaacacctgctgttcggctcattggggattgtcatttccttcatcggttatgccagctgttgctcttctgttttctccagcggtcttcacgatttccacagcgaaatgctgatgttagttcacaaaaacttcaaacgggggctaccagcaaattggaagaagtcaactctgctaaaccaacccctgccttgaacaggatagaggacgcccagggattccggggtgcccagttgggtactggagtgaaagggattgatgaaaattctgctcgtacaacaaagatgggttctgggaatgccggtcaaggatatacttatgaggaggttggcacctatattcctgtgtcctctttattttgatacaattatctgtggaacccttttgttgttacctcaagaatagaggcttaggcttaatctggtcaatatgggtaagaataatgggaacccttggtaggttggggaaaaatatgatagactttgtagattttgaaacgaagaaagcaatgccatctttgatggtacaataatctagaaaatttcttataatgactggatactttctgatcttccaggtgagagttcttttccatatactaatggatctctgcaagcgaacatctggtcttgcgcatcccttacctggctctcaggtaggtagtggaaacattcaagttcgactgcattatattgatggaaattacactgtgttacccgaggtggtagaagcggctcttggaccacatatgcaggtaatctgtgtttatagtaaagtagtgaaactattttttcaattgttcttgttagtgatatttggtcaagtacattatgaaataatatcttgtgatctatattctcataagataatttgttgtaaaaactgaattaacagaacatgcctcgcccaagaggagctgatgctgctggtcttctacttcgggagttagagcttcatccgccttccgaagaatggcatagaagaaatttatttggtggtcccgggtcagagcctgaggatatgatcttgacagacgatgtttccaagctgagtaattccttagatctgcctgatacaaacttttccggaatatgtgatggatacaacagagtccatagtctttggccaagaaaacgcaggatgtctgaaagagatgcagcttttggttcaaatacttctgtgggtttgggtgcatatcttgggatcatgggttctcgtagggatgttgtgaccgcgacatggaaaactggtcttgaaggagtttggtacaaggttggttacgctcatacatttcccttaacatttctttattgttgtaatgtgataaagaagtaaaaagttcttctgtcacaccttagtaacatgattgactttcttattgcagtgcataagatgcctaaggcagacatctgcatttgcttcaccaggtgccactaagcagccaaatccgaatgaacgagaaacctggtggacaagtcgttgggtttattgctgccccatgtgtggtggaacgtgggtccgtgttgtataggcgaacaaatgaacttcccatctactatattggtattggatcgaatagccagaaaatcagtgattttgaggagcaaagagtgcaaaccaaacacacttctgcaagtttattctgttacttctaatccttattcccggactggtgtgatctaacccctgtccaatatggaaatcttgaatggaactgggagggagacagtgtctgcaaagattcaagacacggtgtagtgaaacaggtcttggtgtatagcgatttattagacttatggtctatagagtttacttcttgtggaatgtaaaactctttcaggctgcaacatcattttttaaatttctttaaagggctgtaacctttaacttaagtggtgtagtaaagactctagaagtcatggtggtgatgatgtaagggcccattggtaaagaccgttatggactttgaccgtagaaattttggttgtagagaatttgactataaagattttaagtttaaaaactttggccatgattggtaactaaaaagtaaaaactttagaaactgttactattatttttaatatatatattttttagaattataaattatgcaaaattagtttttatggcagtatagtaacaaaataaattttattataaattttagaaaaatacaacataaaattaaatagatagatactctcaaatctcaataaataaaaaataaatttaatacatataaagatttgataggtttttggatggatgaactatcacttttttcatcaaaataagattatattaatgaatttaaattgtcaagataccattgttcactgagtcatattgtgatgccttattacaactttttgtaaaccataattgggtattcaaaaatatcaaagaacggaaataaaaaaataattattaattaattaaaatatttttgagataaattactcattgattgagaaatagtttttcaatcattgtggaggaaatgaaaagaaaaaaaacaaattttattttattgttttttcttaaaatctaaaaaatctcatttttgtgactttaaaaatttgaacgtgaattgaataaaaaagagcagctatacttttaaaaataaataaaatctttaaaatatgattgataaaattttggcttttaatactttaaattaaaactaaagtttttaaagtgtcttccaatcaaccccgtattatagagtgcggcggcttgcggcgacttgcggcggcttgcggcggaagttgctatgcggctcggtgggtttcgtcgcgcgacttggtggttaacggcggatctgttcggatctgctatggctaatcgtgactcaaggctaattagggttgtcggagccaccgtccctgttagtctcgcgatttggtttccactagtccggatcgatcttgactggtctcgggaagggtgcgttgttcatcggacgacggaagggggttacatcttgcattcatcgatttgctaggtaggggaatcggtggagggccgcggttagtcggagttttgacttattccgggaggtttgttgcaggtatggctcgtcattggaagcggatcggcgacgggaactgagtactcctgtcaaaggttgtttccggcgatgtagctgcaacgcagtggaccttgtactcaccggatctagtaggtgggagattttgctttccggtcggtcactcatttcagatctcggccatcaccggtgtttccgattcacttttccgttttgtatccatgaatctttgtatgttcgtgggccgaaacccatttgggaaattaatgaagaaaaaaaaaaaaaaaaaaaccgtattgtagatttttttttttcctcataagtgttgctctttatttatatcttaagtcgtaagaaatacaacagtgtaaccttccacttacaggccctgcacacattaaactgtaaccaacaaattcaacttaaaggcctaatattatgaaagctcaatctagaaactaaaccttttgaggaagtaaacattaaaacttccaacacagagccacatgtgatgctatgaactaaagtttaacacgttgagagatgaagtttatgttgtcgccgttcatcgtatggtaagcaacaaacggaaactccaaaaccaccggaaaccattagaacttcaaacacagaagtctatcggtttttaattggagaagctcactaaacttcaacatcaaaactgcaaagaaaatatcttcccaaagcaattgattccaaatctccgaagaacatcggtgaaacatttaaatcgatggagctttcagcaacacctataaacgaagagaaacaaactcgattccatagatcggttaaagaaatagccacaattgcataaattcaatccaaagtcacaaaaaaaaaaccttaacccctaactccaatttgttcttaaaaattgaaattgataaacttggaacacaaatcgagctctttaaacgcctgggattcaaggaattacgattccagtactcaaatagaattgcaaaagagtctaatcagaccgaaaataaggaaatcgagacaaagaaagcataattttgaaccaaaaacaatctggccaaaagctaaaagaaacaccagagctatatggtgaatttctagaacttagctagcccaccgctactgtagaagccaacggaagccagacacaagccaaccaccaccgtaaaagagaaacaagatggtgtcagaagagagccgatcaaacgttgtcgaaaagacaaacgttaacggacaagagccagacatctatgctgagaaagccataggattctgttcagaagccatcgtgaacgatcaacagatgctgaagtagcaatcgttatcagattaagaagcttcgatcgtttcctctctctaaaggatagagatgagagaagagagaggaaaagcaacaaaacaaaaaaaaaaaaatcacagtatttgtcttgtattatagagttcataaatcatgatggtgttaatttttatgcaagattgtgtttgtcatgaaaagtggactgttgactcgtgatgctgctaagctaatagaaaggtcaattttatactgccaataacggtactactttatttaactttcctctcatttttgtcaactactaattatagttacagctatttcataatttccttaactgaatcaaatcaattaaaaataggtataagaagtttatatgtacttgttatttacgtcgtgcatggagcatacatcgacatgttcatagccaacacaaaaataattattatcaaggttattgactttctcactagctcacttattattttacccgataacacgttatttaacatgatctcacgtcatatgtaacaattacgtgtgaaaaacaatttacttatttatgattttgtcaccacatgttacatgtatatcatcacgtcatatacacatttagcagattcatcattacatattataaaaagcaaagatttaattcaagcagataataattataagctagagtctaaagaaacaaacttcaaagccaagctgtgaataagtttttggttcttaattcttccattcatagaaaattatataaatctaaatgaaaagtggaagcttccttgctcattggttgaccaagggttcattattaatacttctacaccaagaggtctggggttcgagttttagatactgcgatttattaacaaatttacagattaatggaggcaagtgtgcatgagatctctaacaatgtacgattatagccgtttgaaaggattatacgcacagaagatcagtgaagctctccatcaaaagcatggagaaggaaaatgaggcgtcgtctgtcgtggatctaataagggtcaaaaggaattttccatggtataatcgtttatgtaacagttcttataatttgtaacaaataataaatctaatacagaaaaaaaaaaaaaaaaaaaacccaataaaaataaaagaaaaattgaaaaatgactaaatatagttagttaagaaaatcccgcatattattggtttatatcctcgcacacacatgcatgtgcacgtgcaacgtcttctcttctcttctcttccaccattgaaaacctatgcaccatctcctaaattgcaccactttaaattatcttcgaaaccaaaatctctctctcgtttgactttccctctctcccgtcgtttcaccggaaaaaaacaacagaaaaaaaaccgacgggagagaagaacaaacaataatggggaaaggaggacgtgagaagatatcatcaaacgaagaagaaagagaaggagtcatggctacagatttcttttggtcttacaccgatgagcctcatgcttcgaggagacgtcagattctgtcttgttaccctcagattagacaactctttggtcctgatccatgggctttcctcaaggttcttattctctaccatttttctcggatcttagatcgatatttccatttttctaggacgtctagttttgttctttgtcctctttttaaaaatgtgtttgatacataaacgaaggttgtcgaagaaacaaacgaatctgttattttcttacgtttagaaatttcggatttgtttttgatcctacaacattttgagtttgtgtaatatctcaagaaaaaagcatttgagtttgtgattcgtatgtgatcttgctaactccattaaccaattattagggtttgtgtttttttgaggtccgcaaatttgagttttaggagctgaaaaataaaactcatgttttagggtttctcacattttggagatgattccaagcaactgaattttatttcagttcgagttaggaattttttttattttttaataatttgtttagtagaatttttgtatttttgttttcaattatatttttttatcatatattttagttacaaatattatgtttcaaaagattctgcttatttggcataaaagtttctctatcgttagggctattagctaaaatttggttagattttgggttgatgaatgtcacatttcacccaaaatctttcaaaatattaaaatttgttttgatgttatctaaacccaaatgaataaccaattttgtatttgttgtctatacagatcacattagtagtaattcttcaactctcaacagctgcaatccttcacaactctggatggctcaagattctatccattgcttacttctttggatcattcctcaaccacaatctcttcttagcaatccatgagctaagtcacaaccttgccttttcaactcctgtctacaatcgttgtctcggtattttcgcaaatctcccaatcggtgtaccaatgtcagtaactttccaaaaataccatctcgagcatcatcggttccaaggagtagatggtattgacatggatgttcctacttacaccgaagctcatttagtaaccaatatctttgccaaaacaatttgggttttcttacaactcttcttttacgctcttcgtcctatcttcatcaaaccaaaaccacctggctactgggagttcatcaacttcttgattcagattgttttagatgtatcagttgttctcttcttcggatggagatctttcgcgtatctaatcttatcgacatttgttggaggcggtatgcatccaatggcgggacattttatctcggaacattatgtttttaacccgaatcaagagacttattcgtattacggtccattgaatctactaacatggagtgttggttaccataacgagcatcacgatttcccgaggataccgggaaataagctgcatttggtgaaggagattgcaggagagtattatgaaggattggagtcgtataagtcatggtcacaagtgatttatatgtatattatggatacaacagttggtccttatagcagaatgaagaggaagctctcaaagtctgactaatttttctttgtttcttacatcaaactcttcttttattctattttagtatttttgttttgagggttgattttttcaactttattggaggacaaatctgtgatcttaggttgcagattttatgatttctcacggaatttaaaccctatcatccaattcaggataacgttgacatgttccatttgatacatgttaatgctaaaagacagggcaatatattaagcttcttcaaaattgctatttttgtgaaaaaacagagcaacatcaaaaacagagcaataagttagtaagcttcttcaaaactgtgaattgctaaggaaggtaactatgcatcttgtgctctggaaaagcttctccattttctgccacaccaaactctgagtttctaaaagcttcttcgccttctcttgtaaactcgggtggcaccttatggtctcaccgtggatctgtcaacagataaaccgagttttgttaagagtcaagattcttgtaacctaaaggtgtctctgtaagaaactgattccttggttatactggaaatgaaatttacatttaccttcagaaatagtttcacaaccgcctgcataaactcaaagtcgtttttgcaagagacctcgttgatgaagtaatccagaagttgcccaatcaatataaactcaggtcttttgataagctcttcttcaacatcttcatctatgatttcaagcatccgaagctccatgtcgagagctgacggggataaactcttcatgtagttggtaaaatctaaaactgcaaaacatacatggagctaagaatcgtattgtacattgacgagaaaagctttgattaacctgtaaaacttaaacaaataccatcacttacagtgttttgaatcccatgaagacttgagatgttttgagaatggagattccaatgcatcaaagttcttcatgctattctggtcctttttattattttcctcattctccccatcagcctcagagtcatttgccttgaataatatatctccagacagcgagggaattgagggcaagaaaaaaggagccttttcaggtttctttggaggctctattggtttattgcgggcctatgaaacaacatcaaatataaattgtaactggaagacgcaacaaagaaacaaaccatcaataaaaagttgagaagaaaaagaatatgcataccttaataatatccaagttgatcaaactctgccattggctttttggcaatagagacagagtaacaagttctgggatctgcttttgggaaattgagaaactgctagcttgtagagcttcagaattttctaacacttgcctgtccatatcatcatcagcttcagaagatgtcaatgcagagactgaaggcaacttgacatttacgacatctttcccactagcataagattcaacacttggaagcccagagaacatggattggttaaccctgagaggtcacaagaggagagagtgaactcatcaaacaatcacagagaaattgtaatagtaaatgagagaactgaagattgatttgagaatttaccacaagtagaccccgttctgatcagagtgggcagttgccaaaacgtccatatttggtgataaagacaatgctgttattggcacatcgacatgcacaccatcaatctgcttagccaatatgacatcccatattctaagacttccatccatgctagatgagatgacccatttgccatcctcactaaagcacaaatccgttatacggtctgtatgacctctaaattcacgaaccatctttagtgtcacaacatcatataaacggataacaaaatcatccgccactgtagccaaaagacctaccaattgataagaaattagcaaagtcagagtcaatacggtggtaccctaggagaaaatgacggaaaatgatacatttgtgagatcgtacaagtgaaaatgtagggttagattaggaaaatttaccatttacacggtggtagacaattttaaccaacgaacatccgacatcccactgggactttaattcccgctttttgaaatcccaaacctgtattacacaaatgaaatattagagtctatttgactcataaactagagttaatgttgaaggtaaccatatcaactaagtaattaataacttaaagaaagaacaagaaaacattccaaacctttaagtccccatgatatcctgcactaatcatgagtgtgtttgtggagtcgcaagcaactccaataacttctccatcatgggcgtaccttcttttctctgacatatcgaagtaactaccccggctgattccagattggaggttgaatctctcaatccatccaccagctgttccgactactgcaaagtttccacaggcactgattgcacatgcctatcagacaagcaattttttaagagatcaacaaccactagagagaagaaaaagaccagtattgctaaaagaagatggttcctagatacaaagaccccctgaacatgctataaggaactgtaactaaactcattttttgtagaattggttattcaaggggggtcaataatccaaattccaagttctcacagtaatcaattcccacctataaggactaaagcacgtctacttttcttgttcagaagagtgtcagaagtaaatataatttcaattttgaaccttaattggtgttggattctcagggcatggtttgaggatatgctctccaagtacaaagttctgaagtctccatacatatgcttctgctgtatccatatggcaagtaacaacattgcaccaatcacgctccctaatttcagcttcaatttttggaaaaaaaataataacagtcagtaggatgtataactagacaataatataagttgtgggagatgcagttttctcgtcatcaacatgcaaattcataggacaacataaagtaagatgtaagcttcacttcacaaaatgtaatttctctatggggttcaaccaataaacgttttcactattgagagccaaccattttggacctaattactgctcaacacattttgtagaaatcaattggtttctactttttagtcttgtttgttcagacatcataatattaagaatgtgactgaaagaaaccaagcaacataattacatgaaaagtaaagatcaagttatatagatacgtaccgcaatcaaatgaaacaacaggcttcaatttcaactcttcctcctacatatagaggaaaaagaatataagcgaaaaagatataatttccaagcacacatattactacggacacataaaatatcaaaacacagtatacataaggtataacatttgttaaattgaatcagaaccacttgaagcatgctaactggccatggaaaacttgaataaaattaaaagaaatcctttggctataccttcagtcggagttttttggctcgcctagaaatgtgtctttgagaaagctctctactttgttgctcctgatgaagtaattaatgtaaattaaaaactgttatcgtcaatggacatcagatctttagtaacaatacagaccacaaattaagaaacaataactcaacatttaagagaacaatcagattcatgaaaaaatcaaacaaacaggtcggtgaaaaaatacccatcaaaataacagtaagatatggcgaatgaaagacggaataagaaaaactaaactttgcgtctaaacagtacatgatgaggaaaatgattgctaattaattaattaatatgacaaaaatgaactcaacaatcttttatgattatctgttcaatgcccaaggaagactaatttcctaacatttgtgattgtaaagtgacaaatgaatagtcaatgtctacaatatagctcaaaagttacagactatcaatatgctagttagttgtattaaatctcgatatagaattggttactaaatctgtatcgtatcttacctggatgacagagaacaggcggaaggcacgatcctggccagcagacaaaatgtgccgtccattagagtagaacctaccacaagtagaagtcagatatgattaagagaccctttattggcatgccctcgatatagccaccatgaagtaaatactcttattaagaaacacaaatattcatcactacacagatagtcaactggcagggatcataaatggaattactttaacaacgaatagggatcataaatgctacttacacaccaaaatgtataaagtctcacaataacgaaagaaaagctaaatggaagcaatcagataattcagtatgatgtggacgtcaagctaattacctgatacatagaggaggagcactatgcccagatcggaagcgtaataggcgaggatcaccatcatttgtgtcaaaaatccacatctacaggaacgaggcataaaacaaatattatatgtggcaaagtggatgcaaataggttcaacgggtaagaggaatcttagcttactttaagtgagttatctgctgatgcactcattagcaccggctcattggctaaaaagttcaatgagattatagaactgtcatgtgcatccctaatgactgactgaagcctttttttgttaagattccagatgcttatgacaccaaaggaacctccagacgcaagaaggggacgtccatctaacatgacaggataaacaacacatgttagaactggaaagtatcgaacttccattagctatagaacggttactaccaaaagttactagtaaaattacaacctacactaatggatctcttgagcctgaaacatgtatggacaattctaattcatgaaacaatgggtgcatagatggtaaagctatgtaatggaaaaataaatatttagctccacttaaagacaaatggacgaaattatttttggtcactacactcataggatatctatcagcaagaaaagattgataaactattatccgctacgaaattagatttaaaaggtaataaaaccaagaagcgctcaaagattttacaaatagaactacagggcttaggtgtttacctgtactgaaagacaaagcagtaacagcacctcgcgaggcatgttcaaatgttacgatctcttcgtccaattttatgttatgtacatggatctttccatcagcacaaccaattgcaacaacatccagggcaggggatgaaacacaactggtgacagatgaaccccaacccttaaactgatagagcatcttcttagtattaatattccatagctgcagcggaccctcttggctccctacaagaacctaccaatgtggttccaagtaagagaaacatgcaaagagttagaaaggcttgtcaacagaagacaccaggggaaaaaaaactgaaatcctgaaccaagtatgactcaccttgttgagataggtatctgggtgaacaatagaggtaggggtaaactttccagtaagctgaagatttccaattggagctagatgttcttcgattcctttgaatgcccatatgaacatatttccttccacgtcaagactaagcacatgttctccaaacaccagtagaagatcaactttagcaacatgtttgctccaagttgctacctatagatatacccacaagaattccaactataaacaaagtactcatagatataaaaaaagcagcaacttaactatagttacaatgagatatacctgatgagcacgcctaaagacagcgatttcattgccaaacgcaacaaatgtgtagtctcggtaagaagctaaagctctaattttctttggaagctgaggacctttaagataacacaaattagattataagaaaatttacactgcatagacaaaacccaattctaaatgcatgaatttgagtaagagaatgattgaaaggacaaaactttaggtttcagaagaaggaaaaacttactgattatgactagattgagcttggcacactgcaacaagagaaccaaattaacaacagaatcgaatgaataaagaacacgcaagtgaaactatgaagattgggagcgttacattataaatctggaaagctttgccgacgctgacggtgacgaaagtctcggtacccaatcgctggacggagaacggaaccgtactcgttatgtaacctattgctctaaacggttcgaaaattcccatctttcgagttcgaacaagaaattagggtttcctcggaaaaacgattttaggattatcaaatcaaagaaaggttttttaagagcttgagagagaaaacgcggcgcaggagcgatggaggagatacagcaaacaagacctttggggtttagggtttaacgaaatttctttgtccgaattttaattttattttccggtttaagtgtccgctcggtttatacaggttctttatttggtttggagaatgttaaatttggtttggtaaaattatggttcggttttggctaaaagtcattgaaatgtaaaaccaaaaccattttagtttaatatttaactaattgtcaatatcagtatcaattttaaaattatgatgacttttggtttaaatcttgtttaaatgtacaaagtctcggttaatgctcgattgcagtttggtctaaactctaaacaaatgatttccattcggtttgattctaagaaatttgagtttaatcacacaaaatcccagccgtcggatcttaagaaactctgtaacatagaaagattggtgttaatcctagccgtcggatcaagctttctttgtttaaaccactctttgttttgttactcagtctaaaagcaaatgtggtcaagataaccataaataaagattatgttgatacaaagagagaaaaatagttatgaatctaatagactcagcaatagaaataacaagacaaagcttgagaagcaacaatatcaatgtttgtaacacctaaaacatattattaccataactgaaatgttctctctcaccaaggcaaaccagcagacagagacttgtatatattacttactcggatagagttgctttgagatcaccactctcacttagctccataatgatatcacatcctccaattaactcacctttgtagtatagctgaggaaaagttggccagtttgagaaattcttaatcccttgccttacttcttcatcagtcaagatatcaaacgatccgaaactcacgttttctcctctcaatgctttcacaactttggagctaaatccgcatttcggttcatctggtgaacctttcatgaatagcattacttccgaggaattgatcagtgccttcaatctatcttcaagactctgttctccagtgatccctttctcggtcaagacctttttcagctcaccgctcttttgcatctccaagacaatgtctgatccacccataagctcgcctttcacgtaaagctgaggatagcttgaccagtttgaatacactttaaggccttggcgaacttcgtcatctaagaggatatcgaaactcccaaactcgattttttcttggttgaggatttcaaccactttcccactgaacccacactttggttcttctggtcttcctttcatgaacagcataactggtttggaattgaccagaccttcgagccgagctcggagggtctcacttaagcctgtgtttcctgaactaacccctcctccttttccagcttcatcctgactttcttttgaaccaactgtcgtgatcccaagatctttgaaagcatcttttagttcaccgctctcgtgcatcgctattgcgatatcagctccaccaagaagctctccgttgcagtacagctgaggaaacgttggccagttagagaatttcttcaaaccctctcgcacttcgttatccgatagtatgtcaaaacttccaaaatcaacgttaacctctttcaaaatgtcaactactttcctgctaaacccacacctaggctcttcaggaatacctttcatgaataacatgacagggtgagaattagtgagcttttccaaacggctcttgagagcatcggcggtagatacaggctgagctcggtcttgtaaagaagctttcgcattctccttcacagtttcaagaatcgttggcccagcagccaaccctaagcttgcaggagcagcaggctccgcagaagtactagaaccagcaactttgccaaccttattagctaaacttgatggatctgcaccctcaagtgtatccacagttttaccatccttcaataagaaaacgaattcacagtcagaagaaagtaacaactttcagaacaatcattacagtgcagtgacaaagattcaagctttgaacacactctcaatcctataaagacagaaaattgcaaccaaccaattaaaacaaagaatcaataagtctggagctaaatggataggcgaaccatcttcttctactacctgattagataaacagctttcagtaatctaacagagacgcaaactaatcaaaacaaaaaccctaaatcctaaactttcgatcaaaacatagggacaaagattcaaacttttgaacacactctcaatgctataaagacagaaaattgcaaccaaacaaagcaacataaagaatcaataagtatgacttcatcaatgtcttcttcttctaccaaattagacaaacaactttaagcaaaaacaaaaaccctaaatcctaagttttgatcaaatcatagggaacaaaaaaaacgtaactttaccttgaagaagacgaaataaggcacagcagcaacagagtaagcctcagatatctcaggatgttcctcagcttcaacctaagaagataaaaccaataacagtcaaaaacctcattgaaagtgataaaattttgaattggtcaagagaacagagacgaaccctaaagaagtgagcacgagggaaatcagtagcgagatgagagaaaacttgatccatctgcttcgaagcatcacaccaagaagcccagaagtgaagcacgactggtgcgccgctctggcgcaagttatcaagctccgcctttgaaacgatatccttcaccgtaccgctcatcttcgaagagggagaaggatctcttaacactttttttttgtgttgtgatttaccaatttattatcgagcagaatacactctgttgctggagaaagaaaggagatttatgtaaatataacaaaataaaaggacctaacgatacaattagggtttttgtgtgcccaatgtgatgctaaaattgctcacttatgtaatttctttttataaaaatagtaaaattatatatgtcagcggaaggaaaaaaaaattggaaattaagtaaggtaaaaatgttaaaattctaggtgataacaatctttaaaaataaaataattttgaaaaatattagatacatttaaattaaaactactaaaagtaagtttgactaataaaatcttaatcctatttttttctttctaaaattaatactaattagaggaattgtatatatcaatcctcatcgaattggattctcataaaacagtctaagaattaggttacaattctttttttctcctttgttttgtatgtgtggaattgtttaattctgttatattaaaaatccacaattattttagcatttgtatttttagttattttattatactatctttttttttaaatgatataatatataagcttacatcatttagataattgatgcatctattaatttttgtgtaacatcactatttaaaatgatacaaaatttacatcaatggaaactgatactagttaacgactaatcatcgactataaaatgtgatgtaaatgtttacttaatttgtcaaaatcctacatttctcccacaaaaaaagaggtttcatagttttcttacatatagtgaccttggttttttggtggtgtaaaaaaatataaaacttagtatgcaaagtttgccttcatattaattaatgaaattacataatactttttaaaaacaattaattgaaagtcattttatttaattaacatcgattatcctactatattatttgggaagtacattttaaatgtaacctttatttttgtaattaattacatgataatgccattagaaaaatttaatcaaaaacaaaactctttaatgacgtcattaaggttaccaaaactttgataaatataacgtggtcttacctagatattcctctgggtattcttgtgattcaattatgttcacgtctgatcggcgaagacgtttaataaggggtttgttctcggtgagaaaccttttccgaacataagcatctacagatcggatgtagaacccacgttgagccatagtttgtttcatattgtcaagaaccgttttcaagctcaatttcttagggatgtgaacatattctacatcccacaattccttaagaaaaaagaaaaaaaagtatactgatccgaaaacaattaacaaaaagcgaacaatatactactacattaccttcataggctgcaatccacctctattagtgaccacgttggtgcttagatcttgcattggaggaaatccttttggatgaggagtttttgattttgataaaaactcatctctaccacgttcaacttctttctcttcctgtttcttcacactgcgtcttccctttcctccaggttttcctcttcctccaaccattgttgacagaatcggcgcaaaatgagggttcagacgaaatgatggaggtttgtacgtattctacaccctcggtgatttattatataaatatcaatttaagagaataacctactcaaatcactaactaatccatgattattatatactcatactttgagtttggattacaaaaaaaatattcgagtatgaaaaaactattaaaatggttttattgaaaaatcatgtaatattaaaataaatttagtaatagtacattaaatatgtaaaataaaataatataaaaataaataataaatgtatcattaacctataaattagaagttgaagagcttacattaattatttaatagacacatgacaaatatatatgattttgaccaactttcatatatatgattttgataaactgatgcaaatacttagaacacttacaaaaagtgatttaaaaagataacatctttttttttagttgactcaaattaacattagttacaacaagcaatgcaaatattatgtatacttttaaattatttgcatcaacaatatatacatcatttacttaagcgatataaattatttgcatcaacaatatatacatgagtccactaaccttaaagccaacaacaagatttagagagtcttaaacttacaattggcaaaaaagactcactcattacatcaaccatcttgcaacatgagagcaactcttaatcgcatatttacatttgtttaaatggtgcagatcaagatcttttaaatccctttttaagttaagtagttgcaagttgcagagacccgcaagcatcagaagcatgcttgccttctccaaaaaccaagttccctctcacaaatgtcgaaaccactttgcctgataatcttcttcccaaataagctgagatactctattgtacaccacaagaagcaaacataacataaagattacacattcgtgttattcgagcttaaccattagctatctttctagaaaaaactgtgtacttacagggtgtttgaagtgaattggatgatcttcatctacatcaaattcggcttcaggttcccacacaacaagatctgcgtgttttccaaccgtaaccgctccctataattaaaccattacttataagctgcgataaatggaccccgaatcctaataaaaacacgtctatattatgccagtgtgctgtgtatggacaaaaaagagaatactgaagctgcgtttttttttataataacgaaccttagagtgtagtccagcgagtttggaaggcctatcactccaccaagaagttacctgctcgagcgttactccatacttttttccataagaccatgtgataggaagaacaaactgcaattggctcttccatgagtttttttgtgctctcacagtttctacatattacatttttaagactaaacgaacctgtaaagaagatatcccaccccaagctttcaagaagttgccatcactcataagtttgagttcaggctttgtaggtgaatgatcagagctcagcatatcaatgtctccttcctaatcaaatcaaaacctcagaatcaacgagtaaggtatcacaacaaagattgcgtaaaatatatattataccatcaaagcttcccacaatttttctctatttgccgcatcacgtataggaggggagcatttgaaacgagtatcaccttctggaatctcttcggctgagaaagctaggtaatgtggacatgtttcaacagtaacactgtctcctttgccttttgcttcctttactccatccaaagacaaaaaaaatatgtaatgagatacaaccaaattctagtgcttctactgcttgaactcttgaatacctttatcaaatccaaggaagaactggcatcagataaatgtacaatatgaagatgagctccttctgcagaaccaccaattcttgtgttttcagtaaccgataataggtttctgattgctccctcctccctaattgctcaaataaatattcctttcaggtacaatgatgactctgtaggaacttatatatatagagtgaaaagatgcaatatctcaccatgaagtaggcctggtttttaaataagtcagataagaacgaggatcattttcactaccatcttcaatctctaagtctctctcgatctctgcgtgtacaagcaatggtcgtttgtatttagctaatacagatagtccttcctgcataaacaaacagtatcagcgagacaagggccaatgaggtttttgtaataactattgaatcatgagagaaggatcataagactcaagaaacaaaacctttatatgagtgatgtttgtcattggaaaatcgttgattcctgaagggcacataaaggactgaacaaagattgagacaagtcattatagacagaaaagcaagccacagctttataggacacatgatagattgatatctaccttgagaccaagaactccagcatctaagagagactcaagagcacttgagttgagtgcattgtcaggtaccagacctccccagaaccctggagaaaaatggaaacaaagatttagggcacaccatgtgttgtcttgaatcaacagatgtggtaaggtttgatagcaaaaagtgtttaccaacatcaacatgtattctgtttttcgcagcttcaatctgtaaaggcaaaaagctgtaagaatagtgtcgagcttaccaactggaaaactaaagtggatggctttaccttgagtttcaaagtttcaggagatacagttgaagggaaactgtttaagggcatgtcaaccaatgtagttattccccctgccagacaaagacattcttaagaagctgaataaagcacgtaagcgaagagacaaagcagaacacactcatgcaactagaacagtctcagtaagagaaacagatttgattaccagcagcagcagccttagttccagaaggaaaaccttcccattcacttcttccaggatcatcaagatgaacatgccttttaaaaaagttgcaagattttaggcggaaactagacaaaaatctgaatcatacgatggttttaaagatgacatacacatcaatgagaccaggcatgaggacagcttctccataatcaatcactttcactcgactcctttgactcttatgccaatcaacttccttcaccaccgacacaataattcctcccttcacctccactgatcaacaaaataacaaacagtagagcagagcttagcaccggatcttcaaagctactaaagcaacatggttccatggatttccaaagatttgatgttccattagaactcaataataaatcagtgtcaactttagctaataaaccagtggcttggagaacaagtgacctaagttcgaatcatgagtgtgtacaagttgatgaagcaacagatggattctgattctgattcaaaagaaaaaaacgtaccagaaccagagatgagaccattaggtgtgacgatgcgtttacttgagatccagtaatgatcatgaggaagaagactacacttattattcccctgcaacaaccaaaaacaacggaatcagtaaaacagagccgccatattcgccggcgaatcagattacagagaaaacggtttcgagaaatcaaatcaaaaacctgtaaagagcgaggagaagcgaagaagaaggagaaaagagcaacgatgagtgcgagaagaggcaatagtctccattgaagcaaagttctctccatatctctctcttgatctcttctgcgattatttggagagagcttctcttattggctatgaagcggggcctactaaggattaaagattctttaaaagattcggttatagaacaagccaggagtctctaaggaccgttagatcgtgtcaacaatcgtgaagatcgacggttgtggtgagatattaagcacaacttggactgtgccagataagattcctctccttcatggtttacttgtgcattcaacaagtccaactaagttttgtcttttccttacttgaaatagtatattttgtattcttctatagactgatcactttttaaatgttgtttctgatcacagtaatgggccggatctttattatttttaaggcccatgcacataagaggtccacttattatgtgaattaaatgatattaaaccaaattacccaaaacaactcaccttttttccccaatagttaggacttaggatcattgataactgtttattttatagacattttagtacgctttttttttgcaattgtaaaaatatcatattgaatttcaattgaaccaagataatcattttaaaaaaaaatctatgtaaacatatggtcttaacaatatcataaattaataattatataaacttatcataaaataaaatatatatatatataagaatatttaatgtaagatgactctaatgttgtttacttttttgtagtgaagtattactttatccaaaacttattgtattatcttctaataattaaagttggtgtttggtatgaaaaattctaacaatttttttttaaaaatagaatgatttagaaacaagttcaaaatttgtatcatctaaaaattaaatgtatatgttgtttgtattattgatttaggatgagaaaagagtaattcaaaggctttgtcacgacgacaaagtctgggaagaggatgagaaacacatgcagattcaccacattgatcataactcattcatttttgaaaactcacctttattatatatctgattttgattttcttgcgtttttggaatcgaagtagagaaattcaaggtttcaaaactaaatatatagtaaaatttatagttgttttttttatccaaatgtatcatttttttttacatttttctgactcgtaaccgaaaaatttattgatttaaagagattattattttctcgattattaatatatagaagttttacataaactcacctaagatagatcactaactctttgtccaataattgggcaaaggacaagagaagagatactaatctcttaggataaatcatttattgatggaaaaaaattatgtacaaattttgtaaatatttaatattttagatgattgttgtcgtgcagtatatttatgagactgtcgcatttggttttatactatccaaaagatattcgataaaagcaaaaataacaaaaaatggaagtaaaaacaaataatctaacataataaaaaaatataaaccaaaaaacaaacatatataccgtggctaacacatacactcttttacctgggtcataaaaactaacaaaagtatatcatagatatactcatttattaattacctattgatgggcggcgtactttatttaagattttataatattacattgattgccataattgcatacatagtgactatgtgattgagtagtatagtaaatatataaatgaattatatggggttttacttgggacatagaacaaagctccagtcttttctgatgatcatcgaacttcttggattccagcttctttactatctaggtatcatcaatctcatttacattctctccaatcaattcatcccaatttttagttctttttcgtctaatttctgaggaatctcaggaattttagaaccaataaagatcttatacctttgaatatcgtaggaatagaggtaccaaagaagacagttcttcgaggtaggtcccatatcaattcccttgggacatctattgggtttaggctggatgcatgatccgcaaacatagcaaccgagaactcttgaattgaaaatctgataggcgcttcaccaaaatccatccaaatctcgtgctttttcgccgtcactaacatgtaatgagcgaactggaccgaaaaagctacttctcgaccgtgctcaagcagatacccgaactgagaattacaaagctgtgaccattctttctcttgcttattcaacgcatacttcacagtgtcctgatatttcaattaacacaataattaaacttaaaaagtaaaaaaattatcttttaagaaagataattttaaaatatatacatataaataaataaccattcattaacttatctagatatatatttgatatgatctgatatacattttattttgatataagtgttttaacatttattctttaagatgaagggtctagaatcaaaatccagtttgtcattaataaataatagttaaattgtatatgaatataaatggaatgtgtaagatttgaatatttttcaataaaagtactaaattaaatataggaaaagtgtacgaaatactatttagaattcaaatatcatcaataagatggagtgtctagaattaaaatgcccttttttattattaaataaatagttaaagtgtatgattgaaattttgtttgaaacaaaatatgaaattaaataataagaaaaatatagattattatttagaatttaaatattatcgatatgaaattatatttattttttacactcgcatatttaggcgggcattacctagtttttatatgtaaaataataattttgtccatatttaaatcaaaaggtgtatttttagtaaaatcaaaactaaattaaaaaaattgagagaaaaagaacaaataaatttgaaacatttttaggtatcccttatatattaattgagaagcatgttttaaaaagaaccttacacttacgtgtgattaacgacaatgccatgatgacatgtcacgtttatagagctcgtcaacccatttaattaactatccatcttttactagaatatttacatcaatttggtattggtattaataacatttgttttactcattggttaatccaaaataagtattttttttaaatgtactctcaacaaatctacaggttgaattgtaatcaatttaaaatgattaatatctactaaatatctaaatatatggaatctaacaatatttgataattgatttgtaattccaatttttccaccgattatggtactttaagttaataataatcaaattttaattacctcaaacatgtcatatatggacttatataatgttagcatacttgtttaagtttaccatgtatcctaacaaaagaatattgagatatattaattgacttattaaaaaaatactaacaaaaataaaatattaagaaattatgatctagaaaatatacatgtaagaaataaattttgaaggtactttatatgaaatatcgattttaaaatatttaagaaatcagaaaatgtaggaatgatgtatttgccataaatgataatatttcatcaatactttcttcacatggaagtttttaccatgctcaaatattttacgggtgaaaacaaattcttatacaaatttgaacagaacaaaaaactttttattatacgtttcattttatacggaatttgaataatcccgtatactaattttacttcaattattttatattgcacatagtgcgggttgttatctagttcttataattatttttgagacaataataatctaattattttctatattaaacaagatcaaatctagaaaaaaatataaaatctatcccttaatattgtcatgttatgtaaacaaaaatatctcaacgtaacaagccaattcttcaactccaaagtctgcctctattgtaagattaacgtagattatgattttttaacattgatagaatgatttaatatacatgtttattgattaagatcaacgtacgacttatagctgtaacataatattttttgttttatttacatgtgttattgattagagatagagtatccaaaaaccaatggaaatctaatcaaaagtaattttagtcaagagattttgtaagtaataatgagctatttaattttaatcaaacgtaggaacgtgaatcacttgataggtgaattcacaattattctatattgtttaaaagaaattttaagataaaaattatctttaaaattgttagttacttcaaatattaattgaaaaactaaattaatggattttctgttttacgtgtaaattatttttaattattatttacggaaatatttttagtaaattaatatattaaaatatagtttttaaaagaaaaacaaggatagggtagttttcaaacaataactcatttttgtttctttctcatttctctctttctcttactcgacttttggcgacaataacgaagctt

SEQ ID NO: 533 - DNA, 80196 bp, Arabidopsis thaliana
taaattaatggattttctgttttacgtgtaaattatttttaattattatttacggaaatatttttagtaaattaatatattaaaatatagtttttaaaagaaaaacaaggatagggtagttttcaaacaataactcatttttgtttctttctcatttctctctttctcttactcgacttttggcgacaataacgaagctttgcgaatctcttcgatttcggtggatttaaatacaaactacaaaatcctagtctaattttcaagacctatgtagaaatatcgatgtatatgttaaatataatcaactaaatgacataactatatccacttacttgatatttagtggtgtaacagagatattagtttcaaaactgaaaatattgaatattaagcatatagatgaggcatgtaattgaatacatcagatagatatattcagtttctagataaaagtagataacatctcataagtattgactcttttgaacaagacaaataagatgtcatagatttgtataaattacaagcttgaagaagttgttagcactgatttacaactgtgtaattcttactcttactatatccttccgtatattatatatcatctatttaaaactactttatctaataagtagcaatctgcataatacaaatgatcataaaacaaatataattaattttgtactgaaataataaatatcaaataaacttgtaagacatagggcatagccattagttacttaagtacctcattaaaatttttgttctaaaatgtccgatttattatatttttaagtcaaaaacatgaataactatatatataacgcatgtaatataaatttaaaactaaaatacatctcgtgcaccgcgcgagcctacttcaagtaaattatctaatatattagtaagaggtaagtggatattacttttaatgtgtgaaaaattcttaaacaacacttcaaatgaaataaagatagtgtatgttactccaccattgaaatcaaaattcaagaaaggataacaaaaatggtaggaccatattccagcaatccacaagtgacaagtgcttctgctggttatgttttacccaattttgtggatttcatcaattgattggatgataatggaagaatatgcatagtcttttctcagtactactttaaacccacctatctaggttaggcccgtctagataggcgggtttaaaaaatatttataaatttttatcgatgatatttgaattttaaatagtaaatgataattatttttaaatatttaatttagtaaatttgttttaaattaaattttaatcttacaataatcttacattgcagaaaattgtaatattgaaattcgatttaaaacaaatttactaaattaaatatttaaaagtagggattatcatttactatttagaattcaaatttttggttaatgggatctcaccgctatagattcaaatatttttataaatttgttttgattagaaccttggctataataaaacaataataaaatattaaatatagatgataatatagaagaaaaacatatgaaatcgtaatatttttaaaaaaaacagatgacttaaataacgtaagtagatcaaaggaaattgatgcatttgatgctcctgatataaattttttggaccgttctttcaggtttgtttaatgaattgatccatatatttgtgaacataaatgttggcatggatcaagcggcgatcttgcgaaatttgacatcgaaaatttcgtataaacgtatcaagaaatttactcttgttaataagatattagttttagttaaatataactaattgtggtaataatctaatagttgaataaattatcatcaaattgagagattaaggtttgaccgtttgagttctcttttatatgataaaaaaatatctaacattctatatatctcaaagattgattgggttgggattatatccggttatattaaaaatattatcaacagtgattggtctgtaaaccaggattaacttcagtttttttatatacaaacaaaggccaagtcaacgaacgtactaaattaataattatgttttcttttggtattgacgactttgcataaacaaatagaggtaggaagaaaattcggcagacgatatgttatggtgactttcatgtcgatttcgagtttgtgaaaatataatgtttaaaattgggtccacccacactattcaaaggtggttttcatgttttgctatgatccttgacatttataaaaattctaacgtatctcgatataaatagctgccatattttgatttttctattagtcaaactcacatttgatccttatctaaaatttccaacataactcgagattagtccaactgactcaagccaaaggtttgaattctttgtacttagttcagattcattcagcactaatttcactatctttgatgagtattggtctagtttacttgcttcatttgagtttccaaaatctttgactacttctcatactagtttcattcatcttttcgtactaatctgtaactttcaaatgatgtccaatttggaagaaggaaaaaaaagcttgagtccttaaaatttctaaattaagattccgaatggagacgtgcggttcaactgcggataaagtgcggtgcggttcaaatagtaacaaattatatacatatatatatgcaaagaatttcgttattatttaaaacacactgcactgcggttcggtcaccattcgaaacctaagatccaaaattatttcaaaaatatcgcatactaaaaaaatgtggaaaataatcagcataaagtcgcagggattagcgattaaaaaccaaccttcatctctttttaatcttttcttcatctctttcattttctgtcgataccactttttttggtgattccgtaaacagtgcaaataacatcgataaccttggaaactcttttataatatagcgacaatcaatggtgtatagatcttcaatctaaatacactacacacatcacaattgatatttttttagcaagaaactctcaaatcttccctctgtattaaactttactagtttgacaacgagaccaaagaatacatattacaaatccaaatccaaaatgtcataaagttgactaaaaaatagtaattgtataataattaaatcaaacctttcatgaaagcttttaacaactgtcattatttctcaaagctttatcaacccccacttataataattaatttttaaaagattttcttaaataacttgtacaaatatagtatcaaattttaaacctatgttaagtactacaataacacgctttcctctgtattattaaatcattaatacgtatatgtgacgagaccaaaagtacaaaaagtccaaagtacaaaactctcaatccccaaaaagtctcaaactttgacaagaaaaaaacagtaaacagagaataaaatgaaaaaatcaaacctttgcatcaagcttgcaactttccttttcaacatctgtcttcattgcctcttaagccccaattatgacaacaaacctcacgcgtactgtcttcttcgtcttgttcttcttcatctaccatgaaagctcttctctttcttcttacccttttcctcatcctcccaaacccaatctcagccattgatttcatcttcaacggcttcaatgactcatcatctaatgtctccctcttcgggatcgcaacaatcgaatcaaaaatcctaactttaacaaaccaaacatcgtttgcaactggtcgtgctctatacaacagaaccatccgtacaaaagatccaatcacatcctctgttttacctttctctacttctttcatcttcaccatggctccttacaagaacacacttcctggtcacggaatcgtcttcctctttgcaccatccactggaatcaacggttctagctctgctcaacacttaggtctcttcaatttgactaacaatggtaaccctagtaatcacatctttggagttgagtttgatgtctttgctaatcaagaatttagtgacatcgatgctaatcatgtcggaattgatgttaattcacttcattcagtatattctaacacttctggttattggtctgatgatggagtggtgtttaagccattgaagcttaacgatggaagaaactatcaagtttggattgattatagagattttgtagttaatgttactatgcaagtcgctggtaagattcgacctaagattcctttgcttagtacgtctttgaatctctctgatgttgtggaagatgagatgtttgttggattcactgctgctacagggagattggttcagagtcataagatcttagcttggagttttagtaattcgaatttctcgttgagtaatagtttgatcactactggtttaccttcgtttgttttacctaaggactcgattgttaaagcgaaatggtttgtttttgtgttggtgttgatctgtttcttggttgttgctttggttggtttggtgttgtttgctgtggtgagaaagagattagagagggcaaggaagagagcgttgatggaggattgggagatggagtattggcctcatcggattccgtatgaggagattgaatccggcactaaggggtttgatgagaagaatgtgattgggattggcgggaatgggaaagtttataaaggtttgttacaaggaggggttgtggaagttgcggttaagcggatttcgcaggagagtagcgacgggatgagagagtttgtggctgagatatcgagtcttgggcggttaaagcaccggaatttagtttctttaagaggatggtgcaagaaggaggttggtagtttcatgttggtttatgattacatggagaatggaagtttagatcgatggatattcgaaaacgatgagaagattactacccttagttgcgaagagagaattcgtattttgaaaggtgtagcttcaggaatattgtatttgcatgaaggatgggagtctaaggttttacatagagatattaaagctagtaatgttttacttgaccgagatatgataccgaggcttagtgattttgggttagctcgggttcatggacacgagcaaccggttaggaccacgagggtggttggtacagctggctatttggctcctgaagtggttaagacggggcgtgcatcgacacagaccgatgtttttgcttacgggatattggttcttgaagtaatgtgtgggagaagacctattgaagaagggaagaaaccgttgatggattgggtttggggattaatggaaagaggtgagattctaaatgggcttgatccacagatgatgatgacacaaggcgtaacagaagtcattgatgaagctgaaagagttttgcagcttggattgctttgtgcacatcctgatccggccaaaagaccgtcgatgagacaagtggttcaagtgtttgaaggtgataaggctgagatctttgaagcagaaagtagtgaagatgtcgagtcatggatgttgatgaagatgggatctcgtggaagctcgcgagagttttggtatggaagctcatcacatccgacgatagagcagattagacttcagtctttgtctgtgtctctttcgtcttggaacagctcaattttagaagggaggtgatgatgatgaagaaatggcttgaggaacctaaagaatgtagttatttttgtggctttactttgttacttgttttgtacatatacgtatttgtaaacgcatttcattatacatgtatttttttattttaatttttttgttgtgaattgaaactagttttcaatttattatattttgatgtgtatataaacaagttttgcatccgaagttaaatgataaataatttaagagaagtacttataataatgctaacaaagtaaatgtgtagattactataaaacatacttttttactaaaataggatttatgttcttaagtattgaacatgagaaacatgttttatggtttttttttttttttttttttgtcatcatgttttatgttcttaagtattgaaaaaagtagtactagtatctggttgatgaataaaagattactctaaaacatgtttttactaaaagaggatttatatcaataaagcttggttatatatatatgaaaatatatatatatttttttaaaaaccttattcctaactacacccttatttatttatctaaatttttatttatttcaaaaaagaaaaatacaatacaaggctttgtacatcattctcttattaaaaagtttagatctcacataagaagttctatcgaaatttacaattttaatatacaagattacaataaaaactaccaggtttccgatcataaatttcagataatactaacagaaagaacgacaatcacatccgtcgatcaaagtttttgtaaaagatccttcgatttttttgtatacataatgatattatttaaaattcaaatatcatatacatatttacaatttttgtatgtccgcctatctatggggatcttatctagttaatcaatgaaatttggttttatatataccaaaaaacaaacattctgacaaggtctaatttgcatattaatgtaaacacatcatataaaaattcctaattgtcacgagttccaggtaatcattcatatactataatgcatatggttgccagagaggtatatttaaaaagcttttcatctttggaaaaagcataaagttatgttcatgaatcttataaaatgttttaaagatagtccttcacaaaacaagacaaatcaaacgacacaaagattcgatgctgcggtgtcctaaaaagttctctttatttggagtctcaaaatctaattcttatttgttttcctcaaaacactttctgtgaaaatttcgaaatgtcactacactgtgagtttagcaaaagagtttttgttcattacgttctaattctatgattatctaatagattaagtgccatcactttcattcatgagcacaccatcactagttaaaaagatcaagtgcctttctcagttaatcctaaatcctagttaatgtggtgtcgttttgaccaatccattaatacgttgccgttttaaaatcccaccacgagcataatataacggatataatgctatcttgtcttgtttctctctagatttcagagattctctcgagtttctgacacgcgcgtactcgcacgtgtctcatcactacactaaccctacacgtctccctttcgtggacgctccgtttacttaatctccaccatcagatcacatcttagataaaagcctaaaatcaatctaacggtcactagctcaaggagtatgtattattgtacgacgagacacacatcgttatctctctttattatttggtaatatcataattattatctctatgcacagtttttgtttcgtcactgtctttgaaacttaaaagaaaagagaagaaatagaaagaaagaaaaaaagatgaaataattttgaaaaaaaaagattcgaagcaaagaaaccgttagccggcgatgagaaggcagcggccatcggtagccaccgcgcgtgatgcgccgtcactagaggtatacaatatcattccgattcatgatttcttaacggaacatccgtcgctgcgttatccggaggttagagcggcggcggcggcgcttagaatagtcggagatcttccgaaacctccgtttgctgatttcacacctcgcatggacttgatggactggcttggtcttctctttggttttcaaatcgataacgttcggaatcagcgagagaatctcgttcttcacttagctaactctcaaatgcggctgcaacctccgccacgtcatcccgacggtctcgatccgactgttctccggagatttcggaagaagctgcttcgtaattatacaaattggtgctcgtttctcggagtgaggtgccacgtcaccagccctatccaaagccgtcaccaaacgaacgccgttttgaatctccgccgtgagcttctctatgttgctctctatctattgatttggggagaatctgcgaatcttcgttttatgcctgagtgtctgtgttacatttttcatcatatggctatggaacttaataaagtcctcgccggagagtttgatgatatgactggaatgccttactggccttccttctcaggtgattgtgctttcctcaagagtgtggtcatgcctatttacaagacggttaagacggaggttgagagtagcaacaatgggacgaagccacactctgcttggagaaattacgacgacatcaatgagtatttctggagtaagagagccttgaagagccttaaatggcctcttgactacaccagtaatttctttgatactacacctaaaagcagtagagtggggaagacaggatttgtggagcagagatcattttggaatgtgtatcgaagctttgatcggttatggattttattgcttctgtacttgcaggcagctattattgttgctactagtgatgttaagtttccttggcaagaccgtgatgtagaggtctaaaagcttctcctttgtttgatctaattacggtaatatgtgttttgagttggatataaagacattttctgttcttctacttgcaggttgctttgttgactgttttcatctcctgggcgggattgaggttgctccaatctgtgctcgatgctagtactcagtacagtttggtgagcagagaaacttattggcttttcatcagattgactttgaagttcgtggtggctgtggcatggacagttttgttttcggtcttctatgcaaggatttggagccagaaaaataaggatggtgtatggtctcgggctgcaaacgagagggttgtcacgtttctcaaggttgtgttcgtttatgttatacctgagttattagctcttgtactctttattgttccttgtataaggaactgggttgaggagttgaatcttggagttgtgtactttctgacatggtggttctatagcaagacttttgttggtcgtgggatgagggaaggtttagtggacaatgttaagtatacactcttttggattattgtattggccactaaattcatatttagttacttcttacaaattaggcctctaattgctccgaccagggcactactgaaccttaaggatgcgacgtacaattggcatgagttttttggtagcactcacaggatagcagtagggatgctctggctccctgttattttggtttacctgatggatttgcaaatttggtactcgatctactcatcccttgtaggtgcaacaattggtctgttttctcacttgggggagatccggaacattgatcagttgagacttagatttcagtttttctcaagtgctatgcagtttaatcttaaacctgaagagcatcttctgagccctaaagcaacaatgcttaagaaggctcgtgatgctattcaccggctgaaattgcgatatggaattggtcagcctttcaacaagatcgaatccagtcaggttgaagcaacttggtttgccctgatttggaatgagataatcctcacatttagggaggaagaccttatcagtgatagggaggttgagctactcgagttgccgcctaattgttggaatattcgggttatccgttggccgtgtttcctcctttgcaatgagctcctacttgcgctaagtcaggcaaacgagctctgtgacgctcctgatcactggctttggtcaaaaatctgtagcagtgagtacaggcgttgtgctgttatggaagcttttgatagcatcaaatttgtgattcttaaaattgttaaaaatggcacagaagaagaatccatactgaacaggttgtttatggagattgatgaaaatgtggaaaacgaaaagataactgaagtatataagctgacagtactactccggattcatgagaagctaatatcacttcttgagcgtctgatggacccagaaaagaaagtattcaggatcgtgaatatactgcaagctctgtatgaactttgtgcatgggaattcccaaaaactaggaggagcactccgcagttaaggcagcttggcttggcgcccattagtttggaagcagatactgaattgctgtttgtcaatgccattaatctccctcctcttgatgatgttgtcttttataggcagatacggcgggtccatacaattcttacttctagagatccaatgcataatgtgcccaagaatattgaggccagagagcgtcttgctttctttagcaactctctctttatgactatgccccaggctcccagtgtagaaaagatgatggctttcagcgtgttgactccttactatgacgaagaagtgatgtatcgacaagaaatgctccgagctgagaatgaggatggaatttccaccctattctaccttcaaagaatttatgaagatgaatgggtgaattttctggagcggatgcgtagagagggagcagagaatgagaatgatatctggtcaaagaaggttagagatcttcgcctctgggcttcatataggggacaaacattgtccagaacagtgcgagggatgatgtattattatagtgccttgaagaaacttgcctttcttgattctgcttctgaaatggacatcaggatgggaactcagattgcccctgaggcacgccgttcgtactacacaaatgatggtggggataacacactgcaaccaacaccttctcaggaaattagcagaatggctagtggtataacccacttgcttaaagggtctgagtatgggagtgcaatgatgaaattcacatatgttgtggcatgccaagtttatgggcaacataaagcaagaggggaccatagagctgaggagattctgttcctgatgaagaatcatgacgcccttcgtattgcatatgttgatgaggttgacctgggaaggggtgaggtcgagtactattcagttcttgtgaaatttgatcaacaacttcagagagaggtggagatctatcgtatcagactgccaggccccttgaagcttggtgagggaaaaccagaaaaccaaaaccatgctctaatctttacacgaggagatgcgattcagaccattgatatgaatcaagataaccattttgaggaggctcttaagatgaggaacttgttggaatcattcaagacttactatggcattaggaagcctactattcttggagtccgtgagaaagttttcactggttcagtatcttcactcgcatggtttatgtccgctcaggaaacaagttttgtaaccttaggacagcgtgttcttgccaacccactgaaagtgaggatgcattatggtcatccggatgtatttgatcggttttggtttgtgcctcggggtggaattagcaaagcctcaagagttataaacatcagtgaggatatatttgctggattcaattgtactttaagaggtgggaacgttacacaccatgaatacattcaggtaggcaaaggaagggatgtgggtttgaatcagatctctatgtttgaagccaaggtagcgagtggtaacggtgagcaagcattgagcagagacgtttacaggttaggtcacaggctggacttctttagaatgctctctttcttctacacaacggttggctactatttcaacacaatgttgatagtatttactgtttatgcattcttgtggggtcggctttatctagcacttagtggtgttgagaaaatagcaaaggataggagtagcagcaatgaagctcttggtgcaatcttgaatcagcaatttattattcagctaggacttttcactgcacttccaatgattcttgaaaattctctcgagcgtgggtttcttccagcggtttgggacttcataacaatgcagctgcaacttgcatcgtttttctacactttctccatgggaactcgaacccattactttggccggactatactccatggtggagccaagtatcgtgccactggaagagggttcgtggtggagcataagaaatttgctgagaactacagattgtatgctcgaactcatttcattaaagctattgagctcgcgattattctgttggtatatgcggcttatagcccgttggctaagagttcgtttgtttacatactgatgacgatttcgagctggttccttattacatcttggattatttctccatttctgtttaacccttctggcttcgattggctcaaaacagtaaatgattttgatgatttcattgcatggctatggtctagaggcgggttgtttacgaaagcagatcagagttggtttacgtggtggaatgaggaacaagagcatctgaaaacaaccggagtgtggggaaaactgcttgagattatacttgatcttcggttcttctttttccagtacagtattgtgtaccatcttcgcattgcagagaatcgaaccagcattggtgtatacttaatttcttggggatgcatcatcgggattgttgcgatatacatcacaacaatctatgctcagaaaagatattctgtcaaggagcatataaaatatcgattcattcagttcttagtaattctccttacggttcttgtggtcgtgatgatgctgcagttcactaaacttacagtagttgatttgttgataagtctcttggcttttgttcccacaggctggggattgatttctatagctcaagtactgaaaccgtttctgttatcaacagtggtttgggacacagtaatctctgtggctcgcttttacgaccttttctttgggctgatagttatggctccagttgcattgctttcatggttgcccggttttcagaatatgcaaacacggattttgttcaatgaagcttttagcagagggttacagatttctatcattctcgctggcaaaaaatccacttgaagcaaatattgggtatggttcagaataagatcttctttatatgttacactgattactattaactaaacatccattaataagactgatttcatcatatttgcagggttcttaaagtttttgaaatgagttggtctgagaaggttgggcgatatccttttctctagcaaaaaaagttttgcttgaagcagcttatggtagcctggtttaatatcatcctccaccgttttgtggcattgctccaggttaagcctggtttttcctcatggtggttagcattttggagttgattgtttgaccttggtttggcttgtttataaacatataaggtatgtatctatcttcatttgctttggtgactgattttatttgtcaagaccttacgattaaatacataattttgtcatatttgcagggttcttgatttgttgagagatggtaatatgagggagcttagaaaaatgacggtatgcttcacactgcaccagttgttttggtcgtgtacagatttgacccttttgcatttgttaggagactcttgcttttaacaactcttatgcacatagtttgcttgtggagacgatttttacgtgctcttagactcttcacactgcaaatgcgtgtccaaccgcatcatatcacttatgtaaacaacatttctcagaaaatggctcatttgagctctaattaatttcagatgacaaaaaaaaaaaagtttgcttttggagagagatcttttgacgtctttcactcttttttttcttaagcgtttctcgaatcattttgtcatttcttgattcaagtttattgcaagagaatcatactggaatcttacgtgattataaagcattgtaaagcaagaatggttttttacttttaacaactccgaaaaagtgataactttgacaaatagtcaatagatatacgatcatggtattatactttagaccgggatatttaagtaatttgaaagtcctttaaacaaatgttccataatatatacttgataaccaaagttcgttattggaaatatccactaggcttttgtatttttgtgtaaagagatatgttcatctcgaaatgtcgaaagacaacatgataatgttttcctatgaactctctagctcttctctcatggaagtaaacaaagaagagatcccacaagtacaaaatccttttcaatttgaagaagataaagaagaaacttctttaggaaagagaaagataggtaagttgttctattacaaaacccatcaactcaagttttagagttgtgctctgtctgataaattcgactttaatagatcataatgatttgatatcggcagatacgattattaagactgaagatgaaagggaagtaaaaagaatagccttcttctctcaagaacctctagaagaagaagaagaagaagaagaagacattgatatgatcgaagaagatacagagagagaggatcatagagataatagcgacaagatcatggaagataatgttcttgaagaagagtctgtcgttgacttttatggattcttttgaaacttgtcttctctaagatagcctctcgttgactttttcgtttcttaagctctttgcttgattgcttctttgtcatgtaattatatatataggaaatgaaaaaatgttctctgtctctttgcattggtccaaaatcaaaactagagacacaaaaatgtaagtattgtaaatcatcttcaagcatcaacctcttcttgatttgagtgagtaaaacatgtgatgaagctttttctggttttcaagacatgatcgatgattcggattgatcaggatctgtttgaatctcatgtgcaagttgtctcgttaaacaatctgctcgttcatcgtgacctcctgcaaatgtataaactttgaaagcaaactgaaaagccctccatagcctcttagctctctcttccttcatcttgctttcttcaccgttcttcgcttcctcgttcgcttctctcctctcctagaaaacaaaacgagtcagtctttcaccgccgagaatcaatttgtgtaatttatgtgtatatatttttacctttagtgctaactccatgcaatttgatgaaacatcaaccatagtttctttgacttgaacaagaacttcgaaatcaatgttaatgttgtatctcttaaacattttagcgtcttcgtcttttgttcgctcaaccgtttcaatctcgcctttaaatttgttgaagtaacgctctatcttgtcgagaagatcgtttaatggaggctcaattttccagttcttgagctcaactagaatcccatctaacttcttgtacaaggcaccagctgttcttattacttctagtttcttctcagggaaaccttcaaacctcgcgagaacctaaacaatcaaacgacagattcatatttcgagagtgaaaatagcgactcgattcaaaaaacactaggagaattcatacttgagtttcatcagttagtttctcaagaatagattctactttgctatgaaattcaagcaactctttcatgtcttttgtctggaaactatgtattgaggatttcagttcttcgatcgatttagcgtatttctgaacatcttcttcgatttgctggaaataacttgacctatgacacaaatgaaagacagtgtcaaactcaagacatataggtttaacttgtggcgcaagtcatctacctctttgtcatctctgcaagtgcatcagccattcctgatcttgcaactttaacaggagatttctctgcaacactattttgccctttacttgctttttttgttttcccttctacgccacggccttcaagcttccctttgagagcccaatagagatttgcgatttgtgctgatcttcttaatttgctagttgctttctttaaggatcttccgctacccggtggtgctggaggtgccggcatcgacggagcattgtctccatttgtagaatgcgttttcgaaaattgacaaaactctccactttcagatgcttttgacataggaggcggcggtggaggagctggagctttgtgttccggtgatggaggtggtggtggtggttgtgagcgaagactagattttgtgttgaacgttgagaccgttggtgacggcgtttgcggtgatgtaagtggtggaggtggaggcacatcttcttttggagaagattctgttgaatcagtctctgaagtcgtggtttcactatgatcctctgtttcattctcatgctctgtttcgaaaccttcaatatgatgatgctctgtttcaaaatcttcgatatgatcatttgcatcaatctcatgctctgtttctaaaccttcaatatgatgatgctctgtttcaaaatcttcgatatgatcatctgcatcaatctcatgctcagtttcgaaacattcaatacgatgatgctctgtttcaaaaccttcgctatgatcctttgcttcagtctcatgctctgttccagaactttccctatgatgttctgttttaatctcttgctctgttccctctgtttctaaaacagagaaatcattatcttcttcttctttttcttctgctaatatctcactctcttcattttcttcttcgataccaatctttgtttcactaacactctctgaatctctctgtgacaagatctgcatagcaaaccgcttcaaatcaacaggacttaacctatccaaagcttgagctcttaagttccatagacttggagatgtagagttactagacatcatcattgtccctggaagtactgatctcggtgttaatggagatggataaaaagagttgttactttctgaataagaagcagatcttgtaaagcttcttcttgcttctgatgaaacaccttttggtgttgtaaaactctttcttccttcagattcaagatccatcataccaaatctttctctcgtcgttttgattagtccatcaagagctgctaatacatgctccactgaaacaaacaaacaaacaaaaatagtctattaagagttctgtttcacattctagggttcaaaaaagtgttcaagtaaacaaacctagacgatctgatttattcttcccaactccactgtttttgtacttagatcgataaatccagtcactatccataatccaagaatccccaatagctctgagatcttcgtagaagaaaattaacatctgtttttggggcatttctggggttcatcaatcagattaacaagactcatcaagtaaacaaactcaagagtttttctattttattcttttttgttggagtgtttgtcaagtaactcaaaatctgtttaaactcttatgtgtaccttatccatgtcagctccttccatttcaaaagattgattaatggttacaatctcaggagatagcttttgtagatccttcattgtttgtgttataatctataacaactcgaaagcaaacaagacattagggtctttagctcttttagatctttgtgttataatttatctttagctactgacctcggtgacagatagagaaccatcaagagaaggtaaatcaatcatatctctaaaagcgaatatgtttttccttaactcaaccatcaaaatgaaatttgctgagcatttcggcgaagaaccctccaaagtgttctttctaggtgtattcgctttcgtctttgagttctttactgacaaaggagacgcggtcgcggtgggagtagaaacatgttttgtagaattgaaactctttggagaagaagcttgtgcaacagaagaagagatctgtgaaactgtgcgtctgatctctttatttttctttttttcgacattgttctttgatgttgttgtgcgtctaaaatcgtgttttcctttgataagcctttttagagcaagccctcttgcgacctaaacacaacatcataaagaataatattttaacatgttaatgcaaacataaatgtagatgtgagtcaaaaacacattaagttctgtaaaaataaaatttttttttcagtttaactttttgataaaataagtgtgtaaaatacaaacacaaatgccaaacatatgtccttccgttcgttagtttgtttttttcatcttttagtattagatttcttctttggagtcttaaaacccgagcagactatttagcgaagaaagctaaagctcataatagcattttctcccatgtaagtatatcggtttatgaatgactctccgctctcttttcgataacttaatataaatggtgattagagtaaaaaaaaaataccaaacatatagagtaagcataattctcgtttgcatatagcgtttgtgctcttaattcatttagagaagaagacaaaaccataaaatgtaaagacacacgtaaatataaacacaaaggaacaatgatgtttaaaagaacctgcaatcttgagattttgcgacagaaggttatcggcgtgaagccgcaaagcctcccgcttgacatcgcgagttttgaaatcgaaaaatcgatttctcaaccaaaatattattcaatcaggagaatccattagaaagagagtctgatctctttcttaatgaatattttttcaggtgattctgttaaacaaaggcgtgccaagaaagaaagatttgtgtttttcttcaacaatgaatgaaagaaaatctcggaaacaaaatcagtccggaaattctagaaagattgaatccatctctatctctttctctatctctaactcatatggttattattagaaaagttttaaatgatagaaatctttgactataattatcactgctcttaattctattaaaacactttggattctcctgaaggttatgctaaatattgtagaagtagagactatatattatcgttagaggttagccgttattcttaggtttacaaagagttctttttttcaacggatgaaaatagttagagtccttaaattaggtttactaagtccagttatcaaatcgacttaacaagctgaaggaatataagaagagaaataggggaatggaggacaattggtataaacctaaatcagtttcttgagaaagaagcaaccagttcaagtgtgtggattgagtaataaaccctaactaatgctttttattaacaggccagctcagtaatattgactccaaaatattatgggttaatatatatatatagttatcaacaaataaaattgggtcataatatagatttttttttatcttaatatataattgtctttttatagtatatgtagtaatggatgttgtgatcttaatattttgcataagtagaaattcatcaaaatctttaataacaaaatcatgaaatgtagaattatgactttagtacctttacctctgtttataattttggaaaaagcatgaaatgaaaacacatgtttacatcttttagattatcgtgattaagaaagctcacatgtatatttttttataatattgtgatttaagaaagcaatgttgcataaatagaaaaagaaagctcagctcttattacaaacttaaaatttcttacaaatcatattaaacatgatcttatgtctcgtacaaaatgcaattgaatctagtaaagcaaatcacacgagattttctcaaagtagatagtttcatcttcaagatcaaatccgatgttgtacatttgaaatacggttgtccagatgatgttaagattgattcccggggtcatcatcacagctaaacagaaatactcttcttcgatttgttggaataagctggttagatccaaatctaaagagactcccttgtagaatgtcaatgttaccgtaggcaatgaagctagctcgcgttgaactgttccattgtaacactctagttggccatcactaaagttgtttagcttttcgtcaatgaagttgtcgatatgacttttgagctcaccgtacgattccccagccgagtttaatattgtggtccatgtgtcgatgattgtgtttcctttgatgggtgtcaagtgattaggaatagttattccattaacgctaatcatctcaaggtcgacatgataatgaccatacctcatatattagaatttatattttaatcacattttaagaaatgataatgattttaaacactaaacaaaataaacaatattaacaaaacagaaaaattaatttaaattattttgttataatctagattttaactcaatgaactatatattaatgctagtaattatttttttataatcaagattgccaatggcattaattcttatcaaataaatctttaagttatttttttattatcaaatattgatggagatatattagataagaaaatgctagtaatcaagaatattaattaattgataagaaatgataatgatcttaaaaactaaacaaaataaacaatattaacaaaaaataaataaattattttgttataatctagattttaactcaataaactgtatattaatgatagtaattattattttataatctagattggcattggcattaattcttatcaaaaaaatccttaagttatttttttttatcaaatattgatggagatatattagataagaaaatgttagtaatcaagaatattaattataagaaaaatgataatgatcttaaacactaaacaaaataaataatattaacaaaaaaaaattaaaattattttggtataatctagattttaactcattgaactgtatattaatgctagtaattaatttgttataatctagattgccattggcattaattcttatcaaataaatctttaagttagttttttttaatcaaatattgatggagatatattagataagaaaatgttagtaatcaggaatattaattaattgataagaattaatgccaacgacatttattgtaaataagttctaacttgaaaatttatttgataaaagtgttccaaaaatgtatatgtggatatgttcattaaaaatttatagatatttttttataagaattattatttgtatataaataatatatttttaatacataatttttatctaggataattcatgatttatgttctcatatttgttagtttaatattaaaattcagtatttgtttttatggtttggattttttagaggtaataaagatcaaaaacatgtattattttttatattttgttattttatttttaacttgtattatttagagattgacccgcgttataccggaggttgatttgttttgttagaaaattagatatttttattttgattaatattatttgtatatatataacatattcaagagatacatcaaacgcctatatttttattaaataaaaaatagtattttgattttaggatgatctatagatacatgctattgtttttttatgtattatactatgatacacctctttatgatttttataactaattgtttttttgaaaattttagtttttgttttagtgtttaaaattgtataattgtattttgattgttaattttaggatttcatccatggtatatcatcccatattaatatcgatccaaactcatcccaccatataacctcgtcctgtgaaattaaatattattttatcattttcttatgaagttcgaatatttataatattggaaacttcaaaaaagttttaatatggaccaaacttcataattgtatattgattgttacatatatgatttcacccgtaatcagtattaatatctttttaatatttataatatttaaactttttataaagttcataaaattttaaaatcattaatatttaaatttattttatagagtttaactttttaaaaagtgttaaaaattgtaatatttaaattttaataaagtttaaataaatataatattttaaaacttttaaacttgtagttatttaaaataaagaaccggagtaaaccgaacaacacttttaattttggatgtttgatatatcaaggttctttctcatttgtattcagaaacactttggtcttttttatagtatgacttttaacgatttcccaattttttaagcaatgtgggatctttaaaacttatttgttttcatcgatggagtattatatgtctgttttaaaaaatttgaatttcatcagatgcaaaaaaatctaatattttattaaatatatgtattttatatataaagtaaaaaaactatatataaaaacaaaaaattatatatttataatgttgatatatagatttaggaaattagctttaatcgaatatagttcaataaagaaagattcaattaaggataaaaatttaggaaagagttaattcaactaattaatacaattcaactaattgtaagtttttagttataaagtatttgattgaaattaaatttgtaaggactaatattgaaaatagtacataggtgaaggatttttgggcaaaaaacctacgaaaaatataaataagttctactagggttaattatttcgagaattatacagccagttgattcttgcttagaaattttgagcataactcaaaacgagtttcatgaattcgtactaaataattgagtatatcagtgaacaacgaatactattcttttgaccttccacatgaaaattatagtcaaaattcaaattgtaatgtattaatgtaaattattttcactcgaccttggatttgactggtcaacgtcaaatgactcatattcatgcactttgatttatggcttctgtcaatgtaatgactcatgatgatgcgtgtgtgaccgattgagatctttaggtgatggaaatccaatctacgctctagtggtaagaagagccctcgaaacttcatgagaatatattaaaaatgaaattagctatattgatacaattctttcacgctatacataaaatacactttctgactgccaattatgatacagtcaaatagaacacatatcctaattgatgagccaaaaaacttatgtatgcataattacatgcatgcatgatacattaatgggtttcattagtaacacaaaactatataaagtttttagctgttagctgaatctgtaagttttttcgaaatagtgcataattgtaagaaaaaactgtacaaaaaaactgtacataagaactgaaagtaaaattttaaataatttttttgataaatttttttgattaataactgttaaaattatacaaaatatattgttttgataataggttaccatgcaaagcaattgaatttaaattagaagagtttgttattttagttgaagatcgatatcattgataatatttataaattttgactttcgtttacgatcgatatcagattgcttaaaaatgttagattattgactttcgtttaagtattatattgataggtttcttcagttcgtttcaacaaaataagttacaaaagtttatacaaatattaaaatatatttgaactaaatttgattttaatatgaatttcagttctagctatgttcgatttggttgactggtgtacaaaaaaagatatgttggattgtgtagacatattttttggttcgatcggttttagagtgtatatattaattgtttcaaattcggtatgatttatataattctgtatatatgtgtaaaccaatgtatccgctaattatacatgtgtatacatttagtatcatgattcatgtatcgatatacattattacacagtcgacattactgccatgcccatgcaacgtcaggaatgtaaataatgtatatttacttgacttcataggcatgtctattatatacacacactagaatagtagctagctagatacatctaagcgtggtgaaattttcattggcccttttgtcttttaaatattccgaaaataagtttctcaaaggccataatattgaccaagctggtctattttaaaattagttaaacaatgaatagcaagtatcatttaggtcgccatctaaacttacgttgctcatataatcaacattaaacatatcaaacagttgtaaaatgcaacaagatatttataagttactctcatttaatattcaaaagtacatgtagtattattatatgcatacagtcttcgatgaacttccatgagttcttggaaattctatccacggtcgggatttttaatagttggggaccaaatttgaaacgatatctacatatacatttttgcaactattttgtgaaataaatcttgtagttgagatttatttacaatggctgccactagattttcattgcttttctccataactataacaattcgattataaccatcaaactgcagaaatatttgatagcatttaattactacaaaattacaaaatatttagacaataattcataaacatatcataaataagatcaatattaataaaactaatgtttttttacgggacaggttggcgggacgggtttggcagaacgttacttaataacaattgtaaactataaaataaaagtattttatagatagatataatttgtaaacttttatgtatattaactttaaaaaataaattgttcccgcggtgtaccgcggattaaaatctaataatccttaaaaggacaaaggatttcaaaataataattcttattcatctcttaaaaaatacttctcatccctatctagctcgttatacttcaatcaagaatcataaactaatataaaatatcttgaccttgtcaaataatcaataatgtcgacatgcatgtgttacatatataatttccatacctaaatccaatttccttgcattagtttatattccaattatagggactagttttcgttgtaggcatagcaaagatagttttaacagtgctgcaaaaaaatggtaatcctttgataactttagtcagtggtattttaaaattttgaataatggtctagaataaatttattaaaacaaaccaactttttattcattgtagaatatcaaaacaaaaaatttgtttacgacaaaacaatttcattgaatacacacctttggaatatcaaaattttgcacattaattggagactcatcaaccgtgggagctgccgtagaagtatttctctactccatacagaagtcaaagctctactttgggcgatgaagtgtatgattggcaccgacaacaaaaaagtagtattttttacagactgttcagacctggtgaagatggtgtattctctaaccgaatgaccagtgtttttaacttatttggagaaattccagaccgataaggaagaattcacaagatttttcttatttttaatttctcgtactgcaaatgttaaagcggacaaattgacacgaaaaattcataccaaatcgcttcatatcactttttgtaaataatttttctaagaattagctcttttgaactctaaaaaaaatctcatgacaaaaagaaaagagcaaatatcaaaattttattaaatgtttttgggtcaagtaaatatatacaacaaaagaaaacccgaagttttcaagtctctagctatgggtgaaaaaacaaattaacgaaacaatatatatatatatatatatatatatatcaattaaataaatttcagtttttcactcatgacctttgggtttatatatatgcaaaccatgcaaagactttaaactgggacaaatatggctatatatatgtaagggcaaaaaaacacaaaagagagacgacaatttagagaaaacaaattaatgttaacctcaaggacatggatcatctcttcaggcttagtcggagccatatcactgatgcttcgatcggtttttaacttctccttcaccggagctcgcttccttctccctactaatttacaccctattttcatcatcaacggcatcatctttgccctcgcagcctctacttcactcttcggaaacggaccagactctccggccacaaaccatcaccatgatgatgatacgtatgattacgaacaggaccatcatcacgaccatgatcgtgaccgttcttctaataactcatccacttcttcgtttgatcaaaacaataataaggttcacgagaaagaaaattttccagtgagatcagagagtggaggatcttatggggtttcttctccggaggttcgtttttttccaacggcgccggagaagcccgtcggtctccgacgtccacctactgttcctgtaaagacttttccacaaggtatctatctattacgtgccgtctcaaaatctttgtagagtcctcagcaaaatcctttattaaaattatattgatattttaatttatatgtatatccacaattttcttatagagaattatttttgaatcgtatttttgttccaaagtttcagtttttgttttttttaatttttttggtcaaactttaaagatataacccaaacttgtattgaaagtggaattttaagagatttgtatagaatttataaatcctatgttatttaaacataaattttaaaaagtttcataaaattcagtgttattgaactaataatttcaaaatccacctgaaaatccactgttattgaaaacaatttgtggatttgaatttaatgattttggaggatttgagaggattttcttagttaaaaatacagaaatccaaatctcatagttttgggtgagatttgaatggattttacaaaaatcatatgaacttctcctagactaaaatcatcaaaatcatttaaaaactcaagaaaactcaaatcactttaaattctaatttgaatacaccctcctttatttgttaaagatttagaaaaacataaaccaaactgaaaatcttgtaggaaaacaaaataacaataagaagattataaaaaattctataaataatacttcctctgttctgtaatacttgataatctagaaaaccatatatatgaagaaaacatattaaaagctgattctaaatgtatttttttttgtgatttacatttttttataattctacatcaattatatgttatatttaattatatataaaatattatataaaaaaaatcaatattttagaaacaatattttttctagaaaatcaaataataaggaacagatagattccagtatcattttgtccaacgaaaagtatgagacttagagaaataaaaaggataagttgagttgtgtgattttcgttatgaacaatgaatattacgtttaattactttgatttagttccagtaaaaactccaacttcgtatatatataactatatcatcagacaatacatcgggggacgagagcgagaccatggaggagatgtgggagagagtcaaagccgaaaagcaaccaaagaaacctaactcgttgcaagaccacgtcatatccaggggagacacaaaaatgtcaacatcttcatggccgttgccgtcacgttcaccgtcacgagcgaggaggcctactccttcgttgtcttcgctatcaccgtcatcgtcgcgagcaaggaggcctccttcatctcccgcgcggccgggaaagaagttgatggagaggattccgtcgtgggtgaagttgaaaaaagagttatcaatgggaagagaggagctcaattcacgagtggaagccttcattacaaaattcaaggatgagatgaagttgcaaaggttggagtctgtaagacgttacaagtctttccgtggtcacaacgatgaaaagtaagaaagttgatataattatgtaacggagacttgtcttcattttgtatcatatatggttagatgtgtatgtctttagatttaattatgtaaatcttgtgaccaaatctgcatattactacattcatcttgattttacattttttacttgatcccattatccaaagtgagtatgtatctcaatctataatcatattggaagttcaagattgatttgaattagttccaatccacgtgtgttcacaatgatattgggcctaaggttaatggcgacctgatcaccttccaaattaatgcttcattaaccaaacacatacactaaaatgaactaaataatgagtttgagcataaaagaactattatgttgataacatttaacatataacttctatattgatgactaaaaagagaaggaaataaaaacatctaactttttaagtcaaaactcagtggaaatttgtaagttatatgcctttggtttcaattttgctatgacatgtaaaataatgcaacaacaacccaacccgacccgtaaaataaccgcaatgataatcccaaataggcaaatctattgctatgttgacacgtaaattagcaacgacttaccgtttttttggaatgaccaaattcatacctatgttattttgttggaaagtttagaattaatttaattaacaacaaattcttttcaatgaattaattattagggttcacaactaaagcaagcccaagcccaatgtaatgtccatgtaactagggttttagcaaattagaaaattcatatatatagttatttaatgagaattatgattgtaactttgagagttggaaacaactctcctccttcatcttataaaatatcaatttaaaatcgttttgttattggtgacaagcctaaagctccttccattctctgttctttacattgatcttggtcttgctttagttgtaatcaacttacgacgaattaaacatgtgtttttgtattgagaaagctacatctaaactaaaattcacagaaaaaactgtattgaaaaactaacttagattggtcgttttaacaagcaaagacatcaaggttgtaaggaaagcatggaggatgactgttcaatgtgtcatccaatatcctctttgcctcatacttcatccaacgattaattttttcttctagtttcctttatgatgctttccactatggatatgtctatttgcatcattttttcgtagaaacagtaccaccacatccttttatctctcttaattcagtatctacaagatacataaagagtaatcataaaacatattaaacaaggttacaaactcaaaaacatgatgaacatagcaaatgctgcttaaagaaaaactttctaactattttagaatgctaaatattaatatcaatggaaatcatcactggaaaattgtcgtcggagtcaccaacgtcggagtcactaccaccacctcaatctttggccatttttacttaccccttttcttagtttcttattttttcttatttcaattaaattatcaaaaatattacaaatcaccctcgtgggaatgcagattattattttttaatatcacaaacaacaaatatatgattgcaactattatcctcaaaaggaacaaattagattataaattttaaatagtttcaacattagaatattcaagaaaaaggctgaatctaaatttgaacatttatactatagaaaagtcgaggttatttgcttctcaaagcgtctacataagatttaaaacaaccaatcgagattaaccatctcgctaattaacatttatgaaattattcttatttttttatttttttagatttttgtaaaataggaaaaaccaatatatgaaataaaaaaaagtatttgaaaatatggaaagttttctaaacattttgttaccaaataatataaaatgtatcaacatgtaaatttctattttattaaatttataaacgaaaataaataatttattattagtctctctaaatttattagtatttcatctttagttacaatagcaaattataataactatctcattaaatgtattttcaaatttctcttccttctgatctgcaaaactttcatatctttaaaataacaatcttgtgtagtctttgttttaagttacaaatttaacatgttctgtgattaagaaaccaatatctaaaattatttctatgagtcggaacaaaaaacaaactaaatttataatttaaaatagctggaaaaccaaatgacggtttctttaatcaaaaaacatgagcagcttgatatgtttcgctataggctttaatcgtttcatccatttatctctattctttttttgtgaatggttttggaacctccatccaaaccatcttcctcctcatattcatcagcatgatcgatagctcaaaagatctttttataattgttgttgtgtatggagttgaggatttggttatgagcaatcgtcttcacgatattaacttttgttcaatcattcattggccatgaaaacattgttcgtgtgaattttttgctgactcgttacaatcacaatctacgcatatcatctctttatatttgtgatgaatttgaataatcagtctttgctttagttcagaatctcattcgatacgcttgttaaacaaatgctaatcgaaacaagtaagcaaaccaaaaaggtgtggacaagtttttcgtatggttgattctagcgacgtagggaaagcggcaatttggagtgaatatgtcttacttccatccattcatggcagtaatattatgttctaattgactagttgatacccttaaaatatgtataatctctaataagctttcttctttatttctctacataatgaatgaatttcatgatgttcacattgctaagcatgttttaggtgatatgatttgcacataaaattttttcatatgcatatgttttgctcatgttttgcatagttatgttatgcataatggacgcatctatatatttataatttacaattcattatcatgtaaaagataagtttaaaccatgattttttttgtaagaaatgttttaccttttctcttcctagtgattttcaaaacttccatatctttttttttaaaaaaaatcttgtgtagtttatatttaaatttacaaattgaaattgttatgtgattaagaaatcaatatctaaaattatttctatgagtcggaacaaagaataaattaaatttgtaatttaaaataggtggaaaaccatatgacggtttctttaatcaaagaacatgagcagcttgatatggtttcgctataggctttcatcgtttcatccatttagctctattctttttttgtgaatggttttggaacctccatccaaaccatcttcctcctcatattcatcagcatgaccgatagcttaaaagatcgttttataattgttgttgtgtatggagttgaggttttggttatgagggtaatcgccttcacgacattaacttttgttcaatcattcattggccatgagaacattgttcgtgtgaactttttgctgcctcgttacaatctcaatttacacacatcatctctttatctttgtggtgaatttgaataatcagtatttgttttaatttagaatctcatttgatatgtttgttaaaacaaatgctactaaaaaaaagtaagaaaaccaaaaggtgtggacaagttttccatatggttgattctagcgacgtaaggaaatgcggtaattttgagtgaatatgccttacttcaattcattcatggcagtatgttatgttctaatagactagttgatacccttaaaatatgtataatctctaataagtttttttctttatttctctatataatgaattaatttcatgatattcacattggtaaacatgttttaggtgatgtgatttgcacataaaggttttttcatatgtatatgttttgctcatgttttgcatagttatgttatacataataaataattcattatcatgtaaaagataaaaccatgattttttttgtaagaaaggttttactttttctcttccttgtgattttcaaaacttccaatctattataaaaaaaaacttgtgtaggttttattttaatttacaaatttaacttgttctttgattagaaaccaatttctaaaatctatcttattatataaagtacagttttgaaggttagtaactcacgagatcatgacaagtctctattttagcgattttagattttgatacgtgtaaaacttaatattaaaatttttgaaattagaaaaagattgaaaaaaattagaaattttaaacaagaacatacatataagatcatagtagcaagttctcttgagaaatatatatatatatatatatatatatatatatatatgcaaatataattaaaattggttatgtcaaacgacaattggatgaacctatggataatgagataacttcatacgtggttctttttttgaacttcggttgtatatacttcggtttgatggtatctaaccagttaaaagtatgacgatttgtgttgaaattgtggaaatagttgttctttttaaaaatatcaatttcaataaaaagaaggaaattgacaaggcgtaagaaatgtaataaatttaattaatgaaaagttttttgtattacgaacaaattgataccaaaatttaggtcagaaagagggttgatttccatctaaaatgatggagaaagagaaactcggttgatagcataacacaaacttggattctcaaatatgacaaagaaaagtgagaaaacagttatgacaagacttttttatggcaacgtttggttcatatgtagctagacttgatgacgaggtgtctggtattactgttttgaggttgaatggtgggatatagatttaaacgtctttttgtgtgtaatttatctaagctttttcaattggttcgagaagatttattctaaagttttagatcttatcagatatgtggagaaaaaaaccgaacatccgaataaactcgaaatgtctgaaatttggtagagtattccggagacatggaactaagggatcgaatttcgagttcataggaataaaccaagtcgtttcgatatttaattcatatgcttatggaattaagtttggttaaggttattaagtttaaatttaatttttttacagaaaagaagatgaaaaaaatgagaaagagtgaggaacataacgaagaagaggaaaatgaagagtataacgaagaaacggataatgaaagtaataataacaacgatcataagaaaatcgacaataaagatgacgaaaaaaatatgaaaagtaagaaacgatgaatgtgaaaagaaatacgaagatggtattggcatcccattaaatatgatataagattatttataattcttttgatctaatttgactcgtacacactattaagttttataatttctaatatggtgtatttgaaatgaaatttttattttagaaataatttaaaaactctaaacaattgtatataattttcaccaaaatatattaaaacaatatctacggatagcgtgggttcaatacctaatatataaaaaattaaaacaaaaaaatttatctacaaccaaaatttgtattatagtattatattttatcagctaaaccggtatcaaatcatttaaattagatatcttttatttttgtccacaaaaaacaaaggtatgtattataatgaatattaatatttataaatagaccgaaataaaaaaccaaaatctaacttcatagatagttcatacttcataccaaacaaaaaattacaatatttaaataaaaagtaaattcgagtttcgaattgattatgttggtttgattcggattagatcggaaaatcaatttttggtagtagtatttaatagacccgatctgatccggtagtaccggttcgaccaaccggttcaatatttattagattaaaaccaattgtcatcttcttcttcaccaatcctctttctcaattcaacttctccgatcagatttttttttgctttcaccgttcataacttctcaggtcagttttcttcctctttcactttcaaattcgtatggtttacgaatcttcttcgctattttttattcagatattcccctccatatgttagatctcgaatttttctcgaatctcccataatttacttgaatttagggtttttgaatcgacggctcatcactaagttttgcttaactttgttgatccgtgtttttgttcatcgttttcatacgcaatcatctcttgacagaccttcgtgtaagtaacatctccatttgttgtctcatctttgaagaaatctgggattattgcttctagtgagtgagatataggaatctagtgaaaaattacttagcttcttcatagcttttgttccatgttgtctgctaaatgtgagattctattactgacttgtgagattagagttttaacttggctctgttggatgaagaaatctgattgctttaagcaagttatgggaagcttagtgaagaaattagcttcttgataggttagagatacttcgattctgttttttaattttcttcttagtttgagcttttgtggtaaactctcaaactcatattactgtgtttgggggtattagaattgagtctgttggatgaagaaagctgggattttgattacttctaatagatttagaaagctttagtgaagaactgttagcctcttgataggttatgagtttctttggacaattctagttgcttttcatttcttctcgatttgaagttttcttctattgagatattaggatcttgactttggtctgtgtggtcattgatacagaaaggaagagcttgtgcgtgtaccgttctcttctccgtagattgacttgctctaatgatggaggtcaaattatggaacgacaaacgcgaaagagagatgtatgagaattttgcagagctttttgcaatcatcaaagccacagagaagctagagaaagcttatataagagacctaatcaatccttcagagtacgaatctgaatgccagaaactcattgtccacttcaaaactttatccgctacactcaaagacacggtgccaaacattgaaagatttgcagacacatacaaaatggactgtccagctgctctataccgcctggtgacatcaggtcttcctgccacagtggaacaccgagctaccgttgcagcatctacgtcgaactctgcatccattgttgctgaatgtgtacagaatttcatcacttcaatggattctttgaaactaaacatggtggctgtcgatcaggtttatcctctcttgtctgatctatctgcttctctcaacaaactgagtattctaccgcccgatttcgaagggaagacgaagatgaaagaatggctttcgaggttgtctaagatgggagcagccgatgagcttacggaacaacagtcaaggcaacttcactttgatctcgagtcatcatacaactctttcatggcagctttgcctaaagctggtaattaagatcaatgtaggttacgtttcttgtttttgtttttgtgtaaaagtctttggtttagtctggtttagtggtaattccaagagaattttacacgtttgaggagttgaatgtgcttatgtgtaccatattttggttatatgaaagttttatctaaaccaaattactattgattcattactctcacgggactatatataattgcagatttgtttgagtgaattaagatactgtggtggactatctaacttcgaggtcgttgtgctaagttcaaacaaaaagagagatagttaaaaaatgtgaaattacatggatacaaagttcagtaaaatctctataaatgagtaatgtaaggaccgtgaaattttattaatttgaagaggtattaatatatcgataaattaatattatatatatagagatttttataatttagtaactttttaattatagaaaatattgttctaaaaccaattacaagtaaaaaataattataatatcttgaaaataacatcaaaatttttttgatacagtaaaatattagaactaaatttaaataagaacaaatatgaatttaagcaaaaaaaaatattataaatatatttcaaataaatttcttacatataatttatatatataattgatacatttatataattattaacttatgatattgatggaccatatatatacataggactttcaaaaaaaaatattatcttaatttttttttgttaatttatatcttcaaattgtaggtgacattgaaggtacaacatcgatagcaaccagctctcgagtatgagaaaaagttgtttagattttttttactacttttgtatttctgtttcaaattagaaactttgatgaaactctcttttgtataatcttttaaattattaatgtttgagtggaatttgggtttataaatttgttagaaactttgatgaaagtaaagaattaaatcaattaaggataacaaataaagttgtttatacaaaatataaaatacatataacattgaatatatatatataatacaaacaataaatacaatttaaatatatctatataaattttgggttcccaaaggttgttctagaacacatggatttttctaagttttacccacaaataccaaaactcattcgggttttttgaatctgggtttttttatgggcatgcttgttttgggtttgtcctgagctgagttttttttacccaccacaacatccctaatcacaagtcattattttagatattttaagtttgagagctaatctattagttataagtactggaaatcaattacaatccaattgagaagtataaaattcattttcaatgggtaaaaccatcattggataattttattttgaaacctaaatagattaagaacatttagtttaaaaacttatgtaacatcttgtacatgatttgatttttttacatatatttggtctaaaacatgtaaaaaaaaaaaactattcaaagaatctatctctctattagttcaaatcattgcaaaatatggttacttaacatattaatcattctatttaatcaaattgcaattctaaaatcacgagtagtcgctaaagacaggcaaagtagtcgtaaagcaccattcccttgtgacgtttttttatgagtcacaacccaatatttatgatttctgaactttaagatctaaatacattagtaataagtattttgaatattccagggtccaattttgaagcatatcattcattttaagaggtaaaataatcatttagtcttaaacatgttcaattaaaatgttgtgaaataatctatcaatgtattattgtcaaatcaatgcaaaaatggttaattgacatatgaataattctttttgatcaaattgcaaattttaaattccgtggagtccttaatgagaggcaaagtagtaataaatttaagactcttttgcgactatagtgaaattttaagaaaaaagaatttgtatttttacgttgcaaaattatcgtaagtgagtcgctaattattgaccattctccgacttaatgcaagtgtcgtacattggcgacaaaattgcgtctataagtttgttagtcgttaagtagtcacaacctaataacaaaaacatcgtaaatatgtacgaccatgataaaagtcacaaaaaatagtccttaaatacacgtgatatcgccactagtaagacttttttattcaccgtctaacccaaaaacaaatatggaagatttataaataagctgatcattttttttttcttcttccttaattcatttttttttcttatttcctaatttataattcatttataaatatgaaatatttccacactttttcaaaaactttaaaatttaactgttattcccacgtggagaatcaagtaatcgccgtcatccttcattttaacggaatccaatgagtacactgcacaagtcaaccttcctcactaagttacaaaatcttaccgttcaatatccacgtgtcgcacgatcataatcaaaacacaccgattaaaccgtgatctttatttcacatgattctccacttcaccgtatataaagaagaaaaagaagccgtgttaaaacccgacactaccctttttaaaagccagccgaaaacgaccgaccgaccacgatcaccacttcatcatttaaccaatcaaataacgccacgtgttatttgctttttttttcttcttcttcttccttaattttttttttcttgtttcctaatttataattcatatcaaatcttcagtctcagattctctctccccaaaaaacgattcacataatctttttgttttctacttctgttatcttctcttggattttgctttatacttccattagcttctgaaaattcagtttaagttatggcgtatttgagtgatggatttgaaatgaagtcgactcgtgagtatgagagattagggttagggtttgtgaggtttactagaggattagggaggaaaaggattctcatatctaaacgagctccggaaaatgattcgccgccggtgaagagaccaagtcatgaaacgacggaatcttgtaggtctctgcttgaaactctgcatcaagatattttggtaagttcatttattaataaatctcttttttctccttaattgtgattagttttggggatttgattttgatctgataagcagattcgagtactttgtcatgtggatcacgaggacctagccacactaaaacgtgtatctaaaacaataagaaaagctgtaagttttttttcaagattttgaatcaagaaaatgatcgatcattgaattctttctaattaagcaataataatttaatgttttttttaattgaattttatgattttttttaggtaattgaagcaaagaagtcgcattttgattatagcacacctaaaaagagattgccatttcgagacgcaatactaatccttgattcaaattcgaattccagtagtcaagatgatgaaatggagcctcctaatgcaccaattcgaaggaggtttattaatcgagaatcggatttgtcgaagatctctatggtattgtttaaatgaagaagaaaggtaaaaaaaaagaatcagctaattgtgcagaagatgaggaaagaacaagacatagaagagtttgcttttgcttcaattctttatcattgaagctttttattatatttactgaccatgtgaatataaccaattatttgcagactttggaaggttatttattatttgtgaataatttatttgttttgtgatcagagtatcctaagtattgattttgtccttttcaattaaatattgttaagattcttttttaatactgctatttcttgactttcttctcctatttgtttttaatgcaagtgaatgaatctaaaagtattgcttatatgaacaaatcaagagtaataaaattggtcaaataattaagaagttaaaaatcaactcttgtacatattgggtttttcattttaaatgagtaaaaatacaatgtaatgacaatttattaaatgtatattgttgcaaaatggacatatcggggatgcaaaaaagtacggtacggttctaataataacaaacatatataatttcgttactatccgagttgttttgcactgtatgaaacagtttttattcaagatcattatgttttctttatcaacccgtcacatttcaacataacaagatcctgctaataaaaatcatgtgaacagattttatagcattgttacgtttgtaagtcaaccatgtttcaacataccatgttttatcgacatcacacaccgaataaacaacttacatgttactttctttttaatctaatgtaagtaaacatattgaatgaatctaaaaaagtacttatatatgaataaatcaattgtgtgtcagattaaattattatgcagactttatgtcatataatgcatattcactccgatcaacagctcaaaatggattgttttttatttaatacattgctctccacatgtggttgtagaaagtaaagaagagaaaagagaggcaaattctataaattagctaaaaagtagcttcacttcacgaaagttctctcttatatatattacaaacctcaccgacagctattttttgttatctggaaagttgtaaataatcgaccccatgatccattctttttttcatgttaaaaaaatgcaactaaaggggctttaacccgaactacgtggatcgaacctaaaccatacaatcttgtaaatttaaagttttgatcatttcgtgtggaggttcaaacaaactgatgacacatggtcggtcgaaaatagttctaacgtctcatgtggtttttacatttttgtggcatctttatcttatacatccaaattccaatgttggtcaccgatcatctgcatttgtctttacgtcttatgacccaaaaatggtcaatcatagaaacatagtcaaccaactccttgccgttgagcaactcaaactcatctttttcgtgccggcgaaaacctcggttatgaaattattttcaacgtcacctcatctttttaccgtgtccaatttgttttccattgatttgtttatggaagatcatttgactagtcttaacctcacatgtttcagaatgctcaatagtatttgttttaaagctctcattgatttaccgtcgtttcaccttatctatcatgttttgatatgggggaatgtctcttttatttgcattttaaactttataatctttgtgttattttttatatatttggtttgatttaaatgaataaaaacaagtctttatctaaacacaaaaggacccaaaaatggtcaaatttgggtaggtctaagagtgggttgtcaatctccaactaaccatgttttgatgtcccaacaagctcttgccttcagatttgctagtcctaattattctttgaaattataattcataataactaatgacctaccaacttcatcatcttccactaatctaccgagtaacatgttaggatttagccaaatgtcatttccttagttttggttacaaccacaataaaaattattatagtaccctatatatatattatcattcaaccgtagaacatgcacaacgttgacaaaataccccaaaaatgtcatttcctttgttttactcttattttctaaacaggtgattttggattaaaggttacttaattttggattttattataatcgtcatgtaaattttctaatggtcaagagaagaagacttcaacgagaaacgacttttttggcattgaccaacaaaaaagtgccactaaactaccatcatgggagtaattacaaaagctttgcgtagtcaaacattcggacatcaaagacaaaaagtacacaatataacaattttaggtggaaaaaacaaccaaaaacaaaaatttgacgcgttttcttgttaacaggagtattggttaatacttaatagctttaactatgcattgtaaaaataaatcataaaaggatcaatgacgatcttgattgtttagaaaaaaaaattatttcaaaaagatttattttttaggttttcaatgcaatagttattagttataattgataaattgtaaactttaatacaaattattgaatatcattggtttagagttattgaaaattgtaaatcacaaagaacaatacatttaaaaacaacatttaatatgttttcttaatatttgtgtttttcctaaaagattaaacaaaaaagaacagaaagaatatgaaataagaaaaaatgcactagctttttttgtttgagttaaaaaggactatatttattaagaggtaaatagtatatcatttttacatgttttaacgctatgtaaacgtgattaagttacttgttatcaaataatcaaaattttatgattttcatgtttttgaaaaatgatattgccgtatactgtgaatgtgtaaaaatataggtgaaaaaaacaaacgccaacaatctattatgcttaataatgactcatatataagaatagtttgctcatttcttatgctttgttaattgttgttgtatgctaagagaggattgatgtttctagtgatgtgctaggaatgttctcatgtataggatgtatcggatcttgaggttaagaaatagagattcacatttccattcttaacacaacataaataaggattaaggctaatgaaaaagagttcacatattacacattttactaattaatcatggtgattagataaaggtaacaactaaaagtcattttaaccgcactcaatattacgagcttgttagaacactgtaacacaagtgttctcttccagtttatcaatggaggaaactggtaaaatcccatggacgatcttcttctctcatcctctgttctcttgtttcatttcactctacactatatttcttctttatttccctcaagattctcttcgaattcttatttcccatgtccctctcctcatcggagctttcttaatctcctgcctccatctcgggtcgacccggaaatccattgcccgacccggaagcaatgaggattcgataggacctgaactcaaaacgggtctcggtttaaacccggattttatggaatggaactttaaattgggagctccattggaagttattcacaaagaagaagaagaacagtcgatgacgggtgtaaaagatccgacccggttcgtgatgatcaagaggtttccatcgttatcgatgtttaacccggaatctgattccgaattggaccgcgatttcccggttatgagtgaaaatgatccaacccggttcgtgaggctggaaaggtcaattaaaccggaatctgatatggattacgactccgaattggacaacaatttggttattgatgtaaaagatcgaactcggttcgtgaaggtggagatattcccatcgttgtcaatctttaaaccggattcgaattccggttcgccggagaaattgcgttgtatatacgaaatcaaaacggaaacgctttttgtagttttatattcctggagaacaatattctaacaacttgttttggcagcaatattctgatttctgagtataatttgattcgtcaagtaaaatctaattttataattctcaacaaacaaactcgaatttgatttctctaatgtgtaatgtcgtcacgatttacgtataacatattaaaagttgtcgacaaagaaaatgaaatacatttccaccaaatataataagtaacaacatggtcagattcagagaggacgatctggcttggccaccaagattgtttgacaagtatttatttaactactatactttctcttccacaatattaataatgttttaaatgtcattattaatacgtgacgaaactgtagctctgaaataaatatattaacaaaacaaataaatattctcaaccaatcataacctcgtatttgtttttgtttccatttaaattttattttgactcgacttttacacgcatgccacgtggtcaaccaaaacgtatgacaaactctacttctccaccgtcacaatcatctcctggccccctctagatctctctctcttttcctccttagattaaaatttctccaggtttcttggcgttactgtgtgaaaaattcttcttcttcttcttctcagcgattgaatcgaaccaagagcgaaaatgagaaatttcagtgtcttcgagagattctctaaagcttttaaagatcatccttctctcaccaggattctcgtcgtctccacgatcaggtcttcatcttcttcaaaaacgattctcgtagctctctgtttttttcttgtttctctgttgttgaaacctttcaattctctacctggaaacgtacgaacaacaaattctccagggaaaactatctgttgaatagattctttaggttgtatcatttacgcaacacttgcttttgttaaattctgaatctcccagtttatttcaggaagaacgcgtttcataatctgattcgatgaaactcaatcatctggattttgcaaatttcgttttactgtttttgcttatatgtcctggatcttagagtactggatctctgattatttgattgtgtagtttttaaggttttgttgtgatctgtgttgactgatgtgagattctgtgtattgttatagtggtggtggacttatagcgtattctgaggcaaacgcatcttatggagcaaatggtggtgctgttgttgaaactggaaccaagaagaagaaggtggtgctgctcggaactggatgggctggaactagtttcttgaagaatttgaacaattctcaatatgaggttcagattatatcgcctcggaactactttgctttcactcctttactacctagtgttacttgtggaactgttgaagctcgtagtgttgttgagcctattcgaaacattggaagaaaggtaattctgctgtaaatatggctaactctaaatggaaattttggttgaaaaaatagctaatgcacattcgttttcctgccttgacaaatagaagaatgttgatacttcttacttggaggcagaatgtttcaaaattgatccagctagcaagaaggtttactgccgatccaaacaaggccttagttcaaatggaaagaaagaattttctgttgactatgactaccttgtaattgctactggagctcagtctaacacctttaacatacccggagtggaggagaactgtcattttctgaaagtatgttctcttggctcttaattccttttcctgctctacttggtatgcattgatagtttaaagctgaaaagcatgtgaaagtagagtgatcatttgtaggatgttaactttctgtggctttaattggtttcattatgtgcttataggaggttgaagatgctcagagaatccgtaaaactgtaattgattcctttgagaaggcaagtctaccagaactaagcgatgaagagagaaagagaatcctgcattttgtggttgttggtggtgggccaacaggtgttgagtttgccgctgagctacatgattttgttactgaggatctagtcagtctctatcctagagccaagggttcagtgcgaatcacgcttctggaggccgcagaccacatcctgaccatgtgaaatttctttactctaaaatttttgatcaatcgtctccctataatttttggtcagacgattagaagtttcaggtttccataaaaacctcgttactaattcatggaaagcttttctttcacaggtttgacaagagaatcactgagtttgccgaagaaaagtttagcagagatggaattgatgtgaaacttggctcgatggtaactaaagtgaatgagaaagatatatctgctaaaaccaaaggaggagaggtttcctcgattccttatggaatgattgtctggtcaactggtattggaactcgtcctgtgataaaagattttatgaaacaaattggtcaggtaaagtaatgcgctttagatttaaactcacactttacaattttcaacatctcctagcaaacaaatttcaacaactcgctctaagaaattgtctttgtaatttcagggtaatagacgagctctggcaactgatgaatggcttcgcgtagaaggaactgataatatatatgcccttggtgattgcgcaaccattaaccagcgcaaagtcatggtaatttgacgcttctattgcttcccaaactctggaataatgtttttggattataaaacaaaattattagtggtttcttgttgcaggaagatgtttctgctatttttagcaaagcagacaaagacaagtctgggacactgactctcaaagagttccaagaagcaatggatgacatttgtgttagataccctcaagtggagctctacttgaagagtaaacgtatgcgtggcattgcagatcttcttaaagaagccgaaactgatgatgtatctaagaataacattgaactgaagatcgaagagttcaaatcggctctatctcaggttgactcacaagtgaagtttcttccagctactgcacaggtaattcggtggaagtttaggaatttaagtcttcgttcatcttcaataaatctcatttttgctggattcttatcaattagttatatgtggatttttaaggttgctgcgcagcaaggtgcttacctagctaaatgctttgaccgtatggaagagtgtgagaagagtccagaaggtcccattaggatgagaggagaaggtcgtcaccgtttccgccccttcaggttagtcctccctaaaaatttgaaccaatatctttgtcttattgttgattaaaccaaaccaaaactgtgacgtagtagatatagtgtgtaagcattgatccttaatgttacatagtttttgagaatatggaagttgagaggaatttccaaaactctgtctcaagatactactgagtcatgtgcattggaccataagggtgtaggaaagatggagttaattccttatattattaggtaagaatgaaaaagataaagaggacgttaggaagcacatttagtgagtttatgtagtttaatcctaattttgatttggttggggttcagattatatatatatatatatatatatatatatatatatatatatattttttgttggtttagaaccaacttgaaaccgtcttgatccgtttggtacaagtttaatttgaaggattttaaaagagatcaaagtttttgactgccgaaattgtggtttgaaggtcctttggatatagaaacacaataaaaaaattgtgaaatccggttttggtgtttggactcaaataatatttgggtatggtttggtatggtgacaggtataggcatctgggacaatttgcaccactgggaggggagcaaacggcagcacaacttccaggagattgggtttctattggacacagcagccagtggctctggtactccgtctacgccaggttaaaatgcttccttgttctgaaaattttaaaatgaaatccacaaaggaatgttttcaatttttacttaaggtagaaaatgtttggatttggaacagtaagcaagtgagctggcgtacgagagtgcttgtggtttcagattggatgaggcgtttcatctttggtagagattccagtagcatctgattttcaacctccaaggctccaatacacatatctctctctctcacgagttacactaactttctcatgaggaaaaagttttgattcactttaaaaaatggaaatccaaatcggcttttatattttgtaataaaataatgaccacaagtaacgaggagagattgcctcgtttcgttggccatatcgttgctgatcccgaggattgtactctctgtttttctctgcaaatattcttcaggttggctttttacctttatatcctctttttttgtaagctttttcctcaaattttgtttagtacgatgactaaaactgagttttgttatttcttgctctctgtttttctccttcaatatcatggtctttttttcttttcaaaatattggtatttttaatatcgtggattagcttaaaatggttttaacttgttatttattaaagatatggagtgactaaaaaattttcaattgttttatttatattaaagtggctaggaaaacagagaaattacataatcaattgttgaaaagttgaatttgaaaaagtgaatctagaataagacttgtttttttaagtgtcgtcaacatctgtgacgctgataatatcagcgaaaccaactttcttgcgaagccggacaactaaacatgcggcgtcgacaccttctccgatcaccaccactttgtctttctcttctccttctattcccacaaacgtcactcctgctccgttatttaaacatgagaatatgagatcattccatcaagcgaattagaacgaatataatttgctatccatagcatcagtgccggctctaggggggtgccagaggagcaaaagcacagggtcattaaatttttttccaattttacttgaggttttagggtccaaaattttcagtaattaaaaaacagtattaactaaagccaatttctataaatcagcacaaggtctttaagaagtttgagccggccctgcatagcatagtcaaatgccggttcgatatatatatttggattctaattgatatcttaccagtggttttggctccgatcttgagggcttctgaacgacatttgtcgcacctcatacttaccgacatcaagattttctgctcatgaaaattccaatattacaaataataatactgctacgtatatacttcatcctaaaaccttccgtatatatgttagacttttagaatacaaatgtttttagcgtaccttggccattttggaacctcttggagaaaatgaaaccttattttttttgtccttttggtataaatgattactataatttacgtgtgtaaatatagaagtgcttctgtctttgtctcattttcttatggcacattgcttaacatgtattaatatgcatattttatttgtactattatttgctacgaaatcgcagagtaattttcatgcaactgcttcgtagttaatattagtataaatgttgacgtttaagtggacaatataaggtattgcttgactcataagggttagatttggttaggtaaaggttagatttttatcatgcacatctaaaaagtcagtaccgtgaggaccacgaccggtcctgaattataaaaggcccgaaaggaaactagtcccttatttcgtgtttctgaataaaacaaattattaaccttaaaaccaaataaaatttagcaaactgaaaattgtaaacaaagaaacggcactacatcctacttgcaaagaggtgtcgaacggaccggcccacaatggccattagttttagatggactgcaacggagcagtccgctaggaccgcagacaaaataactttctccaggttcgccctgctaaacccaacaagtttatggaccgatccgtaggcttagtttttatatttaaaaaataataaatatatatattttaaatattaattttagttatttttaatttaatttaatttttaataaatactttttgtaaatattacaatttaaaaaatttaatttcttcatattgttacatattttacatattataataggattcataattaagtaaaattaattattcttacaaattatttatttatttttattgaatatttgtagtctgcaggtcaatccgccaaaccgtgggtcaagtccactaaaatccgtaatccgttttggccgatccgcaagacccgttatttttcggatatataatatagtgtccaaacccgctccatcatggtactagcccgtgagtctttggcccgcttgacactgatacatacatagtttaaaaaaaaaaaagtatattcgggtaggtccaaaaacgggttgatcagttcgcgggtaaaaccggttcaaccaccggttaatggtttaaccgtcgttttaagttggttttgtttttcctcctgaaacgacgtcgtgtctctctctctccctctatcttttgcgactctcctcgtcttctctgttcgtctgccatatgagtccttcccaagcccaacttttctgaaattgaagtgagtttcttcccgaatcccttaaagtttcaaacttttcaattaacttattcctctttctcttgtttctatccgaatcgtgtgagggttttcattttctatgctctgatttggtctcaatcgatgtacgtttataatgaatgtgtgttctaaattgtaataaaaaatgactagtaggtactagttgacagctctccacagttgaaaatctctcttttgtatgaggtaccaattgacagtctttgagtctttccttgttgttttgttatcaagggttctgagctttgtgtctttaggttaattttctatgttgtgttatggaaaattggtcagtgaatagccaaaccaaagattgtgaaatctgcattttgattttggtgaaaaaaactgtatagaaatgtcttaccctcaagaaacttttatattgcataaatgaatagcttagttgttatagggtttggttgtttcaataacaaagaatagaatttggtttcttatactttataaacttccttctttcagtcttttgggacagagatggcattaattcagaaaccagtggtgtgcaaagacactaataagatcttcatgaagcaaatacttgcgtttactgaacaggtataatatagaagtgttcatgtatatctttctaatagtgtgctttataacttgtaaatcaggtcttttctgaatctctcgctttccatatgaaacctctttgtgaattacatttctagtttgagacaatgtcatgtttgaggtggttaagacgataagaacgttgacattttctgattgaaaataaaagacctggcttccattaactctgcattggatgcttactctaattattttctgattaaagaaagacattcccttaatttataggtgaccattacacagaacagtaagctctcgccacgcacatggcacaaggaagtgatataaacggactaacttgtagtctctttcccctgtcaagaattagcaaatcatccttcttttacttggtatcattgacttttttttttggtggttggggaacttaaatatgtgttttttggtatctctctctctgccccctcttcttggtatcattgacttttttttttggtggttggggaacttaaatatgtgttttcaaacgatttttgtgtgatgattttaggattgtgatggacagttctgaagcacatctagatagaattgaggcacagaggtcaacggatgtgtctcatgaccaacagaaaaaaagatacttcccaatgaatctgataaacaaagtcgcaagcaaactctgttcacgaggaggagatggcgccacgccacctatgggagacaatgaatctgggctagagttcctcaacaacctcaaattatcggatcttttccatctcccgggtgaaaatgtccagatgaatacggaagtttttagcggactgagtgatggggacaaagagtgtctggagatgttgaaaggcgttggaacgccaatggcatgtctcaagagcgatagaggagattcagttcttcatcttgctgctagatggggtcatctagaactagtgaagaacattatctctgaatgcccatgccttgtattggagttaaacttcaaggatcagcttccgcttcatgtggcagctcatgccggtcattcggctattgttgaggctcttgttgcgtcggtaacatttttttcagatagactggctgaagaagatagagagagactaaatccatatgttctcagagacaaatatggaaatactgctctgcacttggccattgaaggacgctatatggagatggctgcctctctggtgaacgagaaccagaatgcttcttttcttgaaaataatgagggaatatcttccttgtacatggcagtagaagctggagatgtgactcttgtgaaagaaattttgaaaaccgcaggtaacaatgaccttgaagggaggaactctaacttagattcaaagttggaagggagaaaacatcttgtacatgttgctttgaatgccagaagtataggtttatctctcgctttggcatttagtctgttcaaatttcttatgtaaaaccagctgcgttatgctaattgttgttcccaattgtttgagcaggtgtccttgatgttattcttaacgaatatccaagtcttgaggacgagcgagatgaagaaggaaggacttgtctatcctttgcagcatccatagggttttataaaggagtatgcaacctgttagaccgatcaacaaagaatgtttatgtctgtgacgaagatggttcttttccaatacatacggctgcagagaacggccatatcagaattgtcaaagagattctaaaacgttgtccacattcaaaacacatgctcaacaaacttggccagaacgttctccacattgcagcaaagattggggaacataatcttgtaaaatcgttgatgcgaagtgatgatacaaaacatttgggtgttggtcaagatgtggatggtaatacacctttgcaccttgctgtcctaaattggcgctaccgatcaattagaacgctagcttcggatgtaaagatactgcaactacgaaacgataacggcttaacagctaggggtattgccgagtcagtgctgaaacccaactacatctttcatgaggtatgcctgattccctatatcataccatttgatcacacattaatgattttatagcttggccatttttggattacagaggttgacactggcattcttattagacgctcacgcgtttaggggttgtggatctgttaagtcgttaacaaaaccatcagaaccactagaccatgaaaagagcagagattacgtcaacactcttctactggtagcagcacttgtagccacaatgacgtttgctgcaggttttacaataccaggtggctttaatagctctgctccacacttaggaagagcaactttgaccactgacccaaatctcttcttttttctgctatttgacatattggcaatgcaaacatcagttgcatcaatatgtactcttatatatatgggcgcagttgggtgatccatcactcgtttcatcatccttaaatgtggccttgcccttactgcttttttctctactctgcatgccattggcattcctttgtggtgtggttactgcggttgggcatgtgaaatggtttgtagtcatcatttccttaatatcggcgttcttcttctattgggcgaccagtatccttgccccccacgtcatgctacagctatcaaacgtttctcccgcgtcatgtgtttatctcgatctttgtatgtgttatcaagagttggtgtcaggatctcgatcgggccgtttaattcctagactccgtcatttgatgaggccgaagaaagattaagctccttaacttatgaatggccaaaagagtcaaatagtcaatgatcaactttaatttgtgtcaaaaaaaaaaagaatggcaaattaatagagggaaaataaactatttttgtttcacacaaagattctgttctataatttcatttggagaaattaaatttaaataatatctacaaaaaaattgtccatctattctttttttttggggttttctgcaaaataactctctaagtcaattttgtttgcaagtttaccattcaagtctgaattatgcaagtcaatcctaccatttttaaagtcacccgcaatacaaccctcccgtgtatcgatgacgtgacatcgataactccgtttgaaaacaaaaggattttgtgcaaaaaaaacctcaattttttttttttgcaagataaaccttcatgtcaaataaatacaggtcaaaccataatatgaaaaatctcctgcaacatagcccttccgtgtatcgaaacgtgacagtcaaaggaaacaaaaaaaagacccacctctttcgccggcaattcagtcctatttcacatcagcgattcagtccattcctcccgccggcgattaactcgagtcctctcacccttggtttagcctctggcgatttaactcgagttatctcactctaatcatcaattgctctcgaacccttctcgccggcgattaactcgagtcctctcacccttggtttagcctctggcgatttaactcgagtcatctcactctaatcatcaattgctctcgaacccttctgccggcgattaactcgagtcctctcacccttggtttagcctctggcgatttaactcgagtcctctcactctaatcatcaattgctctcgaacccttctcgccggcgattcactagtttccttccgccggcaatttcagtcgactcctcccaccggtgattgcatggttccttgtttgtctccctctattttttttttcttttcggttccatgcatctaccttttcaattttcaattcatgagagatacaattttcaattgaagtttggtttgattttgcttaaatgtgggaaattgataattgaattgtatgtatattgcaagagaagtttagaaattttgttttcgggtttgtgttcttgtttatgatttgtggtgtttgagttttgttttgtttttaggttgatttactattacaatttagatatgtactagattaaattgctaagtagattcaatctgtagggtttatgttattcgatttgctttgttctttaattgctttgtgatgattcttttgtagatgtggaataattattggattcattagtgacgatatgtatttgaaaatattagagagcattacttgagcaactacataatttcttgagcagctacatagtttctcttgttagggttttggttagtcataatgttagggagcatttgggtgttttagttttgttttaagtttagctagattctttgttggaatatagacaatttgaaggttaaagtgttcgggttcataacgtaattattggattcatcgtcctttgtgctgttttttgcagttgtagttatgactttttcggttgtttgttgtgtagtatttgcatattcggtctttgataactttcagacaaatgtgttcgatctctgttttttttttatcccctaaactttgattttgatgcatcaaagaaatggtttctattgagtttgtgtacaatgggtatgtttagttttgtcgttgtccattctgtttctatggagaagactaatccaattctcatatttggcttcttgttttgtctttcctcttcttgattggatcaaatcccaagccttacgaatccatgaacccatcttctgttgactctggtttttagatttagcttaggtttatgagaatccataaaaaaaggtggcggtggtaggttttgttcttatcgaggagttgaacttgatttggataaaaagtcttcctttttcttattgattagttactagtttcccttttcatcgagaacagattcatatcttcacgtactttgatggttttgatgaggtgtttaatttgacttctggagaaactaaagtagcggttcttgtcggatctacatgttaacttttacactttatggtctcaaaacaccaaacatttggttaatgaagctatatcgtgttcatcctctaacttgctaagtgtgttgtctattacattcaatattttgctgaagctaaagtgtgtactttgttttttcaggcttttgatctatattacgtctgtggtttatcttcttaatggaaaccgatgaaggcatcacgagtatgagttcaagtactttaagatacaatttatttttgtttctcatgagagctatttactaataactctgcagctattatctcttgttttattaatatataagtgattgttatgtgcacacattgataaggagtatccgaagcgcttattcagacatggtagagagccttttgttggaaaaatcaacaacttctacaaaacagcatccttcagagaatcaagaaagctttgccattagagtataaagaagtgaagagtgatcctcagtttgcacacgtctttgccatatttgaaagccgtttaggatactctgctcgtacggtgcatagcttaatgtgtagacagttggtaactaggaagaaacatgaactctggtttgtgtttggaaacaagcctcttcgattttctatgcaagaattctatgcagtgactggtttgaaatacgaagatgattttaggcatgatttagattcttagagagatgacaaggggttttggagcaagttgcttaagaaagggaacactatatgcattaagaccttcatggataagcaattatcagaagttcacatgtgggatgaagtagaccgggtaaggtttgtttatctgtgtgtgattgctgaatagtggttgctagggatgagaagaaaaatatcaaagtaaaatacatcaagttggtgatggaccttgagaagttgagagcatatcattggggtttacattcgtttgaaagttgtagtcaattccaaaaacagcaatctcccacgattttttcatcaaaaataaatctccactccttgttatcctacaatctccacatactactcctcacatagatatgcataatgaaaaacagaatacgagatggaaaaggaagaacgtgaagaagaagagatcaataatatggcacaaatcgactagggcacaaatcgtttgtttacaatttatttttgggcgttttttttttgtattctaaaaaaattagaatttgttttctaaatccagtaaaaatcgtaatcttaacagaaaatatactattaaaacgtaatatttaataaatatttactttcctttttcaaagattcactttctatatctaggaattctaaatagtttagaaacaaaattctaaatttggttagaatataaattctaaaagtgaaaatttcttagaaaacgttttctactgttttcagaaactataaaaattcttagaatacaatttcacacatagtttagaacatgaaggaaattttagaatacatgttctacaatttttagatattgaatatcctattttctaagttagaaagaaaaattgtctaaatatcgtagaatatgtacaaaatattagaatagaaattataaactaagtagatcactagaaatcgttttttaagaaatttagacaaaactttatctatcaaaaaaataactttttcaactaaataacaatttttttttttcaaatcaactatatttttttttctagaagatgttatcaagattaaactttttcaaaaatgcttaaaatatagagtagaggtattttgatccaaattggcattctccaaaaaaaaaagatatatatggacaaattttttatagaagtcctttagatttctattttctatgtgatgtaaaactaatttcctaattacttttaactcaaagctatttttatcaaatttaagtcactaatcactttagatccacaatattctagacttctagtaaaagaccacagggacgatgcttccaggagttgatattttctctgcagtaacttttggtgtgtgtttttaggggttttcgtaactctttctcaggaattttgataccataacacaatgctttgtccaaagaaagacagagaagggcttttttttgtttgtttgttaaagtgtgaggcatggcttggtgggtcaagtttagatcattcagaggagataaccatgaagagttctacacttcgtccattaacaaaatcatcagattattccttcctaattactagtcataccctaaatattcacttacattaatttctggtattctcttttggtagtggtcgctagatttttttgggtcaaaattaaacttcatctactttatttcagtaagatcatgtttcattgtgagaatgccagttcaataaccattaacacaatctcttgaccattttttttttggtttaattgatacttaaacaaaactcgaattggttcaaagctcaaattggtacatgattataagccaaactcaaaactgaaatacttgcctaaaacacacagattagcaaaaatcatcatcggtaatctccccaataaccaaatcaaaactagttttttcaacaaaaaagaaaattgtaatcgctatggctccgtagatcgtaaaacaagatccacaggttcctatcagtaagcgaaacacgtacatttgtttatgtctaatatagcgtcgagttaggatcattgccccaaaaaaaagagctaccttcgacgtggcatcagacaatttctacaatttagaagaaaacaaaaagaaaaaaccctcagcggacccttgtcaaatcaaccacacagcagacacagaacgaattcagtcacgctagctgttgtgtaaagtgtcatacggcacttcctatcttttgggattgcttcttcatcgggtttataacaatcaaaactcgtaaccaaacattaaacgatttcaagtaaacagagaaccaaaagaagaaaaaactaagatagaagaaaacgttgttgaagatatgagaaagagggagaagagaatctgtatttatatagagggtatttgtggcggcataacttaaagccctagcgtgtacgaggcggcatataacttgaaaccctaacgtgtacgaggcggcataacttcaaacccaagcgtttgatcgagttaccatatagcccattaagagcctatatgtattttgggctgaataaaatattattgggccagtagattgtggtagtagaaagagaagagctctaactacaaagactactagtctttgttccttctacgatgattgggacagaaaccaaaccattggttcaacaaatgtggtcccacgtgtggatctcatggctctagggaaaccacttggatgacgctgcaaggagttgatctttatgctgcggttccgttttgtgttgtgcatataatcttagagaaaggtactgtcttctcatgtactcttgttttataggtttttcctctcttttttaagaaaagtgtgtataattgtgttacaaatgttgcagatggagaggaaattgagtttgaatcaaacaaatcagagtttagtgaaggagaaggctctgttcatatcagaacttggggatcttgctgatagactcagcatcttgcagtctcctctacatctcattgtattgtcccctgtttttgcttgcacatgtttttgaaagtgcttaaaacattgtttcaaattcgcactgcactttactggcacacttataaggtgatattgtttatcacacactgtcaagaagttaaaaccattagatgttgacaggactgaacattagatagagactctgtacttctcacactcatcaaactaagcacatcatataaagagacaacgatgacaaaagtgaatcgaaagagataattgcaatagagaataagttcgatttgttgtttgaaagaaaagagagatgaaagaaacggaaacatagtcgatcaattatttatcagaggctgtacatggccccaaaacataaaccaccaaagtactagatgaaacgatacatgaacttggttcagtaaccataagagagagagacaaggtttagaaaccaccacggagacggaggaccaagtgaagagtagactccttctggatgttgtagtcggccaaagtacgtccatcctcaagctgctttccagcgaagatgagacgctgctggtccggaggaatgccttccttgtcctggatcttagccttcacgttatcaatggtgtcggagctctcaacttcaagagtgatggtctttccggtcaaagtctttacgaagatctgcatacctccacgcagacgcaagaccaaatgaagcgtagactccttctggatgttgtaatccgccaaagttctgccgtcctcaagttgctttccggcgaagatcaacctctgctggtccggaggaataccctccttatcttggatcttggccttgacgttgtcaatggtgtcagagctctccacctcaagagtaatcgtctttcccgttagggttttaacgaaaatctgcataccaccacggagcctgagaaccaagtggagggtggattccttctggatattgtaatccgccaacgtgcggccatcctccaactgctttccggcgaagataagcctctgctgatccggaggaataccttccttatcctggatcttggccttaacgttgtcgatggtgtcagagctttccacctcgagggtgatagtctttccggtgagagtcttaacgaagatctgcatctgttaatcagaaaaaccgagattaatcgacaaattcgatcgcacaaacaagaaactaacaccaaatctagataaaaatcacagatcaaagcgtaaataatcgagaacacacaaattctttcaacaaatcggatcaaatacaaggaaacaacaagaaaataaacagatctgcgaaaaatacgaaccctaatcgagaaataagaagagatctaacgatgaaactatgtaatttgcctccgatcagagattaacgagatcaaaatcaaagaacagagcctaaattgcgatcgaacgaaacaaatcgaagaaatacaataagaactcagaaatctaccttgatcacggttgagagatttgagagattgattttagagtttgagaaaattggaatctgaattgtgaagaagaagagctctttgggtatttgatttatagaagcaaaaaagacgaggacgactcggtcggtcacgagaaagctaaggcgtggaagcaatagccaattataaattgacacgtatgtgtagggacgtgtacgcgttgttcacacgcaaagttgtttttggctaattgccttatttttaggttgaggaaaagtattttgtgcattgagttgttaaaaatttgatgtaaagatagtttgctgcgagacatatactgaaagttgaattaccattagatgagatcattagataatctggataagtatgccaagaagttctctgagttgaaatttgaattaagcacaactgagagacatatactgaaagagatgggttttgtttgtcatgttgaacactagaaacacctccggaattgaggcaagaagcttggaatttggctaatgatagtctgcgtacaaccctttgtgtaaggttcacaagtgaggttgtggcttgtggggtcgtgtatgctgctgcacgtaggtttcaagtacctctcccagagaatccaccctggtggaaagcatttgatgcagataaatctagtattgaccaagtgtgtagagttctagctcatctatacactcttccaaaggcttagtatatctcctctgtttgcaaggattcaggtggacattcagataaatcaagacatcactcttttgcaaatatccttttcatttaccaaacacgatgatctcctctgcaaataattttgggattactaagataattgatcataaatacaatcttctatctcgtcacacaacacattttgactcggcacaaaattaaaaaaaaaaaacacatacacacactttttggtcttggtggtctttaagtttcaagcagcgtctactcctccttgttgttgtgcaagatatctctctcggcgttgcttctggtcattagtacagaagataaacacagttaacatcagtatcacactttctttgttgtcttataaaacaaaacataaaaagaagacgagagtaaggcatgaaaagaatggcattcgtctctcacccattcatcgatcacaagcccttctccaattggctttggaccaacaataccctctgatgcttttttccgtgcttcatctgcagcatccgcttcagccaattgactcttcaatttctccatcatctgtaaagagagaggtaacaaagtttaaagaatcagtgatatctaggattgcttaaagcagtaaatgatcccaatcaagttcacaaatgatggcgataagaaccagaaaaagaagaagaagcggacggactcacggagttagggttttcgggatccaagaataccacacgcattacttgctcctcagagacatgatctttttgctcctcaaactgcaaaacacaagagcatccacacttcttagaatccaagaacaaaagtcttattttatcttatcttctctgtttctttctgaccagtagttactacaagtttcacataccagctcaggcatatagtctgttggaactttcatcttcaagctcatgattttaaacttaaccccgctcttttgttccattggcttttcattattctcaggaggctcaacaaacttgaaaactaaagaattcaacaagacatagaaacaaacagtcaccacataatcatcgaggccaatgataaaaagtaccctaatcaaacagtataaagaaacatatatacaagagaagcaaataccagttgcgataatttcttccccgggagcaagaatagcaccagccgggcgcatgaagcaactctttggtactgttgtttgaaactgagtaaaccaagataatcagcagagataaacaccaatgacaacaacaacaaccataatcaaaacgtttttgaatccattacaaaccttaaacgctacatgtgacttgctcgtattcttaatcttaatggcactcctgacttgcttcccaggctcatctacatacaaagttcataaactaaatcactaatctttgatcatcaataaagagtgaatcttgaaattgacaagactccacattttattcctaaatttgctcaatggctttatacagtttatagtaacgtatcaataagtcaaattacaagtcaacatcatcatcaccttcaatatatatccaatttcatgattcccaaagataaagctaaaccagttaagtcaatatcaacactatgatccaaaaaaaaattcgaaattttatagaattgatcagtcaaagtcttcgatgagatccgattaagagtagaagaaactcacaagggaagtaaagttttgctgaaggatcaagctttaatcggcgttttgttggaagaagcgatctcgcgacagatgacatagaagggatcgtggcggcggattgatgatggttttgacccaatccttcgacgacaggaggaccgtgatattgaaaatggcgagattgatgaatgtaattttgatttagatgagaagatgttacagaagaagaagaagtagccatggaagaggacgaggaggctgaaggagcttgggaattagagtttcgaaatggaagtttgaatttgccccaacgtcgaccatcggaatctgatttgtcctccgttaaagccatcggagaatcggacgcgagagagggaaggattaaagtggatttgattgggttagtgtttttttattaagcgagaaagtcatctgaagtggagaagaagatgaagagctaaaacgcagatagtaatagcgtttaatacgatagcgtttggattcgcttaaagcttactttttggttgttgtagtgattgcgttctgaaaagcaataaaaacggttgagttacactcaaaaaataaggcttgggtttttgggtattcggattggggtcggatcaggttcgagtcgagttttttgggttcgggtattccaaatttagaaatctaagatccattcggatattgtaagggggtgttattcgttaatggattttaatagaattgaaatccacactaatccactgttatttaactaatgattctaaatccagctttaaaatctagtgttattggaactcatatttgtaaatcatgcttaatagattctaaagtttggtgttattcaattaagatttgaaatatttcattaaaatccaatgttattcaaaactaaaagacttttaaaatctttgtatattaattgatttgaaatgaaagctctttggagtttcatgagtaaatcattaaaatcaaaatccaagacatattgcagagattttgaaattcatacaaacatattcttaaaagcaatatcagaaaacaaatctaaagcttaaataattgactttaacaccataattgaataacaccacctaagactctaagttagattcggatctgtttttcggattcacccgagtatccaaaatcaaaattttgtatcaaaatatttaaattacttaaaaatatataaaattttctaacaaaatttgagtattttctatccaaatctattgaaaagtaggttaagtatccaaaatatacaaaatattttaaaattcaaatattttaggaacttaagttgtgtaaatattattaaattatttttatgtatatattttggatatgttcggatacttgatcgggttcatattcggatcggtttcgaattcggatttttgagttttgaaatttgtgatccgttcggatattttaaagttttgaattcaagtttggatcaaaaatttttatcgaatttgattcggttcttcagatttagatattttgcccagacctatcaaaaacgattaaaaatgcgtcaaaaatccgctgtaaatcttcgcttagcttgataaataattgtaccattttaacgttatagcttgacaactccaaactatatgaccatctcacatcttacaaaatatcttgttatccattattataatcgtaaatgtagacttcaaacaattctagtatcaaccaaaatggaccaaatctacctatttcagcatttttatttaggcatggtatgacaatttgctgagtttagaatacaacttttatatatcgatttatttaacgatttaccaattatacattatctaaaaatcgacttattaaaatccaaaataacatacttattacattttgagtcatcgtctttatcaaactaatttttttgtataatctatagttcaaatccacatgtaaatacatgatttggtgaagacaaaccattatcttcattgatttacttttcattttatacatgatttacataaaacacaaagtacaaagaaaacgaaaaaaaaaaaaaactattcacagagaaaacaaaaatccaaaactcaaaaacacaaacagaaacgttttggtttcgttttctcatctattattttctcaaccagatctaacaagatccccaacagctcagaaacatcaccgtcctcaaagattcctccgcttgcctcagcctctcactcgccgccgcaccaaatcgactcgattccagatctcctttaagcctcctcaccgacgacgacgacgacgcactctgtggagacgagaccgattctttgacggcagatcttaaagtcgtatctccgccgcttacaccggtaacactcttctccttcatcaacttaccggaaaactgactaatcactctattcatccgattataaaatttccgatccttaagatttttttctgctgatttatggcttttcagattccgaagagagttttttcttttgtgaagagtaagagatgttttgtttatatagacggagaagtgagtgagccatatgatttgggaggagctaccggtttagacggtaataaaccggaggcttgacgaataattggattactgttggataagtgactgacacgtggcggttttaggaactttcgcgacatgttggtgtgggaactgtggatatgatcgaagaggaatggatattttattactttaattcatttttgtttatttggaaaagttatttataatatctgtgtcgttttccgttggataattatgaatcataagatgttttttactttgacgaagaaattaggttgtgatgtttcatttaatcgttttctagataacgttttctgtttttgcttcactttgtcgtctaatttataaattctttttttgataaggttgtctactcgaatttgaccaagatttttttactatttataaaaatatgtcaatcgtgctttttcttcaacgtgcattttatactaatttttcaattctaaatcatctcgaaagtgttagggtttattagattgtgtatagtttctatactaagtatatttgtacataatagaagtcattaagggttcggtatagtcccggtttattcattctaattaaagtgaatctctggtttatttttggtttagttggtttgttgtctatacattgatgtaacaaactttctgattcattaatgagaaattgagtttttgccatgttctctctcggattcatggttcctattagggttcaatgttataaactacaatcgttttcatgtcattttcttgtattgtaaacaacgtggtggtagtctagtagtaaatttcccatatggaggtgttgggttcaaggtatgttgggaaggatctatttttcaaaggagatgtatttaatctagacttattagaagtgttgggttcgaagcatgctggaaaagatctcttgtctaaaaaagatgaatttaacctggtataggtctctgtctttggaagatataaggcctttgaacttaaattttcagatattaaaaaaaaaaaaaaaccagaatacgtagaaatgggatattaaatgaaaagaccaataaaaaaaagaatttggggtccaagcttgtctgccactgagttgttttccttttatgtatatttgttgttgtatgcatattgttgatcaattttataggttgtttagaatttatcaccatgattatctatcggattctctacaccataagtgttctacgtacagagccaaaagcttataataagcagataataacctctttcatctcatacaataaaacccgagcttatatgtagaccaccacgatggaaaatgccatcgtataattagatttgtatcatccatttgatggtgtttggtcgtgactcgtgatggtgatggtagtttaggtaaagtatgcaagttgtcacatattcgagtagcttgcaactattgtatttactcttgtggatttaatccaaaaggttcccatattttacggtttataattagatcattctttatttgcaaactctccattgctagctagaaatgtagtcatgtatcaccatcctaaataaatatgtttttggccgagatttgcagagtctctccatgtaataccgacttcgcaacactcttgagaggaaatgattcggattatggaggaattgtgtaggtccctaaatccccaaccctttccgtttctggatccgaccgatgtttccatctaagccacataatttcagttttgcttttagtttgaacccacaagattaaaaacgaggacaagattccatatataacaagtggtcgtagcaatttgaattatggcataatatagaccgacatagtcaaagaagcgaaacaacataaccatagccacaaacaaataatattttctttatttattatatatggctttttcgtcaaaagaatcaaaaccacgaaattaataagctatagaacttatatataagccaacaaaaattatatcaccttcttaaaaacaatttacgctaaaatatttgataaaatagatcacttaaatggactagttttgctttgatgaaaatttgctgtgttggccaaagccaaagaacaaatcttctaaatatttagaaaattagtttagattttggttaggtgcacaaaaaagaaaatgtttagattttggtttaggataatctcaattgaaaaaataacttccaaaatgtgtatatatatatgttaaaaaaattaacatttttttcttttcaaaatagaataacaaaaaaacgaatatgaacacattgagaggaaaaagtttttttaggcttatgttgacacattgaaaagtctcaatgaattcattttattagtaatagatttaattttaaacaaaaaatagcacaaatctagtgtgtaacccttagtaatagttaaaaaacagtaaatgtaatgcaatgcaataaaaagggttctaagtaatcatcaatataagctaagcaagcaaatgatctgttcttatattcaccaatgtcaatttcaccaacttccattacaattttcaaacattagattatatctaggacctataaacatcaaagggtgctaagtgtagcgtagcggttttttaaaaataaatgtaatatcaattcgattttttttttttcaaacagagtgcaacgttttagtaaatgtttttatgatattatgcaaatcaaaactactctgccgatttctttgtctccaagcaaaccaagcttccatacatctattatatcttctatctccatgttcccatatagaagagatgtgatttcgaacctgtttgtccagatttcgaagcaattgcgctggtggagttggttcttctccatgcttctatgtgagcatcgaaccctcaagaacactaacgaaatcgatcggacactcgtgtgagattgaacacaaagaacttttaaaagagacacatatgattttacgagttcaggctccgataaggaaccctacgtctcgccggagatgtctccggaattcactaaaagcacttagctcaaaacgagctttctctctctacaatcgttctgttttctctctctcacttctcttgattcaacaaacttctgaatcaattgaatctacaaagaaacaaaatacttaaaggaaacagaagaagacgagtaaaggataagaaaatgccgttgagagtaaacggattggatcgctccacatgtcacgatctccttagctcgtcaaccagttgaccctgaaaccttctgaaacacttagagagtctctgatacttagcgtatagatcaatacttcttcaaatctccaccttgatctttatgctctgctgcctttagcttttgaattcctctccggtacctgaactaacttgttcagcttctttttcctgagtaaacccactcagcttcttctccctgagtaaacccactcagcttcttctccctgagtaaacccactcagcttaaaacccggagcaaagctccaccttaactttgagatactctgagcaagtcaagagcgtcttgaaacttgctcactggtagcactttggtgaatatatctgctggattgtcttcagtgtcaatcttcaatatctgcaccacaccatcgttcaccaattctctgatgaagtgatatttaacatcaatatgtttggtcctttcgtggtagactgcgttcttagtcaaggcaatagcactctgtgagtcacaatggatgtttactgatccttgtgcaaaacctaactcacttacaagacctttcagccaaactgcttcatttgctgcatcagttagagccatatactcagcttcagtgcttgatagagctactactttctgtaagcttgacttccagcttatcgtgtttccaccaaaggtaaacaccactcctgaagtggatctccttgtttccttatctgcagcatagtccgagtcacaataaccttctaagactagctctccttcattcttatagcacagctttcggtctaaagtaccaccaatgtatcttaatatccactttactgcctgccagtgttccttcaatggtttactcatgaatctgcatactacaccaactgaatgagctaggtctggccttgtaccaatcattgagtacatcaagctcccaactgcactttgataagggattgttctcatgacttctgactgtttctgaatctcttcatcagttgcaggtttcagtttaaaatggatccccagggtgtgttgactgtcttggctcgatccatgccaaaatctccaagaactttcaggagatagccctcttgagaaatggagagagttccagcttgtctatctctgacgatctccatacctaagattttcttagcatcccccaagtctttcatttcgaattcagagtttagaagaacctttaactcacatacctcctttttatccttagatgctattagtatatcatcaacgtatagaagcaagtagatgtactctccactctgcaacatcttgaagtaaacacagctatcatacttgtttctttcatatccaatcttctgcataaactcattgaacctgttgttccattgtctaggagactgcttcagtccatacagcgacttcttcagtaagcaaactttgtctggatatctttcatgagtatatcactctggttgctccatatagatcgtctcatccaggtagccgtgtaaaaaggctgtctttacatccatctgttgtaactccatgtctaggtgagcaacgattgatagcaggaggcgaatagagacatgtttcaccactggtgaaaatatttcttgaaagtctattccctctttctgtgagtatcccttagctacaagcctagccttaaaccttggtttctccactcctgcaattccagctttccttttgaatatccacttacatccaataggcttctgtagactgtttctctctacaagaacccatgtcttattctttatcagagattctatctcctcatcagctgcttctaaccatttctcactatcagggtcttgaactgcttcctgatagcactcaggttcagaatttcccccatcctctgttatgaggtaagcatagcctgcaatctcatctaatacttcctcatccatctcataatccttgagtcttgatgggataatcacttgtcttttaggtcgatctcgagctatctgtcttgttctctgatttccttctggtgtagtgtctacctgatcaatgtcaatgatttctgtagtctcatcagaaatactctctgtagctccaccatgatctgaactgtctctggttttactggcacctgcacattcgaagatgggaactttattagtagtcaaagggagttcaagacttatacatgaggttgtggcgttcatgatgtccttgtacatcacatcttctctgaacacaacgtttcgacttatggtgcacttctcttcctcaatcatccagactctaaaacccttaactccacttggataacccacaaacactcctttcttggctctaggatccagttttccttcttgagaatgaacgtatacaatgcagccaaatcttcttagtcttgacagattggaaatcactgaggtccacagttcttcagggattttattctccattgtagatgatggtgatttgttaatcaagtatactgaggttgaaactgcttcagcccaaaatttcttgtctaagccactttcactcagcatacttctaaccttgttcatgattgttctatttaatctttctgcaactccgttttgctgtggagtgtaagtacatgttctatgtcttactctcccttccttcttgcagaaacaatcaaacttttgattacagaattctaacccgttgtctgttcttaatttcttgagttttctgtcactttgagtctccaccatctttttccattcagtgaatgaagcaaaggcttcatctttagacttgagaaagtacacccaaacctttcttgaccagtcatctgtaaatgatatgaagtactgatattttccaagactgtgcggtacgttaggagatccccatagatcagaatgaacatagtcaagtttctcattagttacatgttgtgctgatccgaaactagctctgtgagtcttccctattatgagtcttcacaaaactttatctctgatatcttgtcattaccaaagcaacctttcttactcaaaacttccatagcctgctgtcctatatgtcccattctgctatgccataactgagtctgatctgattcacctgagactgttgtaagagagtctgcatctgactttctcgcttccgcttgtaaaatgtataacgaggctcttctgactcctttcatgaacacttatgatccctgaattacctttaagacaccgttacctcctctaaactcatatccctctgactcaagagttcccatagagatcagatttctagatatctctgggatgtacctcactccatgaaggatgatctgtcttccatcctcatttgtgaacttaacctttccaattccttttacttcagagaatgaattattagccattctaacctttcctgctttgccttctacaaagtctacaagatagtctctcctaggtgtcatgtggaaagagcacccagtgtccattatccattcttcttgatctctcttatcctcacttaggttagcttctgatgctactagcccgaccaagtcttgagcatcgtcctttaccaatgttgtttcccctgcaccatttcccttattcttctcaagccacttgtaacattgtctcttgaagtgaccttccttttcacatatccaacagactttctttccttctgttgagttattccctttgttgttatcacttcctttggcctgaaactttccctttacatagagaccttcaccaaccggtcttgatcctcctaaaccatctcttagttctagttcctttgattttgcagcactcacaacgtcatcaagttttatgccttctcttccatatttcaaggtttccttaagcatatcatagccttctggtaaagcacttagaatcaagattgcttggacttcttctggaacttgaatctaaagattacttagatctgatatcatctttagaaactcatctatgttctcttcaagagtttttgaatcttgcattctatagttgtaaaccttgagttgaaggtaaacacggtttggtagagtctttaccaaatacaatttatcaagagttgcccatgcttctgcggctgtctttgaatgttctatgtttctcagaactttatctccgacatttatgaagatcatatccatcgctttctcatctcgatcaattcttgctttttcctcttcgagaatcttttttttctttgctggatcgtcttcttcttcatctgtcaatgaagatgacttagtttgttccaccagcgcatcttttaatcccatcttccatagtgagaagtcgcctgatccgtcgaactgagaaatcttcagtttcgtgttcgacatccttgaatcgatctgaaattcttgagctcagaacctgggctctgataccaatttgtgatcctcgaaccctcaagaacactaacgaaatcgatcggacactcgtgtgagattgaacacaaagaacctttaaaagagacacacaagattttacgagttcaggctccgatgaggaaccctacgtctcaccggagatgtctccggaattcactaaaagcacttagctcaaaacgagctttctctctctacaatcgttctgttttctctctctcacttctcttattcaacaaatttctaaatcaatcaaatctacagagaaacaacaatactgaaaggaaacagaataagacgagtaaaggataagaaaatgccgttgagagtaaacggattggatcgctccacgtgtcacgatctccttagctcgtcaaccagttgaccctgaaaccttctgaaacacttagagagtctcttatacttagcatatagatcaatacttcttcactctaactgtttcgttctctccaaattgaatagagctgaaagttgtaccatgttaagaataggcaatgcatccccaaagacatgtctatgaggactgtttgaatatcattccatcttgttgagaatttaattatgacccataaccttcttgcttagccctaaccaaatctcgttagcatatccacatgtaaagaataggtgttctcggtcttctacctgctcactacagaaaatacaagatatgtctactccaacttgtcatttgatcattctgttccccgtcgttaaccggtttcgtgtcgttaaccatgtcaaaaatgagtatttaaaatttaagagtggtcgtgtgataaccatatgccctaatcccattcggcggtatcggtatgtattaatgtttccgcagggacttgaagcagtttcactgacagttacagcggttttacctccttaatttttatgttttagactttgttcatgtggtagttgtgtcgtagaaagttaataatagaaatatagagcaggttttgatccaaaataaaaaactaaatacagaaagagaatactttcacatacggaatttccattagtgaggaaacatgtcctttttatttttttgtatatttaacatttcccgaagattagaaaccgcatattatttatcttagtgaaagttattaaaaagggcccgacacttgtttacgttaattactaccaaaaaaaataaaataataacttgtagaaacctatattaataatcgtagaaaagagtgggctagctaaagagttgaaaaccctaatttctacatactaagaaaataatgacgatgatgttcgatcttacgcaggatttggtgaaagagatattgtctagggttccgataacttccctaggagcagtgagatccacttgcaaaggatggaacgctttatccaaagatcggattctatgtaaagcaaaaccaaaacagcagtttcatcaagggttcatgctgtctgattataggcttcgttcaatgaggttcaatatctctggaaccttcaaggaaaatggtgaagaattcgttaacttatcagtaaaggagattggtaattttcttaataaagttgagatatctcatatgtattactgcggcggtatattgttatgtgtcaccacggatactaggctcgtgatttggaacccgtatttggggcaaatcaggtggatccaactcaaaacagaaactatgtattccacgttttgtctcagatatgacaacaacaaaaaccacaagatattgaggtttctcgataataaacagggctcatacgaaatttacgatttgaagtcttattcatggagggcttttgatgtcattcccaagtgggatatagatgatgatgggcagagtgcatcggtaaagggaaatacttactttaggacgatagatgaaaccccaaatttactaatctgttttgattttacggcagaaagatttggaaagcttcttgatccaccttttcagcatggttggatgagtctatcctgggttagagaagagaaactcgtagccttatatcagcacttggatacatctatgatagagatttggattactactaagatagagcccaatgcactatcgtggacctccttcttaaaatgttatattgagcaactcattgctcttgatttttggtttgatatagattacaacaatttcttcattgacgaggagaagaaactcgcggtggttattgataaagtcgaatctgaagactgcaaaagatctaattctcacatcaattcttacatcattggagatgatggctacttgaaaaaaatgaatagtcttggaaacactgcaagatcttataccgcaattatgttatctagctgttacgtttcaagtttagtgcaaattgatgatcccattgcaagacgcagaagaagagagaggaacagcaaacgaaaagagaagaagaggaagggaaccaccaacaacaaggtgtaatcatcactaccactcaaaaggaaacaagaagactatcgcttctcattcgttttttcttagagtactatctacttgattattatttgacactttttgttgaaacaaacatttttagcaggtcagcaattttattagaatacttctttgctctttagcttcaatttcaccgcaaaagtcaacatattttgagactaatggtgttctctgatttcagcaaataaacaaattgatgattgaagatcaaacatatatatcatataaagtgatgtcgaagatgcatattacttttagacttccttcatttcattaatttaggcatgatttacaaaaagttcttctccagctgcataaatttcttctttatcccaataaaaataaatttctcaaaacaaaacaacatcttcttcttctcgattaagtaaatatccagtttatttaagtattttactaagggaaaaatgtcatttaattccccaattttcaaaaaatggtcattgtatacatcaacttcgtatgtggctgtttaaaacatgaactaaacgttgactaacttttaaaacatgatcattcgttgaccagaccaaaatagacatgccgttatcagtcattaacggaacttctaacgtctgttatcatctgttaactttattagtcaagtttcaaattgtagccattttaaacatcaacttcatatgtggccatttaaaacatgaactaaacgttgattaccatttaagacatgaaaaatccgttgacgaggccaaaatagacatgtctttatcagtagaacctagaaacccgttattacccgttaatgactgttaatctgttcaaaacgacgtcgtttgagaataatctaaagaacagaaagattttttccatatgaaatcttcatatcaaaaagttttaagcagaacccaagaacatagtttgatatagagataatcgtagtaccagtaatcggaagcaaataaaggtgttttcgtttatatatttgttttaaattttaaaaggaatcatggaagcaaattgaaaacccattataagattgttcgtcttgtttgggcggttgtagaaatagatttggagaactggagttttcatttagaaaacaatcctgattttcttttgattattctcaaaacaaagtcgttttaggaatactaatagagtcgttaacaagtgataacgaatgttataagttcttttaatgaatgatgacaacatgtttattttggcttggtcaacgaatttctcatgttttaaatggtagtcaacgcttaattcatgtttaaaatggccacatataaagtcgatgtttaaaatgaccataatttaaaacttgactaataaagtcgttaacagatgataacggacgttagaagttccgttaatgactgataacggcatgtctattttggcctggtcaacgaatgatcatgttgtaaaagttagtcaacgtttagtttatgttttagacggccgcatacgaagttgatgtataaaatggccattttttgaaagttgggagattaattgacatttttcccattttactaatcacacgtttccgtttcatacagtattcatttgtgtaaaagtttgtatgaacggttagttccttcttctatttaagaaaccaaaagaaaaacgaagactatctttgcctattggaaatgattttgtcattttaagcttagtgtggaacttagcagaaggtgagttgaacacaataatgtgatatattcaagggaaatttggaaaactaacctacaaaaaaactataattaagaaagtaacactaacaaaaaaatgagatgatattctttatattttatatattaatcacaactttaccctctttccttctctctctctccttctctctcccttctccgcttgtctccctacttcttttttttctctctccttctctccctctctccttctctctcttcttctctctctcctctccgcctttctccttacttctttttctctttctctccaaatgacctctttgcttttttttgtttttagttacagttcattaattacctttttgtgagatttatttaggttctaagctttgttttttcttttttgtcttttttgaaacataattttaacatcaaaatgcatttatggtctgaaactaatttatcacttaatttttttgttcttcatagttacaggctcaccacatatctacaataaattatggatcattcttaaatattgataaattagggatcattcttagatctagaagcgatgaagggtttacgatggtagaaattctaaagggaaatagccaataaatcgattttgattttgaaagatttttgacagataatattctattttgtaaatatactatttacgtataccttgtactatatacgttttaaaatgaattgtttgttttgattaaggatgttaagtgatttgattagtgttttatattaaaagctttgggttccctatatattatcttagggtttagtattcttccatcaaaaagtatttaattgattatttggattcatcagaacaaacgtttctatttgaacaaatatatactattctattttctgtgatgatatgtatagaacttggtactactattcactttttaaaaaatttgtttccgatttttaaaattcaaatcatgttagataaacaaaaaaaaatctgtttttttaatagtattattagttttaaccaaataataattttaaacttacatagcaaacaaaattgaatgggatgaatatattttggtcacttttttggttgctccacgcgctatcacctctttcttgataagttgaaggagtctgtggtctttttaacacatacatgtgttacttactatattatacagtttatggtgctatattctttatttcatcttccaaataggttatttttgcaattcaccctatattcaaactaaggaaaaaaaaaaacaattgacatgatgcttcaatgaacacattaaaagttcttgtactcgtagtaatattttaaagtgtaacaaacggtaatataagacaagttctagtacttgaagtacttactagttcgattacattcttaaattttatgtaagagaatgagaaacaagtaatacaaaaacattgaaaatttcttctcatctgttgtttatttttcaaattttcgttcttctcattttatctgttattactcacatggagtctgcagagctcaatggaaggagcaatcgagctatcattttccttttccaccaatatcaatggatgtcaactcttttcggaaaacataacttgatgataatgactctttaagtgcacttcttttggttcgaaccagagatcttgaagtgcacttcttttcaaaaatgacatatatattcactatagtttattgacgctggatatgttagtacacaaatctgcatttctatattttaaatttattgtaacattaattccaataatatactaaagttaaattaaaaataaccaaaacatttgacaaatatttataataattattattacaaaatctaaaataatttgatttcgcaatctcattggagataattgtttttgggatattaatccctctctctctctggttggatttggagaaacctatgtaaacttaagagtatcgctaaggtcaactccattgcacaaataatataagggtctttagatactaaatgaataaaataataaggtaaatatctttaaattggtgcacagaaataaattatgtctttggggagacattaaagatattttttagaaacatctttgcttaggtggcaatatgtcattggttcttcttttgttcttttattttaatcacaactaaagatatccacttaaatttgtgcaatgtagatgctctaaacctttcattgtttgtcaggtggattctgagattacttgtaacttttgtaacttaggatcttctcttagatttgactggtcctacagatcctataatttctagtctctcgttaggttctgtggttgtggaagctattaagtgtggagaatggtggctctctaatagcagaagtaggaacccgatcattcagattcttcgtcaatgcctccctaatccacatgcgattaatcctctagcgaagaggacatttatcagtagaacatcagagataatgtccctccagggagcagcgttgccttagctcctctgtttctttcttgtttacttgtttcaagtgttcaagggtaatagtgttgtaatagtttttattctctcgtgcaggtttttgccttctgtaatcgttctctatcttaggtacgttaatgaaatggtacttcttaaaaaaaaaaaaaatgattttgcaatctcagccaaaaatataatttctcaacttcttccgaaaatgttttacatgcaaacttttagtcaaaccatcatcttatttacatctatttagtatctactttaccactaaaaaaatgtttttacatcgaacatagtttagtgttgcctacaaaatgtctctttgactacattaaaccaaattatatgtttctgtagtttcacttttgcattgtttttctaaccactaaaattgttgactcaaataattttgaatgcaatttattagtatataaaaatattgtagatgtatttataaaaaaaaattaagataatgagtctctcaccaaccaataaagataactataaacactatgatatatattattgtcttgaataattcaaagatgaaaataaaattttaaataaataatctgagaatattaaaatttatattaatcaaaatttgaaaataaatcttactatattcttagaaactttaatgttttatataattaaaagatcttagtttccagattggatcgggacttagttgaccaaaaattgccaaaaaaaaaagaagaacatgttaagagacaatttctccagttcactagtaactgataaagtgataacggagttggttggaacgtgaaacgcttataaaaataaaccggtttaatttcaccggtttaccttccgccgtagatatcagccgcaatgtacattctcgacaccggagctcgattctccgccgtcagattctcaccggtattcaatcctcctccaacatctctccgtagacgatacttcatcgtaaggtctctctcttctaccacacgaattgattacttctccatctctgtaacacaatctctgatctctccaatcgttttccgatttttgtatctccagagctaatcttccattcccaaagcatcaagctaagtatcataaagagcttgaggtcgccattgatgctgttgatcgagcttgtcgtctctgtgttgatgtaagttaatatctcacctctgtggttcgtcaatttcagatttggtgtctattaaagtttggtttttgataactgtttaggtcaaaagatctcttttttcttctaaagagaagattgttgagaagaatgatcaaactccagttacaattgcagattttggagttcaagctt

SEQ ID NO: 534 - DNA, 183147 bp, Arabidopsis thaliana
aagcttatatatatatcttacggtttcttatgtggttgcagcaagtgtatgattatgatacattttctgctgatgacataatgggagaagcagatattgatatacaacctttgataacatctgcaatggcttttggggatccagaaatgtttggggatatgcagattgggaaatggctaaaatcgcatgataacccattaatagatgacagtatcattaacattgttgatgggaaagtgaaacaggaggttcagatcaagcttcagaatgtagagtctggagaattagagctagaaatggaatggctgccacttgaccaataagtgtcatataggtctcataacctttataaatgtactgattgatttaattctttgttttttttttttctctccatttgttggaaattttcaaaaatctctttgcatttttttcctcatttcagaggtaaatgtattttgatgtttgtataaaccaatggattactatatgatgttttgattgatggaaaaagggtgaaatatccacttatgtaacatacactttcacttgtgatcatcaatttacttgagagtcgtttcttcaaagtttcaaactttccacaacagaaactctacttaagatgatcaaggcattgtcaaatgaaatgctttggaaggaagaaactgcctctccttcgttaaaccaagctcagtatcttgcagtttcctctcatcagacatatcaatgcttggacaaaggtacgaaccattttctacatttgtgggacattacaggcatttcttagcaacaacgaatgttcatcatactcagaacctaaaagattaacatgttcaagccatccttagaacccaacagctcaacactttcgctacatctattactagaggccaacaattggactatttacaagtttcgcagaactgcactaaacagagtcgagtcactttgcaggcgtattaaacaaaagaagcacagataataaaaacgaagcgatgataaagaagaagttcgacttgtcattagaaagaaagagataacaggaacggaaacatagtagaacacttattcatcagggattatacaaggccccaaaacacaaaccaccaaagttttacatgaaacgaaacattgaacttcttaagcataacagagacgagatttagaaaccaccacgaagacgcaggaccaagtgaagagtagactccttctggatgttgtagtcggccaaagtacgtccatcctcaagctgctttccagcgaagatgagacgctgctggtccggaggaatacctccttgtcctggatcttggccttgacgttgtcaatggtgtcggagctttccacttcaagggtgatggtctttccggtcaaagtcttgacgaagatctgcatacctccacgcagacgcaacaccaagtgaagggtcgactccttctggatgttgtaatccgccaaagtacgaccatcctccaattgttttccggcaaagatcaacctctgctggtccggagggattccttccttatcctggatcttggccttcacgttgtcaatggtgtcagagctctctacctccaaagtgatagtctttccggtgagagtcttcacgaagatctgcatacctccacgcagacgcaagaccaagtgaagtgtggactccttctgaatgttgtagtcagccaaagttcttccatcttcaagttgctttccggcgaagatcaatctctgctggtccggtgggataccctctttgtcctggatcttggctttcacgttatcaatggtgtcagaactctccacctccaaagtgatggtctttccggtgagagtcttcacgaagatctgcatacctccacgcagacgcaagaccaagtggagtgtggactccttctgaatgttgtagtcggccaaagttctgccatcttcaagttgttttccggcgaagatcaatctctgctggtccggaggaataccctctttgtcttggatcttggctttcacgttatcaatggtgtcagaactctccacctccaaagtgatagttttcccagtcaacgtcttaacgaaaatctgcataccaccacggagcctgagaacaagatgaagggtggactccttctggatattgtagtcagcaagagttctgccatcctccaactgctttccggcgaagatcagcctctgctggtccggaggaataccctctttgtcttggatcttggccttgacgttgtcgatggtgtcagaactctccacctcaagagtaatcgtctttcccgttagggttttaacgaaaatctgcataccaccacggagcctgaggaccaagtggagggtggattccttctggatattgtaatcagccaacgtacggccatcctctagctgcttgccggcgaaaataagcctctgctgatccggaggaatgccctccttatcctggatcttggccttaacgttgtcgatggtgtcggagctttccacctcgagggtgattgtctttccggtgagagtcttaacaaagatctgcatctgttaatcagaaaaactcagattaatcgacaaattcgatcgcacaaactagaaactaacaccagatctagatagaaatcacaaatcgaagagtaattattcgacaaaactcaaattatttgaacaaatcggatgatatctatgaaaccctaatcgagaattaagatgatatctaacgatcaaacccagaaaatcgtcttcgatctaagattaacagaatctaaaccaaagaacatatacgaaattgggatcgaacgaaaacaaaatcgaagattttgagagaataaggaacacagaaatttaccttgatcacggtagagagaattgagagaaagtttttaagattttgagaaattgaaatctgaattgtgaagaagaagagctctttgggtattgttttatagaagaagaagaagaaaagacgaggacgactaggtcacgagaaagctaaggcggtgaagcaatagctaataataaaatgacacgtgtattgagcgttgtttacacgcaaagttgtttttggctaattgccttatttttaggttgaggaaaagtatttgtgctttgagttgataaacacgactcgtgtgtgccggctgcaaccactttgacgccgtttattactgactcgtcgacaaccacaatttctaacggtcgtcataagatccagccgttgagatttaacgatcgttacgatttatatttttttagcattatcgttttattttttaaatatacggtggagctgaaaattggcaataattgaaccgtgggtcccactgcattgaagcgtatttcgtattttctagaattcttcgtgctttatttcttttcctttttgtttttttttgccatttatctaatgcaagtgggcttataaaatcagtgaatttcttggaaaagtaacttctttatcgtataacatattgtgaaattatccatttcttttaattttttagtgttattggatatttttgtatgattattgatttgcataggataatgacttttgtatcaagttggtgaacaagtctcgttaaaaaaggcaagtggtttggtgactcgatttattcttgttatttaattcatatatcaatggatcttatttggggcctggtccatatttaacactcgtgttcagtccaatgaccaataatattttttcattaataacaatgtaacaagaatgatacacaaaacattctttgaataagttcgctatgaagaagggaacttatccggtcctagatcatcagttcatacaaacctccatagagttcaacatcttaaacaagaatatcctgatctgaagaatgtggaggctttagtcccttggatacttgggaggctgtggaagaacagaaacgagctggtgcttaaagggagggaatttggaaccaatgaggtattagtaaggacacaagaagatgcagatgagtggattagaaggaaagaggctcagaatgtaaggaaagcaccaaccacaacaccgtcgggacagacgagaaacatgggaagctccaccacaatcttgggttaagtgcaactttgatggggcatggccaacagaaggattaaaatgtggcttagggtgggtgcttcgcgatcatacagggaaggtgttatggttaggtgcaagagctgtggtaaaagtaagaagcgtgctggaagtagaagtggaggctcttagatgggctgtgctgtcattatcccgattcaattataggaagatcatttttgaggtggattctcagcaacttgtgtctttggttacatgaaagttatgcttgtcaagtctcaatccaattatccaagacataaagtatctacttagcaagtttgaggattttatgcttgtgcatacaagccgagaaggaaatggagtggcagatagaatagctaaggaatctctttcttttgagaattatgatctaaagttgtattctattgtaccaatttgggttaaaagctctgttgagctagactgtgtatccataaatgggtgaatggaaagtttgttgttgagccaaaaaaaaaaaaaaaaaaatcatcagttcatcatattggtagtcttgtttgataagttctgctttttttaccttccagttttgccatttgatgttgcaatgagatttcttttgctaatgttttaaaataacaaagttgttgctgctagtgtttccaagttgtgtttgctgaaattagggtttgtaacttataagagaagcttgatcgctgctttcgactaaagggaattcaataacaacaagtttacttgaagaaaaatattaaaacctagaagaaaagagttacacctacaaataggataaaatccacataaatttctgttactaaatgtatcatagttttgtttcttctatgtatctacatatactcaaaaatttcaaagcattgtgacttaagggccagaagaaaacttgaagaaagattaaaacctattagcaaagagttaaagatccacataactttctgttgctgaatgtatcatagtttttggtttcttctgtgtcatatatacagactttctacagaactttttgagcacaaagcattgtgactttagagccacgagtaaaagacgaggcaaaatgtgtatcacgtccactaaccatataaactgtttcggctggaagaacacggttccactcgaatgactgatcttcgttcaatactctctctttctttctgtccacaaagaaatatccttcgtgaggcattcttatatgacccctccgaccactttcaaccaactcggttctcagtattttcacttgatccgtcgagttcacatccacctcaataaatctcttcagacctttacactcacttgaagctgccaccacatatactttaatcttcttcttcgggtcagtgatctctttgactgagtttgacgctggagattgctccatttgaggcacttgaaccgtcacagacgaatcttgaatcttactggtctcttggataacacgtctgggaacaatcacaattgtatccaagggtttaacactgttacactcgtatgactgatcttcgttcaatacttgattattgtgcgtaaagatgtacccttcttgagccagtttcataagacctctcagtgttttcacctcatccgtaactttcacttgcaccagaatattcgttgggacttcattcataccaggatatggcgacacatatactagcatctgccggactcttttttttccgttagtgatctttttgactaagtttgactgtggaaattgcttcgttggaggcacttgatcgttgttgttcttactcgcaaacttcacagacgaatcttgaatgttaacggtctctttgactgagtttgacggtggagattcctctgtttgatgcgcatcttgaatcttactgatgtcttgggttgtctcaggccgataactgtaaatctttctgatctcttcctctgtcaaaggccaatcttgctccgcaaagtactcttcaactgaaatccacggtgctggaggagattgctctgtttgcgggatttgatcgtcgttgttgtgaatagggttcacgtcaggagagacttcgagttggatttgagaatcgtggaagatctggcattggtcgaggttaagatcttctcgaagaataaaaatgccgtcgacgataagggtttgtttcgaaactgggacacgttgagacttctcgatcttctgtttgaccactaacaatgtatctgtgcgttccacttcaatctcgaacgatgaaccacccagaatctcgaccacaaacttcatgactctatcaatggtgtttcaagatcaatggagactaatgaagaagagagtcaagaaacagagagagcgagagagaaagtgattgttttgtaaagatagttcacgatagaatttggttttaatatcattcattcacatatcaaatgaaccgcatttgggcttgacccatttttattgggttacgtggctcttaagtcaatgaaagcctcacataaaatcatcagtatctatgctacagtatattcttacttatattatccaacggtaatgttataaaaagattgattaaaactatctagatccgacccattaaaccgtaaatctacaaatccgacccattaaagattcttgccggagacgaaaggtattccgattgaggagatgggtcaagtgtggaggtcacactggtattggtcaaggtttgtagaggatgggagtatgggaatgcgcttgagatggggaagagcagtaattaagccggaacgaagcatgtttgatttatcattgtttttttaatgagagttttaagaaaaagaaaaaaaaagatttgtaaatgtcgtagaggaaaaactgtactagcctagatatatatattagtgtttatataagggtaaattgcaggccacacccgttgaccatgttttatttccatggattgttaaagtcaaatgtggttttcaccatttgtcttttcgcctgcaaaatgacgtttctgcccttgcgcttctctcttagtaactgttgaaatgtacggtttagtttagcaggtttagttacgtacactgttccgattcagttgaagattttttgtttcacgttgacgcgattcggttccgttacaagtgagattattttcattattccgaagtgacatcaacatttaatgccccaaaaaagtttagatgtgactattgtcacaattaatgcaaaatcatcattacatcaaataatattaaaaaaattattgataataattaataaaaaattaagaacgtacattgctgttgaagaagtgttgatcttgtttttgtaccaagtttggagccaaaacaagcattgctcgtgtaagtaatgaagttcttttaagaagttttttgttatgtcatattaggatcttgattgtgttttaactccatttttttatcagaaaatttgcaaaatctatatttgtttgtttaaaatagtcaaatgataattggtatttaggtttataaatgtgtagtatcgacattccatttgttttttatatgtatagtatttttcagttgcatttaatgtgtgtctcctgaatttatgatgcaggtgggttatggatattcccgtatttactatggtcggtgagtggaaatgcaaagaaggagaatggaaatttgaacctgaggaaggcatctttggtcgttgtgtacgcgttcaggaaaccatgacgtacacggactttgtccgtacactccgagaggctttcagtttgaagtccaccgagatcaatcccataattagctactggatgccgggagaaatgtcagtgctgatagatactaaacgccctcctgtatacattgacagtcagatgggtctcgaaacgtttttttttgtttgtggtgggtatctttctctcaacttgttcgtctctttcaataatacagtgaaggcgttcgggaatactgtctctaggtctcatggtgaagtttctgaaagtgaccgtgtgtttgatagtgctacaaatgttgatgaaaataatgaggatgcagaggagcaagccgatgttgaagacgatacaacagaagaggatgaagtggaggagggcaacgaagatgatgatgggtgtgatgattatcttggtgtggatggatctattgggggaagtaccatgtatcctaccacagacggtagtgaaggtattggcgaaaaatacgattacaacaagtggaacgatgtaatagtagaagaatatgtataaggaaatcttgaggaagacgtcaatctcactcaacagactgctcaacatccaggggaattcagtcgtttattggaaacgtgtacgtacacgggtgttagtgtacctgacggagatacaagagaattcagtcgtctcttggaaacgtgtacgtacactgatcttagtgtacctggcgaagaaacaatttttccattgggttacggtacacgctgcgaagggcaaaaggattccaatcttatttgtatagacgaagttaccggggatgaagtgatcgacggtattggagcttcctcaactgggacacagaatgataatggggtagttaccgcagctgaggcttaccaagtgtataatgaatttcctaagttacatggtggcgagttggcgaatctcggtaacgatgctgctcctgtgttcgatgacttactcaattttcgagctgatgagacacaggttgaaatcagcaccacaggcgaaactttgtttgttggaagtgtttttaagaatagaaaagtcctgcaacaaacaatgtctcttcaagcgataaagcaatgcttttgcttcaagcaacctaagtcatgtcctaaaacattaaagatggtgtgcgttgatgagacttgtccatggcaattgactgcttgcatcgtgaaggattcagaaagtttcaaaatcacttcgtatgctacgacacatacgtgtaacatcgactctcggaagaactacattaaacatgctaattataagctcctcggggaagttgtgaggagcagatacagttctacgtagggtgggccgcgagctgtcgatttaccacagctgctcctaaatgatctgaatgtgcggatttcatattctaccgcttggagagcaaaagaggttgcagtggaaaatgtaaggggggatgagatagcaaattacaggtttttgccgacctatctgtatcttctccaattagctaatccgggtacaataacacacctacactatacaccagaagatgatggtaagcagcgcttcaagtatgtctttgtctctcttggggcttctatcaaaggtctgatatatatgaggaaggtagttgtagtagatggaacgcagctagtcgaaccttacaaaggatgtctccttattgcatgtgcccaagatgggaacttccaaatattcccaatagcttttggtgttgttgatggtgagaccgatgcttcttgggcatggttttttgaaaagttagctgagattgttccagacagtgacgatttaatgattgtctcggacagacattcatctatatacaaaggcctaagtgttgtttacccgagagcgcatcatggagcatgtgttgttcaccttgagcgaaacctctccacctattatggtaagtttggtgtgtctgctttatttttcagcgctgccaaagcttatagggtcagggatttcgagaaatattttgaactgttaagggaaaagagtgctaaatgcgcaaaatacctagaggacataggatttaagcattggacaagagctcactgtagaggagaacgctacaatatcatgtctagcaatagctctgagtccatgaatcatgtgttaacaaaagcaaaaacttatccgattatttacatgatcgagttcattcgggatgtcctaatgcgatggttcgcatcgaggaggaagaaagttgctaggtgcaaatcttctgtgacacctgaggttgatgagagatttctacaagagttgcctgcgtcaggtaaatacgctgtgaagatgtctggaccgtggagctatcaagtgacaagtaaatccggtgagcattttcatgtcgttctggaccagtgtacgtgtacgtgtcttaggtacaccaagctaagaatcccttgtgaacacgctctagcagctgcaatcaagcatggaattgatccgaagtcttgtgtcggatggtggtatggccttcaaacgttttctgattctttccaagaaccaattctacctatcgcggatccgaaagatgttgtcatcccacaacatatagtggatttgatactcattcctctatacagtagacggccaccaggaagaccactgtccaaaaggatcccatctagaggtgaaaaccgggtatgtactaacatcgttcattcatctacttgtattttgagtattaccatgcggagatttttaacttcctgtctttgtcacttcagaaaaagagacagaaaagacttttaccaaatcagtgctcacgctgtcgacaagcaggtcataacaagaagatgtgcaaaaatccaatctagttctggtgacaagtttctgagcctgccaatatagtgtacgcttctgtgttttctcggtgtacgtaagtttatatataatccacctgtaactatgtacgttgtgtacgtacgtttaaactctacgtttgtataactatgtacgtttttgtctgtgtacgtgttaaagttcatgtaataagggtacatagaggtggttgctcaatattttgagtaatttcaaataagttttttgaaaatctaacttattccccctcttaaatgaacggagttggagacatggttgggtatactgtggttgtgttggtatttaatggaaaggacgtaactgttgatgtttattgtcaaatcaacgtaataattaccctatatgacggttaccaagctattaccaaaaatttgaatcaagtgtagttggaaccgcattaataactgtagccgttccagatttcctctatttaagtctcctcccttccttaattttatccacaatcctcattttaaacccatttcttgtgccggcagttatatcattcacaaataaaaatttagtctttcgattcgcttgttcttgctatccgtgagatggaggggtttcatatggtctcagaattgtgtcctctgatcactgggtggcgaatttatgtctttgacttgagagtcttcaagaaggttatatcgcccaacgtcttcgaactcggccttatcctggcagattacgcggtaatttccgtcaaatcattatgtgtttttctcgttcattcgcttaacttgtatattaaactgtctactatcatgttctgtatgtaaagaataaccgtattgaggccaccgttgatcgtcgccttgctccgttttacgaagaccgattcgttgaaaatgagtggaagacgatcacctctttcttggtccgtaagtcaactgactcagtcagagcaacaaagcatgaatacgacatactgtttatggatcggaccgtcgtcgttcaggccccaccgagatcaccaccagttccagatttcgatttcactcccttcgactacattttggagaaatctgcttacaagaacgttttagtcggtgaggaagaataactccgatgcttcatttattacatttttgaaaatttttgtttattatctttgtttctccatcatctagatgtcgttggagcgttggttgatgttggcgcattgactacagactattacggtctcaaactgagtttcaagataaaagatagatagtaagtgttcttttcatttgttttatttacaatgtcactctaaacgctaactgtccatatttctaacgtagcaatgaagtcttggagtgcgaagcccgcaatcaacaggcggagtacttggatggttactttcagagtttgggtaagggaaattttattgtcgcactcagcttttggcgtctaaccgaactgtctaacccgaagcttgagagccatggtgctatttcaaaggtggttgccaatccggacagaccagaagttgcggatatctcgatggtggttttttagctagagggaatgaaccatttgtaagaccccgtcccggacgtctcgtcgtccggcgacgtagtactcaagttcgcgcctctctccggccgaacctcttaattttttgcgattcaacatagaattgcctttacgaggctaaattctataatcgctctcttattacacagcggaagtctttctaaccttggtttaattctaaccaactcttgtaccggtttcatcgtctttgtcccttagacttagatctatcctttactcggtcaagacatgcatatgttcgctaaccattctaagccaaacaatcgcatattcctttatcctactttcacggtcaattaccaaacgtctatcttaactaataagctagatctttacataccttggccaatatgcgtatttgattccttagcccgtttgtcgccttactctattcgttcaacgactcgtcatcggtcgtgaattgatgaaccaatccctatcgttacttagccatacaaccaaccaaccccactggtctaagtacaacgatagagattggggattgtacgattcccttggttcacgatggtcgaatcaagctcttggcttattggtccatccgtcctccaaacgtactccccttcggttccatggtggacgattgagcccttggcttatcgaaccatccatgtttccgatccggtcatttactacgaccgcccacggtttactaaccgtttatccgtccggtttatggtggtcgataaagctttcggcttattgatccatccatacgattcgaactatatccttatcacacccaagggtccgtggattcatccactggatcatcgtaggctagcccatgaaatctttcttccgtcggccttaggtttgctcgcgggtccaacatccgttttgtccatcggttcccaccgtagactttcccgttggttatccgtcgagtcaccctttggtcttaccgatctctgatcggtttcaccatggctgaggagatagatacatgaaggcggccgcgatgttgatcctatatggtgaatcacgttccttacccattcttggtgctttctccctttaccggtaagattgcatccatgggcgacccttgggtgtgctcggatgcacttatccttgtgcttcctcgaacacttttctcgatccatcccatccgatgatcggtctgtccgtcccgttctgtcagacgatcggcctgtcccatctgacccgtccgacgatcagtcagtccgatccgtctggccgatccgatccgtctggccgatccgatccgtctggccgatccgatccgtctgacgatcggtctggccgatccgatccaacgatcggtctaccagatccgatttgtctctaagacgaacggtctaccctctccatcatctacactccatcgaaccgttggaccgggaggtagcatgcgcatcagttcggtcgaattatactcgccgagccgcaccccctttccgaccaacaactctacgatgtgttgggactcctttaagaatgttttatggtgttttggatgttgtgagatgatgtgagattatttcaaaggccttgggcgtcctcccttatatagggggcgaatggatgcttcccgaagcatcacatccgttccttgcacccctccgaaaggtcacatccgttccttgcacccttccaaaaggtcacatccgttccttccaaaaggtcacaaccgttcgttggtacccgctcgaccttacaccttttggccgagacaccttttcacccgtgagctaccacagtccaccagctcgagtgtcagctgaccagaccacccagctgggtcagtacacgatcagctcaccgagctcagtcgagctgtcggtcagctcatctagctgagctagctagtcttccacctggttaagctcacctagcttagctagctagttcatcctagcttgtccagctcacctagctggttcagcttgaactttctcgttcatccgactaagtattttagtccgtttcttgaccatggtctagttttctcctaaaacaacttggcctctttatgaacgcgggacgcggtcgttacatgtctaccccccttaaactgaattcgtcctcgaattcggctggtgtaagatctgggttactccctaactcgggacacaggcgttacaccattattctccgttttaatataatataagactacatttcaattaagttttctttcccagttgttgttgttgtttccataagaaccaaactacatttcagtcgttgttgtttcctgtttccgtttaaatgttaatctaatttgttgttttatgtacatgccttgttttatagttcaaatcctctcgcaatgtacgtatagtttctggtgtacgctatcgtgtacgtgtattagttttggtgccttcaacatcaaaaactattagatttatacttatgttgtgtacgcaatttcccaatgtacgataaaccaagtttaatgtactatatagtgtacgtacacgaagacatctagtaatacttaaaggggtaattcattcaaaagccagaaacataaaaaagacaggcagtttatataaagggaaattcataagataaataaactggaacgaatcaaaaaacataattttttcaacgaagcatacacatgtgttgcaaaatatgtgtgcatccgtcatacacagaatatagcaatctccctggcgtaccagtagaaaaaacaaaccctgcagccatgatggaacgtgcattgccctacgcaactcagcgggtggacaaacctccaagacctttcccagcggcgagcattttcagtgtgaagctggctgatgtgatacatcaccatctctgcaaccgcgtggccagcttcaagggtgggtgtcatttcccagaacttttcgctgatcgggaggaaatccaagtgattaccagtacacgtaaggaacaaaccggttgcgaagcaagcaaagggatcagataaagcgaccgttgtcatgactgaaaggccctgagctactgtcacgaagttgctcgcttggcgaacaccttcaaggtaaaccgccgggatggatccacgttctacaagcagctcgaagtatggccggaaggtagactccggttggagtaacgacggccacgtcatgaattcatcgattgcaagggtgttgatgtcacaactgttgactaagttccttagcgtctctatgggagtctggctgacggggaggtagttgacaagtatgcttatggggtttggcaattggattcctaggtacaactcggttggaggggttagcggaggtaggaaaggcattgtttttcaaacgaggaggtttagacggattcgtgtattcaactaagtgtgtttgacatgagttttaaagaggggaataatcatcaatgtaagtgggtgggtgacgtggatgtatatttagtgcatcatattagtaacttttaatttaaacaaactactgtgtacctctcataatcgcgccgtgtatgtctataaaatactcattacgttttcttacagaaggttgagttaacgtctgtttgtattgcatataagtggaacaatatggcttcatgtatagtgctatattaggggtcaacgcatttactaacaatcttttcaaataaacattaacttacttattttatctgccaaatcaattgagtacgttgctcgggaaccgtgtatgtctaatagagatattaatgagagtgtgatggaggtcacttctagtgtgtatttgacagcgagtaattaatatggagcgaaatcttctagatatgtgttatacgacgtcaaatcaaattttctttcgtcttcatttacaaactataccgtcgctcactatgtaatctttatagttggaattaaactataccacatgtacattatcatataccgtgtacgtagatattttattattttattattattttgtgttaatgatgtctcatattagagtagtttgagctagtatgtttgaatcaattacaaagtgataattattaaaaacaaacttccattactgataatcaacgtaaaaagctcacatattgttgcatgaaaaacttataaatatgacaggatcgtggcgaatgtgagctctacaggatctggctaatccgtttagcacacaaccagatgtaacattggttgcaaagattattgaagagtctcgatctcatgtaacacatctctgcgcattcaggagtgcttaagtcaccacattccgggtacgaaaaactgttagcgtatgtgtattttaaagtattaccatatttctttatatcttctagcacctcctcacaaatgtcacgtgcctcctccgattccaaagcataatggttgcttccgaagagccgaaggtagacaccacccatgtgagcattaccagcacatatgtaaagaattgcgcatgcaagggttgcagcggcgttccttggggagattcgctctaagtgtaggatagctccctgaatgtcagactcatgtgtaacgagacgcagtccttcatggtaaatagccgtggggttaccagcttgtaagcaccgtttgaagaagggtctatagcgaccttcggagttgatgtcatttggatcgtggcctaccgcgtagaagtcatcgggatcgtcgcacatgctgaaaatgtttgcatccttgaggacatccggacggtagacaatgtctcttccacgaggaccggatttcaacataggtccgaggtaccaccaacatttgtcagccattttcttggctatcttcgcaagcaaatcatcatgaatatttgggtttgttatatttaggagtaaggtgttttaacaaaatgaaattccaacacttaaataagcatcattgaagatatggttgggtaagttatggttgtatttattgcaaaggtattaagtgatgatgtgtattcatattgtcaaatcaacgtaatagtattccatatataatttgttattgttgttatgagcaaccactttttaataacagcttaaaactagacgtgtacgttttagtgtgcgttttagtgtacgtccacatttacatttctacatttgcccaacaaacagtgtacgttgtagtgtacgtccacatttacatttctacatttacccaacaaacagtgtacgctgtagtgtactatcagtgtacgtccattcataaatatcaccatttatgagacaaaccaaagacctcatatgtttgaatgtgttattttttagtgtacgttagagttgatatctcatgctagtgtacgtacatatctagttttccgagacaaacaaaaaacctttaagtattatttggtagatgcacgtgtacgtagttgtggacgcttagattttaatatccaaatttacatttacttcgggaactaaatatcatatgcgaatttggctgaaaaatattcaactttagattttaactatagcatttgactaacacgcctggcacacgatcagaggtaacagcggttgcaaacgttttggaaagctcctgataccatgtaacaatataaggcgcaaggaggcatactaattccatggctggtaggataagagaacgtaggaccatatgtattgttgtatgcagggtcaaacttctttatttccttgaagaaactcatcacccaaattcgagtggcaaccgagtccaatggataatggttgcgggtgaagagctgtagaaacaagtcgcccatataatcatacccagcacatatgaatacaatggcgcatgtaactgttgcatttgctcgtactggagcatgacgctgtaagagcctgatggctccattgatgtttcgttcatgcgttagaacacgaataccttcgtaatacactgccgtgggattattagctgcaaaacaccgtaaaaaaaatggtcgatgtcggccttcatcagcggatccggagggattgtggccccctcaagcttggaagtcatcgggcgagttacacaaggtgagaatattggcatctttgaggacatccggacggtagacaatgtctcttccacgagtgccggatcgtaccagtggaccaaggtcggaccagcattggttagccaggttcttagctatcttcgagagtaaatcgtcgggaagagtcgggttaaccatgtttgaaatgagatagtcagagatcgtcagtaatttcttcactttaataaccactactgtgaatttggttggggcaattacggttgaaatgaatgtcatacttgtgttagtaagcgttggctgtcaaatcaatttatcacttgagttatgttataaagttaatatgcagtgtacgagacatatagatatgtacgtacacatttacattatgtaattagaagtgaacgatgtgtacgacaatatgatagaggacactaaattaacttctgacaatctccaaattaaatgtagttgcaatcatatatctaagataggtttgttcataataattggttgcaaagaaccagaatattgttcttggacgattaaagcaagtgcacagtaccggcctcccgcttgccgtgctcgtagatgtcaaccgagtatttctgacggtagaaaaccatatctgcttctcgaatggttgtcaattccgaaaaagggtgtccaaacgcaagcaactccaagaacttcatcgtgtatgacccgcaatctcctgtagttgggttttgagcaacggtaggacaacgcacatactcaaaaggttcaactgagtacggagaaatcaatacatcctggcacatcgctctgactaagtacggtatcatttcgcaaataggagtcattctcgccttcacagccgactcccgcgtgtgcgatattaaagcgtcatacacagttattagccgttcattaaggttgattcccaaagcaacccaatgttcactcttccagttcatcggagcatacacaacatcgacatccttcagccacttcatattgggttcacggtttatgtgaactccattagcaatgtcggacagtaatttaccctatttgaacccgttcttattaatacacttcttgaagtcgcccacccgcttggtaagtagatgtgtcagcatcatgtccaatacaatacatctgtttgttatcatctgttccccgttcttgtgccacatcaacattgccatcttttctaaatgctgaaatgttcaaaaaatatatcagtgtacgtacacttccacgaaaaatttaatcatctatgtacaatttataacaaggaatgtacgaatataaatgaaacgtaccaaactttcgacccattcaccaggtgttagaaggttcgcaaaaaactcgttgggcactttgcgaaacccgaaaagagtgtgaatcctgtaaatccagaaaaatatttgataacaaccttaagacttggaaaaatgatgattgagatattaaataatccattttaatataatgtacttacacagagggtcctttaatgatattgctgaattcctctacttttgaagggtcaaccatgtccagggggttgtatgagacattttcagccctgataacaacctctatctgttgatttggtacatcgggcaccaagactgtttttgccttaaaaccatgaggatggacatcatcctgttcatagacaagttgattcttcactttttttgggacctttggggacgattttttttcttcttttgcttcgacagcaacagcattgtctgattcatcctgttaacaaatatgattgtcaacaacagtttcatacgtttttctatttttaaaataggtacatacattatttttaggaatatcggtcttgtctgcttcatctgaccctgggttaggatcctcagttcctacagacccctcgacaatacccggctcttccatgactacctgtccaagttaacgtacacaagtctatataatgtacacatataatcctatgcatgctatttcgaaaataggaattaaaacacacaaattgttacctccacatcagtagctgcagccaaatcaccaacggctttggtatccaactcccgtatgacctgcataatataaattttatacatttgaacagtaaatagtacattttatttgttgcaagagttagcttacattgttaactacttgaaatggtgacgggggatcactgtgggtcttctcaggtatttcaacttccatctctgtcactaatttggattctcctgccgcctcaacctgtagaatttatcatcggaaagaaactttttagtaatgtatgaaacaatatatatgtacacaaaacatagtgacaaaaatgtatgtacacttgtgccaggtacgtgagctgtatctccatcagaaggctcataagtttcttctgactcgctaccattagcttcagtcgatgcactggcatctcttgcttctttatgaaacaaaaataatttgcaaagtcttatgggcgtacacatatggaaaaagaacaagtgactaacacatacctgtgcagatgttgaaggtaaacctgatggattgtctaccatctctatgtcagcatcagctatttcatcggcccctgtatgggtaccaactaagccaggttcagcaacatcctttggtccattatcctgaaacataggctaccatagagttaagcgttagataagtggagaaattaatgtaatatatatgcatatagtcatggaaatctgtatataacgattaccagaagatctacctctgaaactcttgcatacacattagatggaacttcttccatctcggtgtcaacagtagcttcttccacaggcctctcttcctgtgtaacatagacagtcccagacattgaacctaagaagacagtcttaccaacaacaacatttcctctatcctgaaacatagtttaactaacttcttaagcgaatatgtacgtacaccatttaaacagattgttaagagtattagtagacgacataccagatgggattgtgtggatccagcataaggaactattaaaaatccagtgtctaatatctcttcttcagcggccgaagaatccaatccatcatttgcagtaaaatcactttcattattagcgccatactgtatcgaagcagacagtacagttatacatatggattataaaatatttagcaatgtacgtacatgacttacctgttcatcaatgaatccttgcatatcttccttattggaatcaggtagctcagtagtgtcaacagcaaaagaaacatttttcttcggctttgaaggttttcttcttccgccgacagcagtggtatgtactccagggatatccaaatcttcctctttggaattacagccaacagaaagtgcaggagtgtccacatcatgagaaacacgagtcagccttgaagactttctcgtttcagtgcttccttttgtagacatccttctcgatggcttcttcgcagtaaccggtgccttatccatagaagtaggtggttcccgcgaatcatgggaaggtatggtttgttctggccttttgccttttggatcaaggacagcacgtatctggtcacggacaaagtctttcatatcttcatgcatttgatacatttggtcttccagctccttgaaagacctcctcatttcaacaataaacctctcaggcacaggctctccaaaacaatcctcagcattctcttctttatcacagtccatttcagatatctgttttttcatagcaggttctttagggctcgggcccggtgcatttcgtttcctcttaacatctacaatagaccagttgctgctattaattggttttcttctgggtgcaataccaaaaaaatttgtaaacaacctttatacttatacttacctgtctcttctagttgtggtgggcgcaactgctttggtactctagcatagcctccaacccattcatcctcctgccactggtgcccatctatcaacagtgcctcaatgtaatcaacccttggatcatcaacttcatcatcccatgaaagagatggaggacaaacattatcagctggtttcacaatatagttgacctcaacctacacaaataagtatgttaaccatagataatgtacatttacttattatgtacgtacatacacaatttaacacacctcatcagcagcctcacactccaaaatgcgagatgtccggattgctcgcagagaggcaagacgatggatagacctctcagcaaatgtcctgttaggtacatcatcaggtcctagcttagcaattgatgggattgtttcgaaagctaaaagatggagagctaatgagaagccatggagtgcataagaccctacaagtaaaccccttattagttattgagcatcgtaaggagtttggaaatttgctatcctccccaaagtacgggtaaaggacacccttccccatgggtatttgcagaagaactccaggttcttagtcatctcgacagtcttcgaagtaggcctgttggggttactgtgggccgctaccacaccgtcaaccaaaataaaaagagatagtgccagttgcttccacccctccatgctttcctcctcctacagccagctcaccaaatcagcaattgttggaaccgtgtcccaaaacctctcatcaaacagagtcttccaaacactctcacactcaggtttcacactgataacatcatcaacgtctttcttcttgggatacttcccacattccagcccagttaagatactaaattctcttaatccaaatctgattggatgaccgccgaatacaatccacatctcattcaccttctttgtcactaacttacggcatattagtctaaggacaagcttagcattgaaagatgccttgtttttgggtattttaaaaagttccccaaatggagaatcgagaagaaactgcatctctggtttcccctttagtacatttgctatgtcagaaatgtactccggtttagagtacgcgttcatcttcgtctcggaagggtaccggtctaaagcaaagagtcttggtggtaactcttcaactgtaagatcttcagtcggagcaacacttggactacctgcaattaaaagtcatatactgttaagcaaaccgaagtagtgtacgtacacagacattttccagattataactcaaaatcatatttttggcggaaacagagatttccaattctacttctcaatttttcatcctaaagatatgctaaattccgacaaattctaaccccttaatcaaacaagctttacaattctgatacacccaaagacaacaaacggtaaattagagattctaacccagttcctccgttgcctttgtcgcagagcgttttctccgcggggaaactcttaatacccgcttctccttccctggaccatgctgcttcctcgggacttcgtcgttagctttattcccagccatagctaaagatgctatctcgccggaggttcaaatttcgccggaataaacagtaactttctcttggcttcgccgagaaaaacagtaactttcacttccccggatgtgggagttcagtggctcaattcaactatccaacaattcgaagttatgtcgaattttgaagcaatggatactgaatttcgtttcgctttctgattctctctcaaatctctccgttactctcttctctttttcgttttctcgggtttcttcgtttcagtttttttttttgtctttttcaaaactgaaccgcatcaactaaaccgaaaccaactgctgtagggtttggtttacgccgtcaacttaaccgatacgaactgctgcacggtttggtttgtgccattattaagttttcccagggtaatttggtccgaaattgaatgaaaagacaaaacgtgaaaaccagttctcactttgacaaacggtgagagcaaatcttttttcgtccacttctgtgaaaatttctttttatataattcaatatcacatggtgaaattatatatgcatatgattcttctttaattgtctgtttattgttatactcttacttaagccaagtgttttctctttgattcttttggtaaccttgtacataaaattgtatgaatgaatgaattattgggatagatggactggtttaatttggttaactccagttaactagatttcggtttaagattaatgtgaatagtatataagatgtgaatgtaactaattttagtttaagctttgtaacaatattttgagttgataataaacgtttgttacatctctctcttctccgattatagccccgatcatcggagttcaatatggtatagagctatatcgttgattgataatacaatgagactaagtgagaatgaaaaagtttgtagctgtatataaacattgatcatctttataatagggttatgcataatattgtgagtagaaggcaatataaaatcttcaagtacattgagaactaggtcgatcatcggattaggccattaggggtttgcttctgagagatggttaacaatttggtttaattaagtaaaccggtcggatttggttcgaatttaaacaaaaccgagattttgaataaaaagccctagtcttatcacttttttctacttgttgaaatgcgatttcattcattagggattcggtttcgttgaaatgcgattttagcactggaaaagcataaaccctgaaggatttcaccgacaatggaataagggtaagaccatgtacatagtaggatttttatgagtatcagaaacccaaaaaacattaaattaatgggtaaaacaactgatttgggcctaagtcgtatcactggagagatacttctgatactagtttttgatgatttggcggcttgtgattagtcggcaacgcgtttttgtgggaaaggagagaaaaaaaaaatcatttgctcttctcttctctcctcttcagtgcatcttgatacgattctttttcaatgaaaacgagaatcatcttccaaattcagatcccttggaaccttaatcgcaaattctctcacactcctttatatctacgtcggaggcgcttctcttttaactgttctcttcaatcggactgtctccggtatcgttgtagtggccgatgctagcaggtattttcgattttgcaaatattttttttcaatgatatcattacggatctcatcactgaaaacagatttattatcagtattataaaaattctcaaacaataaataaacattaaaattaatagtaaaaaatgttatgatactttatgaataccaactatgtgcatggtctaagtttctttgttttgtattatgtatggattgattaaagctgtattataaaacaaacaatgatccaactttaaataaatatttaaaaattaaaattctactaccaacacgagttacaatctagtatgcttattagtttattatccctttttataaaatctcaactaaacaaataacttcatgaaataatgggaaataatgagctatttattaagaaaatagaaaccaaaaccttaggtaaaatgtaaataatctataattatctaaactaacttaaaaaaaatagtaaacacattgaagataataatgaaaaatttccaaagataataatgaaaagtttccaaagatctcgtcaagcctcatcttcgcaacgacgacggtggatattgctcggtttgatcatcgttgtggttgctctcaaccttcatgctcaggccgataactataaatctgtctcagctcttctgctgtcaaaggccaatcttgtctctcaaagtactcttccgctgaaaccaatggtagtgctggagattgctcggtttgcggcttttgatcgcagtcgttgtgattagggttatcatcgtcagatgagacttcgagttggatatcagaagtggggacgatctggcattgttcgacagtaagatcctctcgaagaataacaatgccgtcgacgataagggtttgtttggaaacaggaatatgttgagacctctcgatcttttgtttgaccactaacagtgtatccctgtaatcaacctcaagttcgaatgatgaaccattcagattctcgacgagaaacttcataactttatcaatagaaacggatgaagaaaaagagagataattaaagtgattgttttgtagagaatttgtttagtatttatatcatttaatgaacgtattaaatagaactcacttgggcttagcccatattaaccttctcggttacgtgttccctaagtcaatagcctcctcgaagaatctaaatcttactaaaattatccaacgtaatgtttttaaaaaaggataaaaattcgaatgtatctgttctctttctccagtttccaattcgcatatcaattctacaaacttagcttaattcatcttcattattcaataagaacaattttcatttcaaaattctttgtaggtaattacatgtcttagaatatatgaagaaagttgtgaaaccaaaagcaaactttgcacaaagcaagaaacttcaagaaagactataaaccctaaaagaaaaaactaataaaaccaaaagtcttgaatttgacctaatagagccacggatcgggaacgatctcaacaatatcagtgtgagcaacactgttccactcgaatgactgatcttcgttcaatactctccctttgtgtacgaagaaataatcaccatcttgaggccgatctaaatgatcccttagttcattctgaaccaactcttgtctcagcattttcaccctatacgtcttgtacgtaataaaatgaagattcttcgcagctttaatcttgccggaatatggcatcacccgtaatgttagtattatcttccccacaggcgaatcttgaatgttagtgttctctttaaccgagtctgacggtggagtttgctcgttgtttctcaccggcgaatcttgatgacctttgatgatatcttttgctgcgtctgacggtggagattgatcgttgtttctcaccggagaatcttgaactgggcaaaaaggtcgaatattcaaaacaacttcagttgtcaaaggcaaatcctcaccgtaaatgagatctccgattataggaggttgctcctccgtttgaagaacttgatcgttgttgtcattagggtctggaaggacgaagagtacgacatgagagttttggagaatcttgcattgaccgatatcaagatggtcttcaagagcattgccgaagaaaagggtttgattgggaacagggatacgttgatacttctcgatcttctttttgatctccaacactgtgtcccagtaacctaattcaatgcaaaactttctgccattctgagtttcgaagtacacatccataattctgtcaatggtgtttcaagatcaatggagagattgatgaagaagaaagtgaagagcgagaaaagtatcgtcactgaatatgggacattttatagtcaatgaaagcctcgtcactgaatcttcaccgtcgttagttccttttaccaatatgatccaacggttgtgtaaagtaagcaattcttctttgttctttgtttaggttggttttccctctttgtgatttaaatgtaacttgttattcaagtttccgattttattgtgttattgacttattgttggccttgttagatagagaagaaaataatctactgtagtgattaaaatcactacttccttattatatctgatgtgagtgaatcgatttgaaaaaaggtaaatgatgaacgcaccataatcttaggactctgctttttttttcctttttctttcttttttactcaagtcaagttatcatctctttctgaagttttagaagtggtaaaaattatagtattttaccattgatgttgtagaaagatgattttaaatttttttcttactgaagatgtaaaaatatcataatctccacagaaatattgggtgatttttgtggagaaaattccatctcttcccctcatttaacaaaactcatagacaagacgaagggctcaccttatggtttgccacggaccaccttagctctcctcgataaaggcctctgctttctctctgttttctcctatgtattggttcatattttagtctaatttttatattagttttcagctaaagaaccacattcattggaaaaaaataaaattcgtcaaaaatcataatttaataaaaaaaatagaactttagaaaagtttttaggtttgtactatatcactaattcaaattatactaagggtatatatgtaaatttcatataaatttttgtaacaaaaccctaatttcaagatgataaaagttatatcgccgccacaacatcatgattcaattactaaggatatatctgtatatttcatatggatttgcatagaaaaaccctaatttcaagatcataaaagtttgtacgcagccacaacaccaaatcagattctacttgaggtttacataagaatctaggttataagagtatgaaacacccatattcttatgaaatttagagtcaatttcatttaaaagaaaaagcaatggatcattttacaaggtaataaggaagaagatgggtcatgggccatatagtattgtaataggcttaaaccaagtttagctgtgttagattagggtacttaagtcattaaccctcatagtcgaatcttggtgactgttgttgatgcctcccaattttatacgcttcacagacggaccttgagtgttggcgatatctttgaatgagtttaacagtggagatttctccggttgaggcacttgatcattgttgttgcttacaagctccatactcgttgaaacagggtattcttgaaagtaatcgatctctttggatgagtttaacggtggagacttctccggttgaggcacttgatcaatgttgttgcttacaagctccatgctcgttgaaacagggtattcttgaaagtaatcgatctctttggatgagtttaacggtggagacttctccggtggaggcacttgatcactgttgttgcttacaagctccatgctcgttgaaacagggtagtcttgaatgtaatcgatctcttcgtatgagttaaacggtgtagatttctccggttgaggcacttgatcactgttgttgcttacaagctccatgctcgttgaaatagggtattcttgaaagtaatcgatctctttggatgagttaaacggtgtagatttctccggttgaagcacgtgatcgtcgttgttgatcccaaacttgacgctcgtcgaaacaggggaatctagaaagttatcgatatctatgaatgagtttaaaggtgaagatatatcggtttgaagcacttgagcgttgttgggattagggttagggttaggttcaacgaagatctggatatgagagtggttgaggatcacacattgtttgatatcaagatgatcttgaagaacaactccttggaagattagggtttgtttagaaacagggatacattgatacttctcgatcttctctttgatctccaacattgtatcccaataacccaattcaatctcgaacttgtcgccactctgagtctcgaagaacacatccataatcgtattaatggagtttcaagatcaatggagagaatgatgaagaaaagagagtggagacagagaaagtgattgttttgtaaataaagttttactctggtttcatattttcactcatttaggattggcccatatataccttcttgctttacgtgtttcttcttaagtcaatgaaataaaatagacaaagctctcatattagttgttaaatataaatatgcaagttagttgactaattatttactttttagttataaatttgtttttaatttgtgtgatatatgtatgtattaaaactaataccaaaatatgtaaatagtctatagtagaatttgggtaataattttattttttttgaacacgcatttgggtaatattttaaatggtagaaaatcactctgaaagcaacacgtcacgatgcttatctaatttgttcatctttattttagtgtattcaaaattagcttaatttttttttctacttcatctacctcacaatgaatgaaatgaaatatatgaataatattttgatatttttcatcttatttgggaaaaattaagtattttatataataaaaaaatatttatataaacgtgtaaccaattatgagcttttagctgtgaaacaaaaaataaactttgagtgatggagttgacttcaagaaacactgaaagctataagaatagaggagagagcatcgttattaatggtctcttaaaacaactcttatgttaagagacatgtcttataactaacaaaagtatcttaaataagacacttttgaggtagatgaagataccaataatgatggtcgttaaactttcaaataagataaaatgaaaaaaatgttgttttatatgcgaactttaaaaaaatggccatttaatacataaactttttgtatggtcaaataaaatatgataaaaatgttgaccggttatttcacacaaatgttatagttgaccagggcaaaatctccatgacgttatcttgcattaacggacgcgataactctgttagcacatgttaattagttttctttaatgcctaaaacgacgccgtttcaataaaatcgaaacatcaaaatttccaaatcgatttttgaaatccctaaattctaaaaatcaaatccctagttcctagctactttgaaattatcttgagaattgatcggaaaagctaaaggttatgattactatgaacatgattttctaatccttcctacttctttccatcttcttaatcatcttctcgctatctctgcttcctccttctttgtgtttcctttttttttttttgcaaacaatttttggtttccatctgcatcacatggcaacaacatgttcttctttggaaatctcaatcccgttcttccaaggttttttcctcactctcataattgtatttcatcatgttggaacactgattaattttaggtgaatttccattgttttttatttgttttgttttgttgtctcttgtgtataaaatgttaggaacacacacacatgagaaccaatttgaatatgaataaccacattcgactattgacagcagttgttcgttttaatttgtgaaggaggaggagcaagatcgatgatgaacatggaggaacgtcaaaaagaaggccatttaaggatttggtctttagaatttaggaattagggatttgattttaattttagaatttagggatttcaaaatcgatttggaaattttgatgtttcgatttaaatgaaacggcgtcgttttgggtattaacggaaactaattaacatgtgctaacagagttatcgcatccgttactacaagataacgttatggggattttggcctggtcaactataacatttgtgtgaaataaccggtcaacatttttatcatattttgtttgatcatacaaaaaatttatgtattaaatggccattattttaaagttcgcatataaaacaacattttttccaagataaaatccacataacttttttgttgtattttggttctacgtatggaaaagtacaattttgctacatagttttttcttaatcctaaattgtgacttaagccacatggttacagagcccatgcatgtgtaagatgttcgaaaaatcatagttgtatcgttccactacgaatgactttaagctcatttacaaaacctcaattaaacaacaattgcatgaaacaatgattattgtctaagctaaaacctagataaactctaaaaataattttataaaaaccattgatcattaattaaaaaaaaaagaaaaccaaaacctagataaactctaatatagtcttatataattatctaaacttataacaaaaatattttgttataacaaatatattgtagatactaatgaaagatatttggagattatccaaatatttcgatgcttcaaccttcacaagcttcaaaggggaatattgagtgttaacgacgctggagattgcttggttcgaagcactgatcattgttgttattattgttctcaacctttatgctcgtcgcgactttcatattgcttctcaccataattggcgaatcttgaacgttaacgatctctttggctgagtttaacggtggagattcctcggtttgaagcatttgatcgttgtcgtgattagggttacggtaaggatctacgaatactttgagaagagagtggttaaggatcacacattgttcgatatcaagatgatcttgaagaacattgccttggaagaaaagggtttgtctgtaaacaaggatacgttgatacttctcgatcttctgtttgatttctaacactgtatcccagtaacccaattcaatctcgaacttgtagctgaagacaaaatcaatccttttaagttttcattgatagtttgcttaactttacaagaggagattgttcttgcttaaatacaaagactgagacttagctaaaccctaaggagacaagacatgtgtcatcatcaagttgagttctcacaatcaagggctagaaactgattctccagcttgagggtaaatgtctttaccgtactgccagctccgtttatgtcattacttgggaagcttccagactcttgaacatttgaagctgagtgaccgttgcctccatatttgtgtcttgggcttatgtactgcgaagcccattttcatttgtttctttgctgcattagatgaaacggcagtgtattgacatttgccagagaaaccttctactctgtttggaggctttatctgaatactgttgatagtagccatcctgagtctcgaagaacacatccataattgtatcaatggtgtttcaagatcaaatggagagtctgatgaactgcataatctagttttatatcaattcacgtatcaaatggactttatttgggcttggcccaaataaaccttatagattacgtgtttcttaagtcaatgaaagcctcgttaatttaagcattatacatgtttttttttttttttttttgacatcttattataaacttctgatcttatttatacatcttgttatatgccagattatccagaaatttttaaaatgttatttagattacccggttggaaagttaatttggagaatgatctgatccctttttttgttgtcaagaggtaagtcaataacacacaagtttctctttttcagctcgttattattttttggtaaaatactaaaattacttgtcatagatcttcttaagcatatttgtagaaagctctgagacgaaaatacaatttagaagaaagcaagaaacttaaaaaaaaaaagactgtaagctacaagaaatgaggagattgcaaagacttgagcttcgaaattatagggtattaagagccaccggaaacacttccgttgaaaatctcaattgtgtcgccttgatcaacacggtgccaccggaatgacctgttttcatccattacattctgtttatagataaagaaatagccttcttgaggcagacttaactgaaacctctgttgaatcttagccaactctttcctcagctctccaacattatcccctgcgttcacgtccaccggaatcttcctagtcccggatttcggcaacaccattactctcagcttcttcgggttgttgttgttgttgttgttgctcattgggatcatcactgttgattcatgatgaccgttactggtctgttctgttgaatttgactgtgggaattgctcggttttgaacacttgaatgttgttacggctttggtcgggagaagagatggaaagttggatacgagagtggttaaggatcacacattgttcgatatcaagatgatcttgaagaacattgccttggaataaaagggtttgtttggaaactgggatacgttgatacttctcgatcttttgtttgatctccaacactgtatcccaataacctaattcaatctcgaatgtggaaccactccgagtctcgaagaacacatccataatcgtatcaatggtacgtgtttcaagatcaatggagactgctaacgaagacggtgaaatgagagaagatgctatcaactttggattttagtaactaacgtttccgcattatgtggtaagtgttaactaaacgacctatttccatgggtttttgatatttacaatcgtgagaatagtaaaaatacaaaatatctgtggaaaatctagactcaaattataattgtttagatctctcttttagtcaattgacttaactaaagaataatgtaatgtattagctatcttactttctattttgtttttgggaatggtttttcagaagattcactaaatctgaaaaagtctaaaaccaaaaccagcccataatgtttgggcctggccctattgagccttcttggattttaaaatacataggcattcggttatccattcggttatccattcggtttcggttatatccattcggttatcggtttttcggttctaaagtttagtatccattcggttattttgaaagcttggttcggtttcggtgtttttggttttaaaatttagtattcattcggttattttgctttaaatatttcggatatttcggttatttttggatattttcggatatattttagatattttcaagtatttttactattttatatatattctcaagtattttaattattaagtctagaaataactaatatttttgaaaatatatttatatttaggatatttttggttacccaaaatatttaggtttatatccattctgtttcggttatttcggttatagaatttagtatccattcgattagtttccaatttttgattctattcggttatttttatttcgattttagttcgatacattcggtttaatttatttgcccagacatagttgcatcttgcatgtccactgcgagcaccgttggaaatggaatacaataaagaattaaaacctcatatatatttaaataatctataatagcttgaataggttgtattatacgattctcttgtaaataatcaaaaatacgatgaagaaaaaacacaaaagttaccaatacaacgtgttcactttacgtaatctgattcctttcttctccaaacacttcaagaactatttacttttcttctttcatacataactcctacactccaaaactttcatgctcaaaatctccatagttttttttgccaggaaatcatcaaagcacaatgacaccagaccgaacaactatcccgatccgcaccagtcccgtaccccgagcccaacccatgaagcgtcaccattccgctagctactacgctcaccgtgtcagagaaagcctctcaacccggatatcgaaattcatctgcgcaatgtttctcttggttttgttctttgtaggcgtcattgctttcatactttggctcagtttacgccctcatagacctcggttccatatccaagacttcgtggtacaaggtctagaccagcctaccggagtcgaaaacgcaagaattgctttcaatgtaaccatacttaaccctaaccaacatatgggtgtttactttgattccatggaaggttccatttactacaaagatcaacgggtcggattgatcccattgctaaacccgtttttccagcaaccgactaacacaacaattgtgaccgggacgcttacaggagcttccttaacggtaaacagtaaccgctggaccgagtttagtaatgatcgggctcaaggaaccgtgggtttcaggctcgatatagtttcgactattcggtttaaactccataggtggatcagtaagcatcataggatgcacgctaattgcaacatcgtggttggaagagacgggttgatcttgcccaagtttaaccataaacggtgtccagtctacttcacttagaaagattgattggtttgttatttgctattctctttatattttactttccttttgaatgattttgctttctttacgttttgtaacttggatttgggagtttggtttttctcattaaatgtatgatctttgagttaaacatatcaaagaaatcatttggtaaaagtaaaaacgcaaagcaattggcagatagttcaatctattacctcagtcttcttgagtctggcaaacagaataagttatggtttcctcttgctcgaaatctgagcttcaacaatttgccttctccattgatgaattgggacctgaataagaattttttgtaagatgaaacaatgtttatcggaagcaaaagcagagtccggctctgtttttttatactggcttatgataaaaaatcaaagcaaacttgggatcttggaatcagatggaagtgaagactcaatcgaagagaaagagagatgcttacagcaggaaaaccgccgtaatcccctggttccgtaatgtttttagtaacacaactattagcagcaagtcgaacctatagtcggaaaccaaaaacggatttagatgaagcactgcacaatttcattactccaattatgtttctatttttttaccttggatacaatggagacatggtctcgaacagctactcgtcctcctagtgctacaaagtcaccaatcctacaaaaaataattgtcgaaaagacgagaagcttatagtttcaatcaacggaacataatagttatttggttgctgggattagaagcatttactctgctgatccagctatgcctacttggccacagaacaagcaacatttgccaataatcacattgtgacctatctgcaatatttaagtaaacagaatagcatctcagttgtcatttacttgtgatctatgggggagttgcaagatagaatcgaagagacacctgaactaagttgtctatcttagtatcatccccgatcacggtatctctccagctgcataaatagtaaaggatatggagctagaaaagagctttacagggaactagttcttgaaatattctgttacctgccccgatcaatgcatgtgtttgctccgatttccacacgattccctatcttcacatttaaagtctagggagagcaagaaacagaacaaaggataaaagtgatgcacaattgttatccagattcaagagagcaatctaggtgtgcttacttgaggcttcttcaccatgtttccgttgtcatccacgtaaaacccaaatcctgaacagttaaaaaccaatctcaattcaatgccaattctcagaagataaagaagaaaacatggacttggtccataccatcttgaccaatgcagactccattatggatgacacataaatcaccaatactacaattgctgactgaaacattatacctgtagacaagtatagattctttcaagattctcttcaaaaacatgtataagacattaagcaaaaccgttacccgatctttgtagaagggccaattttgactgatgatccaattacagtgttggatcctatatgaacctctgctcccaatatagcttcttggtgaaccactgctccaaactcaaccagagccgaggaatcaattagggccgaacgatggtacattcctcctccgtttcgccatcttagaaaacctttctcaacattacctccactacttgtctctaatcttgacagttacaacaaaacacaagaagtatcagcaacaatcatttacatagaatagtcaccacctttacacatataacatctttccaccatctaaatatcacaatccggactctttaatagcgtaaaatgtttcatgcaacaattgtcatcaatattcgttcatcacaatgctgttaaatcatatacagatcatgaacatctttcccaagcatcataataccacacatgtcagaccttatacacgaaactgatacgaatctaggaatttcactgcatattctcagaggcattccaacaaacaccttgcgtacacgataacttgataagataaatgcaaacaaaagtcaaaactttaaaggtacaaattcttaacaagactaaccgttatgtggagaaacattaacagtgacggattcagttgattgatgagagcaaacccttaaatttcggctactagagaaaaacctagaccgcttgttcaaaaagacaccatgagtggacactgagaacaatgttcgcaaactatttgccatagtcaacaaaatttatagagattcagaagaaactgaacaaatttagcgacacgaccaaaaaaaaaaaaactttgaacttgcttttttttttttccctccaaagctttaaactctttcttttaacaaaacaaattagaactaaaaaatcaacatttccatgtaatattttatactcaacaaacaatcttgaaaccgcttcatatcacttttgtaaacaatgttactcaggattggctattatgagttctaaataaaatctgatgacaaaaaaaaactattttgatgaatttataaattttatgattccccgaaacctttgaccaaatatgttttttaatcatattattatgtcaatgattacaacagcacattttaatttcattatctagacaggcctgcctaacctatggaatattgaagtttgaacataataatttgatttaaacaatcttaattatcaatgactaactgtagtaattagactttgaatcccactaattccaatgaagattatattaagaaactcaaagaagaagaagagcaaagaaaacaaaaacatgtcttcttgtttcaaatcctctgtttctctgttctcagttttcttgtttatgatcttgaagacagttacttcagatccaacttatctctaccacatatgtccaaacacaacaacgtactcaagaaacagcagttacttaaccaatctccgaactgttctttcatctctctcctctccaaacgcagcttatgcatcgctttttgataacgcagccgctggtgaagagaacgatagcaacagagtctatggtgtttttctctgccgtggagatgtctcagccgaaatctgccgtgactgtgtcgcgtttgcagccaacgaaacgctccaaaggtgtccaagagagaaagtggcagtgatttggtacgatgagtgtatggtaagatactctaatcaaagcatcgtagggcaaatgagaattagacctggtgttttcttgacgaacaagcaaaacatcacagagaatcaagtgagcagattcaacgagtctttgcctgctctgctcatagatgttgcggtgaaagccgctttgagctcgagaaagttcgctacggagaaagccaatttcacggtttttcagacaatctatagccttgtgcagtgcactccggatttgactaatcaagattgtgagagctgtttgagacaagtcattaattacttgccgagatgttgtgatcgaagcgttggcgggagagtaatcgctccgagttgtagcttcagatatgagctttatccattttacaatgaaactatagctgcggctccgatggctcctcctccttcgtcaacggtgactgcaccaccactgaatattccttcagaaaaaggttaaaaatcttgaaactcatagaacataatctagtaaaaaggttgttttgtttcatatgtttttgaaattgtgtttaggtaaaggcaagaacttgacagttatagttaccgcgatcgctgtaccggtttctgtctgtgtgttacttcttggtgctatgtgttggttactagcaagaagaaggaataataagctcagtgctgaaacagaggatttaggtaaaaccaaaacagaattgagcgagttttgccattttctagtctaatttgttgaaactttcttgagaattttcctttcttaatgtagatgaagatggtattacgtcaacagaaacactgcaattccagtttagcgcaatcgaagcagcgacaaataagttctcagaaagtaacaagcttggtcatggtggatttggtgaagtttataaggtaactaagtcttgtgacttgtgatcatatagtcatactttaacaaaacaaaaaaggtttaatgcttctgtgtaaaactcattcagggtcagcttataactggagaaacagtagcaataaagagactatctcaaggatcgacacaaggagctgaagaattcaagaacgaagttgatgtggtcgcaaagctacaacacaggaatctagctaagctcttgggatattgcttagatggagaagagaaaatacttgtctatgagtttgttcctaacaaaagcctcgactacttccttttcggtataacaaatcatcactcattcctctaaagaaaatatcggttttcggattaatcagattgttttctttttgtttgtagataatgagaagagaagagttttggattggcaaagaaggtacaagatcattgaagggatagctcgaggaatactatatttacatcgagattctcggctaacgatcattcaccgtgaccttaaagctagtaacatactcttagatgcagacatgcatccgaagatctcagatttcggtatggcgaggatctttggtgttgatcaaactcaagccaatactaaaagaatcgttggtacatagtaagttgtttcttcctcttgtgatcttgacacttcaatgagttattcaatttcccattatgattaaacaagttctctctttagtggttatatgtctcctgagtatgcgatccacgggaaatactcggtgaaatcggatgtctatagcttcggagtcttggttcttgaactcataaccggcaagaaaaacagtagcttctatgaagaagatggtcttggagatttagtgacctacgtaagtactgttttataaccaatcaaaaactctttttaaatactgttttctgaaacattataaatatctgcaggtgtggaagctatgggtggagaattcaccactggagctagtagatgaagcaatgagagggaattttcagacaaatgaagtgatcagatgcattcacattgctttgttatgtgttcaagaagattcttcagagagaccttcaatggatgacattcttgtgatgatgaacagcttcactgttactttaccgattccaaagcgatctgggtttcttcttcgaaccatgaaagactctagagatccacgctcaggaggttctgcttctgatcactctgcaacaagcaagtctttgcctttgtctgttgacgattcttccatcactatagtttatcctcgttgacttcaacaattagttccagtaatgttatgttgtaacttgtaactatgtgaaacaaagcaaaaacttatttagttatgtcctaaaagacaattacataaccgaaaaagctctaaaaatgccaatcagggagatttgagatttcctcacacaacattgccaagacagcaagcttggtaaagtacccgattcatatgaaccatcgagcttggtacagaaaaatataagtcaaaaccacaatcagaaattacaaacctctaaaacaaatgttgttgttgttatacagatgaaagagagactcgaaccaccagtgttaaccgtaacttaggcgagagtcgaggagttttgcggaagtttgtctgcgaggtattccaatctcacatgcattaactctagcagcaaaccgaagagagcatagagactctccagttgaagatggatcaggtgatatgttcacaaacattaaggtctttgagtcccctcctaaacatggctgtttaaaaatgattctccttaattagaaagagctagatagacagattatttgcataatgattcagaagtaaaaatgttatctaacctggagcagatatgttaactttgagtttctgaaaggtacatgatcctctttctttgccaatgcaaatataacatcactcaatgcagacaagcttttgtttatagcctgttgaaggaaacaacaaagattagagggaaagtccaaaaaatttatgggaataacttagaagaccgtattttaaaagcaaaaacctgtgtctcctttaaccggtctccggttgccccgctccttgaaagtcgctcacttccagcaagatcaattaggttaagaacaccttgtacttgctgttcagtgctctgaaataggagagagtgttggtgttttcataagtgagaaataaatctacaacacaaaacataaacctgaaagacaaaagatattaacctcattcacaccagaaatcctaagagtaaacacgaaatgacttcttgatgattgttcattcatatgcgtcttcccaacagacctacaaataagaggtttacgatgtaactatacagaaacgacagtgtaacaatattctcaaaagccatgctctttgaagaaaaaagttcccaaaacttatagacaaacctgctctgagcagcttgttgcaaaagtgaggaaatttgtccaatgctgcatacatctactattgtcaggtcgctaacatgagtgtttccattaacatcatgtgtgattgtatattgtcttccagatgtgctactgtctgcccgcacagattctatagcaatcgttcggcttgtagacaacaagtctctgatggactcattatatatctccaacattgagacctacaattaaaattcgatcaaaacaatgctaacagtgaaagcattcaacaaaagtcagaacattcttggagaaatatttacctgcatcttgtatttccagccttgtgtactaagactttggctggttttgaatatttgttcgagtgatcgagggatcagtcctttctgttctggtgtttcaggcctgcccatcatggtataggttttgccagaacctgtctgaccgtaggcaaaaatacaaacctgtgtccacaaagatttgagaaagatgcaatgacagaagaatcagtcaaagtgatgtctgtctcatttaaacaagagttggtgcagtaacaaaggaatcagtcaaagtgtagtctgcttcacataaacaggagttcttaataaattcaactacataaggacaataaccatgagtcaaatactacttctatctaactagaatttgcatcttaggtatctatctacaagaaagtcaaaacaaggaagatattgaaccttgtagccatccaatgcgctctgcacaagttgagatatttcaaagaatacttcctcctgagaagctccgtggtcgaagaccttgtcgaaagtgaaaggatgtttgttacctgagacccccaagtagcacaaggcaataaaaatgtattaaactctagtacagacatatcctaattgagcaaagtaataaggtgggttgctgaatttaccactttggaccacatcaatgcctctaccaagagattcagttgatgtaggataggcaataacactggcctcttggcgtcctccatcatctggtagcaaggggcgcactcggcagaacacgcgtatgtttcctttgagttcctggaataaaagctttgcttagcggccataaagaaagtcatactataactgaaaagtgtttccaaaacgacattttcttacaagaatggtgttatgaagctttttccttaataactctccttcaaaaagttgacgctccgtgtctgcaaggcgatcttgcagttcatgcatacattgtttctgctcctcaaattctgtcattgtatgagacatagataaatccaccatctgtagaaagcaaataaacgtatgtcagtgtaaagaaacaattggcaaactaaagagtatctgaaagttggcagatcaccaatcaaaattccaaaggtacttgatcgcataataccttaagcttttccttagcaaaagctaattcctgctccaacattttaatacgctctttttgcaacgaacatgtttcctgcagcataagattgacattgtcagaatattgaaaatataaggcaaggatgtgaaacgtcgactttgactaacctctaaagatcctgatttggctataagaatgtccaactcatgagatgactttccaacactctccttatacatcagtatctcaccagccagcttttgtgactgtacaacatggcgatcacgatcatcacggacttgttgcagctcgctttgaaggttattaacttccatcagcaatgaatccttttgttttaccgcttcatcttgtgaaaccttgatcacaaaaggggaagataaacgaagtaagatgcaatgaaaaatcaatcacaaattaagaaatacaagaatcacgtttgtagaccagggatatttacccggctcgatgctaattgatcttgtagtgatttactgtgacctcttagtgtagtaagattctccagtatacttgacttttctttttcagcacgagtgtgagcctctctagctacttcaagatcagtctggagtttggtgttatattgttgcaaacttgtgttgtactcttgcagcctcttgtacatatcttctagagacgtcacctagaaagaaagaaaacattccagttaacacaacaactaaaagattgagccaagagctaagaggagttaacagagaatgaaacaagtaaacaacacattagcgaaaagcaaatcttaagtaccttctgcttcgcagccattttttcctctttaactttgtcaagctcttctctgagagaaacctgaagcttctcagctacaactctacaatctttttctcttctgtgattttcaattgcatcctagtagtcataaccaattaagagtcaccaaacttgataaacgattctttaggagataagtttgcacaatgataaacgattctttgagcgataaatccttaccagtttactcaacttctccttggacagcttttcctgaagtgattctatgttctccttcatctctgttatagttgctcgtagctcttcctctttggtctttgcatccaactctagaaataatgagaaatcaagtccatattcagtgtacacaaaacgatgtgagaaccaaacatgtaactagaaaactaaaattcacctttatcactgtatcttttctctgcagattgaagagaagaagaaagattttccttgtcttgaacatgagtttcatccacttgttggtaccatctaacacagaccttaagcttcttgataatatccgtcatttgctcaatcttaccctattagtaccacaatgcaaatacatattaaagtgatttttttcttagaatctcctataatcaaccaattggttattcggttcacaaaccttggtatcaaattttccagctttagctctctcgttaagcaaagccaacacttcatcttttgtaaactcaactttaccacactcctctgtgcttcccacatcgctgttcgcatcttgtctgttcactgtcgaaagcacttgtcttcttccagtaccttgcgtctccttccttcgcttgtcaaaaggaatacttgagagcgcttcctttttcttaaacatagttcaaaaaccaacaaaattaagtaaagccacagacttttatgaatcaatttctcaagagaacccacaagatcttctcaattgaacaaaaccctaaatcaaacaattaaactgaaaaatatcgttatgacttttacaatctccgcttctctcttagaagaaggaaaataaaagaaagaagaaggcttacgacgtttggactaggtaaaggagcgcgattctggttgcgaagtggcatcttcgatggattgcttcaccttaggctcgtcaataggatccaaatctcaatcccgagatcggcggcggatttcttaagaacccgggagaaatcagacctggttttttctgaatctgagatgggaaattagggttcttgcttttttcctaatgggggagattttaagaattgaggaaggaggaaggaagaaggaggagcctgttgtttgaatatttgaaaacagatcggcggactcttgtcaaaattgtaacgttactcttctcctcgattataatattaactttcaggcccatcagcattaaacaataatcttttttttccttagatacttactctcaggccaattgacttaactttcaggcccatcaacattgtaacgttactcttgtccattaatatttaaattattattatataaagtataggctccatttgagccaattgacttaaaactcggtccattaacactagtgatattccatattttgcgtgactttttgttggctaaataaattatgggaaagaaaaaaaagtaagatattaatcaaattggtttctattttatggttaaatctttttataaaattatttttcttttattttgtataaaatgaagggttttaaaagtttcaaattcttgtttttagtttgattcgcagttaatattcgattttgggataattttggagagttattacttactttaactaggattcaacccgtggtttacagcgggcctcggttttatatgttttttttttttttttgtcatcatcatcttattgatttataaatcagcagtgtagtcacaatgtaaagcatagcttattacattaggaacccaaaaatgattaaggaataaagattggttttggagaggagctttagcaagaatatcagctggaacattgtgatgtcttcttatccaattgaaatggattgattcaaacttccttgaccaccaatgaacgtctcgtatccagttgtgaacgccaaaatgtaccttggatccgttgattaggtcaaacagcatcttgttatctccttcaaagcaaacccgtttgtaaccatgactccaacagtgctgcattgaaatgattagcgcttgaatttcactctccagagcattgtccacctttcttcctatagcctgacccgccagtagataacttccattactatcccgaacaacccaacctgctttactttctacatctccattaacgaatgagccatcaaagttgcatttgatccatcctctttcaggtcgtcaatcttatatggtttttaattaagtatttgattatatttatattataaatttataaaatatttcttttattttaaatttttataaataatgattgagatttttattggttagttgttatttagtgattaaaataatgtgttttaatgtgtgtatgtaatttaaatataagtaaagtagtaacaaaaatgtaaaatagtaaaaacggtgtaattttttttgtgattataagtttttttattattattatttttgtgattataattctttttggaatgaaatatgctcatatttagataccaaaatgaagtagtgataccaatattgttgaacggttaagattgtctactttggatgctaaacatgattaggtatttgaattcgtgaataagtgactattattcctaacccacccgaaattaaaaatgtggatcatataaactttaatagattgaattgaccaaattattcttaatggctatgtacaaaatccaaaattgaaattgaggccaaaattatctatttttcaatttgtacttttttttaacaataagggatttcatttatttgtcaagttggattggatttaagttacaatttgcttagatattatcgaaaccggttttcaattaactttgactaggtttaaccgaattggtcaatttccacgtcattcagccacgtgacaatcgcattctgggaacactcgatctcaatcctatgtggcaaaactgagaatcaagaaaccacgtgtcaacatattagtagttaaaaccatatccgagtaatctaagtaacaacgtgaatcagataaggtattctttgtcacataaccaaacaccaaaaattataactcaacacttcactaatcaattattcaaagcagataaaaaaaaaatggctcaagcagtgacttcgatggctggcttacgtggagcatctcaggctgtccttgaaggaagtttacagatcaacggctcaaaccgtttgaacatctcaagagtctcggttgggtctcagagaaccggacttgtgatcagggctcagcagaacgtgtcagtaccagaaagtagtcgccggtcagtgattggactcgtggcggctggtttagccggtggttcattcgttaaagctgttttcgccgaagctattccgatcaaagttggtggtcctccacttccttccggtggcctacgtaagtaaaactaatttaattaaatttcacataatgactaatactatttttttggttaaggagataacaaaacgaaattattgtgttatagcttgcatggttataatttaggtttttatcaaacgtatctttaatcacttttgtaagataaaagttttagtaattagattatagagaccggttctgtttgattgattatggttctgcttttgtttttgtttttttgtgtgtgagcagctggaacagataactcagaccaagcaagagacttttcattggcattgaaagatagattttacatacaaccattgtcaccaacagaagctgcagctagagccaaagattctgctaaagagatcatcaacgttaagtcatttatcgacaaaaaagcttggccctatgttcagaacgatctccgtttaagagcatcgtacctccgttacgatctcaacaccgttatctccgctaagcctaaggaagagaagcaaagccttaaagatctcaccgcaaagcttttccaaaccattgacaacgtaagttttttctttctttagggttttgttttctagcggtttcttggtaaagaagttagagtgtgcattgattttttttatgcacaagattcttcctaagtttgggttaatctgagattgttgttttgttgattttcttatgtggaagttggactatgcggcgagatcaaagagtagcccagatgctgagaagtattactcagaaactgtctcgagtttgaacaatgttcttgccaagctcggttaatgaagaaagacttgcgttgtaatctgttgatgtcgatgttattataattactgctatccaagtactttgtctttctccttctcttcttgtctgatcaaatcggttatctctaatttcagtttcaagttttaaccaatatattggctggctctttagcaaaacattatatattcgtcctcgagctgaccactttgtaagttcatgttctgattctgagcattcccgtcctcatcattcccattatcagttttacaccaacttcgtgatcaaattaacctttgttccatcataaattagatgacataccacaacttttcaaagagttttgattggaaattttaactaaaattaatatcaaattttcttttatacagaaattaatggattgataacaacaacaaccatgcatttgtcacagtttcatgcagatagtagtccctcaacatatttgtatgtgaaagttactttgtcatcttaggaatcagaatgagggcttgagattctgtctttttgaggtcttgatgtcaggaatgtaaaagaaaatcgatgttaagacacatgatattcaagtaagatatgcaattaatttagcttcattttctaattgatatagaataggtaacatagagatttttcttaaagtttagttcaattaatatttatcatacacttctagtctatattacgtacacactactgattatcctttacatacatacatacatcatatacatacatcaaatgtataaattaatcatactatagtgaacaatatattttaacatagatcgtgaagataataaaaaatatacgtgtgattaggtcaaaggccgaggacacttaaaccattaacacttttataagtttttattcttcttcttgttaatcgcttcactttttctaagtgttcttcccactccacgcgcgagataatctaaactttagattttaattaggtataatgatataacaaatttcatgatatgacaaggaggaggttagaccatggtcgtttaattgtcatgtcctataagtcaacaaagaagtttttgtatgtgcttaaggtttaaacgtcatatggttgaccgaaactttaattagcttttaaagattctatcaaacggaagtcacatccaaatttactttgatctctataaattaaagaacacttaccagttaccaaacctaaaatacactatatttctaaatctaatcaaatcttaaactctacaactacagtttgatgacatgatttaaaaaaattatgatgagatcgatagtactatatggactttttcaaactaaactaagtcttactttaacaggaaaaacttataattaagtagttagacatgtttagtttagggattatgtatccctcgaagccaaattgacttagaccgcaaagctgattattttataaaaagaaaggaaaaaagtagatatacatataataatcatataatatgagattagataggttaaccaaatatttcaattaactaatagtggaattgtggttaaggagtcaaatcagatgacatgagcatatattgtatgtatattaaaagaagatttgggaacatttccaaagtaaaaatgaagacaacccctaaaacccaagagaattcgattgggtggtatgacttaatccacacaaaacgtatttacctattactaattgtacttatatgtcaacagttgacttattgttatttatttattcatgtgaatttcctcttattcatttatttcgaatcaccttttatgtcctttttgttatatttttttttttgcaacatttattattaacaccagaccaaaccgtttcagatttttttttcttttttgataaactctatcggctgatccgctcagtcccggtaaacacgcactaaaatacttcagagtggacttctctccaaaaaactaccacactgtttcaaaattccttgcaagattttgtcaaataatattttttttttttaaatcgaaatcggtatttctgtagtctaatgttattaatttgtgcacatttttaaacgtaaaattagaagaaaaccaaataaatagagattacctaaccattttaaaaagaaaacctttcaccaaaatccaaatatcctttttgctttatctaattccttcaaacatgaatattttcaaatcattccaaaaaagtagatattcgtgtttttattaaacaataaaacttgttcaacgtggacatttagtttagcctatcaagagcaaatatataattctgatttacgaaagagatatttgcattgtgttacaatattcttaccttttaaatcaattcagaattttttttttctttaattttgtcaaacatgttttacaaaagcatattaacgtaaaatactttttgattattttttattttatttatatcctgtcaacttcctgttcctgtatttagtatttgcaaatgatttttaataaatagattactctataatttaacgtaaacacgaacacaagagtgtgtccaatgagatgcgttattttcataatcatcaataggtatagagacgtattatggttaagagggtagctagatatattatttagtaattgtagttttccgtttaaattataattttgatggactcatgcctacatataaatacactatgtaataaacatcatgtctcatgcaacttcgacattaaattccaaagtaaactacacaattaagaacatgacggaagagtttgagatcgcaggaatctccaccggagcttggtggagctcgccaacaaacaccgccgcagtattctctggctactcgctgccatgttccactgagattagccctgatgtcacaaatttcggatggcaaaacttcgataacaagattaacgatcataatgatggttgtatgaacatgtaagtccacatgcatacatacattaacatacaaagtaataatattgaactttcttaaatttatattctttcttttatatttcttgtaggcataatagtttcttcgaaggactattaatcgatcctaacgatcaattactaccggatccatggtccaaaagtacaattcctaacgctaaatctgagctccttgaaaacttcccattcttagataacatgttcttggtcgattcagaagctgaatctttgttggatcatgaaatcagaaaccataagtcgtctaaggagcaaattacacaagactacaagaatcttacttcaaaggcacgtaacaaacataaaaacctaactatttttgttgtgactaatacttagaggtaattaacattacaaaagatgtgatgattctttcagaggagtgaagaattagaagagaacagcgatgagtattcaccgcgattactaaaaagaccgagactcgagacactatctccattgccaagcttcaaagttcgtaaagaaaaactcggagatagaatcactgcgcttcagcaactggtttctccatttggcaaggtaaattaaaacaacattactctaagtattttacgcatgtttaatctttgatttcttcttatttaagctcaaaagatttgtcttctaaactctttgcagacagatacagcttctgttctcaacgaagctgtagagtacataaagtttcttcaagaacaagtcactgtaagttcagattcttgatttttcatttgcagtcaaaatcaaatcaattaattaacaattcgtttgattctttaatttaaaaattaggtattgagtaatccagaacagaacaccataggatctgttcaacaacagcaggtacttaaaaattagttatatgttataacaactctcttttcttgtccttttgcttgtgacatcaagaatcttttcaaaactaatcatcaccaattaatgattcgtataattaatagtgttcaaacaagaaatctatcaatactcaaggagaagtagaagaagacgaatgtagtccaagaagatatgtagatctttcgagccgtggactatgtctaatgccgatctcagcttcatatcccgtggctgcagctgcggcttcggctgcagagatgaacgtacatctggtttctggcatcttccattctttgtaaacttataaactaaatacgtagatacataaacaaacaaagtaatcttccgcaaacaggggatcttgtaaagttttatgtccctttttaatttatacagaaatgtaaatgtcctgtaatacttcaaaatcatatattgtttgtttgcgtacgtttactatttttctctaaatgaacctactatttgaagcaaaataaatttgttaattataaacgtaaatgtcaaactaaaccgaaggttttgcatttggattataaaatacaatataaaaacctgcaaataatttttttttttttttttgaataaacctgaagtttagtgtatgttgcacaacggtttaaattgaggccaaccagaaaatgtttaattcctttgtaaatgaaaatttctcatctaaatacgaattagataatcgtattgccggccttaaaaatatgtggattccaaagtaaatgtatatataacccattagtttaactagaaaaaggttttatataattagcctcttttcgatctcttattgctttttttttccttctttttgtattagatttctttctcgaagttttaacactcgagcagaccatttagcaaaaaaagctaagagtagaaatgttttttttctcatgtaagcacgtcggttcccgaatgactcttcctagcggataatttttttctaataacttaataaaaatagtatttgactggaaaagaggggcatctcaaaccttccacctacaaaccctttaccaacctttctaaacaatattagcggcccttagatgatgaaagaatttgaggttccaagctcaacttttccagcttgaactcagagccaaccctgcatgaacattacgtgtaaaccaattgatgagtcccaaataattgactttttcagttggaagattcttagcaaactgcaaagtaatgttgtgtactttattattttagcttgtatgatcaagagatttggaaataggagaaggtgaggtttaacaagaaacactttataccaaaaatagctactttgtgtccattggtacaacttctaagaccatctccaatgtaaatatctattactagagattctaagaccatctccaatgtaaatatctattactagagagaaactctcctaacgttaactatagtcttagcatacctcattatctagtttcattttctccaaaatttaaatacatacacacacacacatactgataacaataaagttaagagtttattgctacttctgaaagaacgattaaaaaacttatgtcttgtttgtgtccaccacaaatgaaagaaaaagtgtattgactatggtattggattatttattctcttttgtgggttgtgtaagcgtttattttgaaatggtacataaatatggtaaaaggagcgagacaacacacagattttgatctctgttctacgagattcttcacatcttggatcttacttgctgaacaagttctcttctcaagattttaccagcagcggattttggaacaaggctgatgaagctcactcgtcgtaatcttttgtaaggagcgacctgatgaaatggttttgagccttagaaaacaagatgatatcggtccgattgattcaaacgacttgggtcataagttattaacctgtttggctatgaacttttgaatatcttgctctgttattgagctatttggtgatcgaacaacaaacgcaattggaacttcacctgcttcttcatcagggaacctacaacatacacaaattttaatgtgttcggacgtggaatcaactcggtatttatctgaatatatgactcacgggataacgacagcatctagtatatcaggatgtgatacaagaagaccttctagttcagctggagcaacctagatatatcaatcaaaccattcattatcaatctccaccttttgattggcaagtgagaagaagaaggagagaattgggtaagtgaaagtgaaacctggaagcctttgtatttgataagttctttgattcgatcaacaacataaaggttaccatcttcgttgaaatatccaagatctccggtatgcacccaactttttttgtctattgtttctttagtagcctgagggttattgaggtaccctgaaagagaaccagtttacatgactttcaaatgcacatatatgatatacataggaacggatcattttcaaacctttcatcatgtttggtcctcgaacccagatttctccttgttgatttggaggctgagattttccagtttctacactcactatctgagcttcaacacctggagcaagcattccagctgaaccagagttccgtttcccgagtctcgggtcttccacagacacaattccacacgtttcagtcattccatatccctgaagcaatcatttaaacattcatccatgactacgagcctacaaagagaactgaaactacgcgaaaccttacacattacgagcaaacatagaaggaccaaaccctaagaacaagatctgaaaccaagttttttgtttacctgcataagcaaaacattaggaatgtttcttccacattcctccatcaaatctttaccaagaggagcagctcctgaaccaatatacttaagtgaagaaagatcaaactttttcacaatactctgcttggaaagagcaaggaacacaggaggaacaacccaaagatgagtaactctaaacttctcaatattcttaagcaccaactcaagctcaaatctcgccatagaaaccaaagcatttcctctctgaagctgagaataagtaatcactgccaaaccaaaaacatgaaacataggaagaaaacacaagaagacgccatgatactctcccataagatcttgatccatagtaaccattaacgaagctgcaatgaaattcccatgagtcaattcaacacctttgcttgttcctgtagttcctgatgaatacaacaatgcagctgtatctgattgcttaatctcaacgaacgggtactcagaaactggctctgagagttccatcacgttatcgaaactaagaatcttcgaattcgatcccggaggaatctctacggtgtctttagatccaagtagaacaacgggaagatcaaagcctttgatcttatcaaacagttgattaacggatatgataatcttcggattcgaatctttgatctgtttcgaaacctcattcacagtgtaaagaggattcgcggtggtgaaaacgccgccgatcgcggttacggcgaggaaacagagagggaactggtaagagttaggagcgaaaatcaacacgacgtcgtttttgcgaatacctaaacggtggaatccgtgagcgagtctagcgacggcggatttgagctgagagaaggttaaggaatcgccggtatcggaatcggcgatagcgagttttgatgggtaagatgaggagttacggaagaggaaagagactaacgatgtgtttggatctttgggaagaacgagtgttggacgaagtgatcggtaaattccgtctctgccgtagccggatttctccatattttccgatctcggaggataaggtgagagaagtatgtgtgtgaggaagaagaagaagactatttctggtttctgattacttcacgtaaaacgttacatttgtctttaatgttagtactattagtatttaattttttcttagtcaataattaatcatagtcgcataaatttatgaatgtcaaacttaagtaactctatgattgctttaatgggaatagtcaattagaataataattaacaatgacgagaccttttttttttgtcatccgaaaattaattaggactcaaacgagccaatcctgaggaatgttgtttacagatgtaatatgaagcggttgggtacgaacttttcgtgccaaaaaatccgctttaacattagtactacgagagattaaagatagaaaaaagtttgtgaactcatccttgtcgctctgtaactcctccaaatacgatgagaaagccggccattcggttggggaagacaccatctccaccagatctgaacagtctgtaagaaaaactacatcttggttgtcggcaccaatcatacacttcatcgcccagaggagagcttccacctcggcatgtaaaggagataaacttcttctgagattggcagctcccaaagttgatgtctctccagttgatgatgtcaatcagtacaatgacgagaccatttctataacttttatagagaataaaataattaatttatgcggagaactccacagttaaacgtgtttgagtcgaagtagttttaagataggtgaccttccgagaaatgattatcagaaccatgtaaatgaggataaaacatgatgaaatatcgtatagtgatttgtaggatcgttaacaagtctttaaaacctcttagatttggcggaccgatcgtcggacagggatgagtccatagacctgagaaagaacgtggagcacactagtaaggacggactaaacgttacaatagtagtgagatcgtttacaaattaatagttaagattaaatggtacaaaaatctatttttggtcatgtaagtgtgttagttgttacgattatgaatagtatggtagctaaaagtagaaattgtgattttagtaaaataggtagtgactagtgagtagggacaattaaacaaataacatgttttacaagaatagtacttgtagaacaaatgaacataaagagaaagttcaaatgaacataaaaaggtatcgacaaaaaaggaaaaaaaggggaggatgtgtttaagatgcatggttataatggttataatgcatgcttcgacaatcttggtaaagaagaagtgattgtgagaagaatgatgcaacacaatatccttacctcccttccattttatgctttgttagattgtattaaaagttacaactatgaagacatcaccaacaaacatatgagattgaattcggtgtggtttctaagacatatctacttcctcacaagtcaccagcaaagacgaagaggaacatatgattgacaaattatattccattaacattattatgataaatcgagtaataagatgacaaaaaaaagtttagcaaatgtaattcactattgatagattataatgttattattattgggttttactgttcattatattttgtaatacaaaattattacacacaaaaataaattttacaaaagtaaaacaaaaaataatacacagttcacacagtaacgaataagaacgactccaatgaaaagacgaaaaccccggatgtgataatttttcatatttcttcttcaaacagctaagaagcccgacccgtatccgaatccgtttcggttctgtattgttgttgttcttctacaccaggaacaaccataccagtgtgatgctgatacatttgaaccggaccgggtgttttcattccataataacccgtccggttcattccatcaactgccatcataaccggcctaaccgttccaccatatacttgacccggaccagccatctgatgagtctgaggttggtggtatcccattggtacatgatggtattgttgaagatactgacccggcatttgaaccggttgtaccatatgattacccggttgaaccatatgatttccttgctggaccatatgattacccggaaccgaaccaggaacgtaataaaccggtgattggtgaatggtatgaccctggtaatgaacctgttggcctgggccaggggcatattgccattgcgagttaaccgggagattactctgttgcattacttgttccggttgaggattggatttcggagtcgaaaccggttctggactttccggtttaataaaaactggtggtggaagttccggtgtagatattcgcatcacaggagccgaagacgtcgaaccatacggcgaaggaacatcgcgacgaggcgaaccaggatccgaaagcgtcgagacttctcgttggatcttagctctcggatcacgatcacgaagctcatgcggcggagcagtttcatcgaaattatccaatccaaagagataatcaggaacttcagaaacaatcgacgagacttcagatctaactcgctcaaagactctaccggacccaccgttagataccgcggttgcggcggcggaagaaccgaggttaagagcgtcgaggaaccattgctcccgattaacagagctatcgaggagagagctgatactgctagctcgactatcgttatcttcttctccggcgacgtttttggtgaagagaaaaagacgaagacgagaggcgcgtgggttttgattctgtgcgacgcggtcgtattcgtccatcatgttctctacatcttcgtccgttgatacggaaatcaacgcgtcaagatcttcgtttggtagctggtacttcacgcttatgttgcttttaccttatccaaatattccaacgcaacaatcatcattattattccccaatcaaaatattttctttttataaattgaatgaatactttcccgcaaaattccaaaatctcatggccaacaaaatatctgcccaatttccaacaataagtttgaaaaatattttaataaacagcaaaaatgtttttttagaccaataattcatagttgacaaagaaaacaaaaaaatatcatatgatttagattcaattttgtatttgggtaatatgacagtgatcgccataacttcttctaaacccaatttttatttctaacgaactcactctgtttcataaaataagttgtattagattcgtttcataatataagttgtattgaaccatttttttgttttataatataaattgttttcaaatttttatgtaaattatatattattttaaatactttataattatttatattataaaatctttttttatgattggttggaactttaaaaaagtaaatattactaatttgtgtatttttaactaaaacaatttatattgcgaaatggagataatattaattaatcattggatcaaatgttccgagtcgataattttcatgatcgtgcaaaattaaatgattgaagaaaaaatatcatatgccagaccttttgtggccacagaccaataaaaatctgcccaatttccataaaaatcagttaagctgcaaaaaaatcttaaaaattaaccaaataattcgctcatcatatctaaaaatttccttgtggcgattttcttagacgaggcccacaaaggcccgataagagatcatatcaaaatcatccaactaaaatccctaatcggttttcaatgatcatcatgacacgattcgaaaatcggaagggaatgattttaacttaccggagagtttagcaagtttactaaggagagaggcgaaagtagtgtgacgatgaacagcgaccatgcgattatcgccgccgacgtaacagagctgattatccggcggacgtggcaagatccttcctccaaaagtacacatgaaccgtacgcgtggctgactatcgtactccgatctcggcgatgacgccagtgagtcgttgtcaagctccggcggagggatcgacgccattattttcgcctctttctctctctctatctctcctctttgtcgccgaggattttggtaatttggggatttttgttttttttgattcgatttcattcaacgaccatataaattattaaggtgaatgttcgggaagaggatatgttagagatacgtggctgtcatgtaccgcattctcacagcattattttttctcatgtaatataattagtttgttgcacaaaaaataaagtaatataattagttaaccgtttgaatattttaatataatttataaatgtgagagtattaccgaattgattattatcaccactcattactcgttagtgtcataaacgacatttattaaccgatttgcacaaatgataattttgaataaatgagatacagatatatatatatatatatatatatatatatatatatatataaatactaatttctatcgaattttatttatatgaaagaaaaaaagtaattttaaaaatattaccacaaaaatatatcaacaaaataaaacaattccttgattttctgtaatctttcgatcaaaataaaacaaaataaaacaatgatctttagattctctataatctcatatgttgcattgtgtttctttgtctttgccttaaaactctcatggacttcaaatcgatgaattttagattttttttttatggtattggagaataccttttgttgtaatgttttaatttttgagttctttaactcttatgcttgtaattgttctttgtttcaatgaataaaagcaaagattgaaaaaaaaaaagaaaaaaaaattccaataatcaataagagtagtcaataagagtgtaagaatgactgaaacaaactctagaaaacgatagttgattacaatgggagatttgtaagcacgagtcttgcaaacaaaacaataataaaagcgactttgataatctatgttttactcagaaatctaattacttatttactattacaaagttgtaacagaatcgttcgattgaagtactttagttagtgtagaaaatatcttatgaaatttggatttggtttggttttttatcttgtgaacaaatcttggttttttatatatattttatgttatctaatgcaacaattaatatctttgaacaaaaaataaaaaaataattaataacggtcgacaaaaaaataaaaaaaatataaatctaatataataattttatcataataaaactttcaaaaaacaaacatttaccatacgcattccttatgtaatgtaactatattttcatgagaaacattttttttttttcttttcgtctcaacttcgttaaagttttcatcaaaaattttgtgtccaaaaagactaatgtatacaactattatattttcttacgatcaatctgttggccaaaataatagcggtctatgagaactactggccgttattccattttatatgacagatgcatcgtagccgtcaaatagctatcagccagaagttagatgctcctaatcattcaccatatgcatttgacttgactccacaaaaaccattgtgatttaacgattttaagatacatataatttagacaagaaaaaaaaaaaagataacatataattaaaaattgtatctaatatatattttcaatcttcaactaggttcttgacgtcggcacaaaaaaaagagtaaagaaggaaaacaaaattcctgactttattttatttaattaatctagcaacagaattaaaaataaaatataatcaggagttcttacttcttagcatgtgacattgagctgagttggttattacgacaggcgatcgaattttattagtactaatcattatttccactaaaactaatttgaagtccatgttattgtattgttaaacaaaaataatgtctctgtagtttgattgatatttaatgacgttttagttcgactaaacaatagcgaaaagaagaaattgaccaatgaaaagaggataagtttccaatggtgttgcagttagtaaggttttttgtttacttgttgggtatgacgagaaaatctatatcaaacattatattatctatctatcttactctttcaacgtaatctatcatatattgtactatgatatacataaacgaataatgacacaacttataatttcaaattattacatttttccaaaagaaaacataaataagacatatctaaagtcttcactgttttttgctgtattcttggagttggaacaacatttcttggaacaatatgctcacacttgaagattattactaccacgtttttccaatttgttttcgttttggttttcgaagttttatgttttggttataaaaaactatagttgaattctctatgtttcttggctccgtaggattacccatcctttaaggatactcattgtggtatacgaaccttttgagcttggaacaatcacgattttctcataccgcgaatcaaaaagcaatacacgaaaatgtaatatgatcggttacatgttttccacaataaatggttatgtatttccgaaacttcccattgttaagtactactgaagtaaatccgcttatgaaggattatgcagtgaatctattcctcctctacgatttgacattatccctggtacccaggtttttatatgaaaacacgggacaacacagactaggaacatggtacacgcttggcctcgtagcaatgtactatgggatttggtcggaagatacacaccgctggtgaaatggctcaaaattgagaatagaaaaagactcacagttgcgattttgtcgcgttttttcctcattccggaattctacttcactgccaagtatggtgatcaaggatggatgattatgctcatttctattttgggattgactaatggacatctcagtgtttgcattctcatcatatagctccttaataaagattgtggatatgattgtttattttcgtttgcgtttagaatttaatttgcaaatagctttactaatactaaacaattttttttgttttttttctctaatataaaaactattttaatataaacgtaaatgtaactgaattcgagaaaaatgaaaatgaaacactagctatttgtgttaaaagtttgaaaagggttacatttcgtgtgacttttgctgtaaacaacactatgaaggaactcgtgcattaacactatatatattctaatatttcaagacaatcaatctcttatttgttctcattttgtattaaaggaactcgtgttttgtttttgtaaagggtccggaacaaaatgcgttagggatttactggtagcgtttctgttaggaggagtatttgcgggagttgccttggattggtaagaaaaatgtctttttagtcatgaaataaactcttgaccacgaaaaaagaacaacattatgagcatcaatgattcacattgaagattcattttttgagttttttttgttgttgttaactttcttgttattaatgtctaatttgatcatgtttaactctatttcttcacccgcaaatttatagttattgtgttgtggtaagcggtagcagtacgaggtcgaactaaattaaggaccaaaagttacatgttgggatccagaccatgggaaaatccaattggaaaactattcatacatggttaaaaaaagaaaagaagaacatattatgaagaacataattaaattatactatagtctatacataaggtggaaaattttatgcggagtcgacccgagacaacgcgaggttgggatctcgatcagtctgaaacttatattgatcaatctaagtctttttctctttcttggtttctcaacaattatattgtcgagcgatctatccacacgtaaattatatcctacacttcaaggttggctcgagcatctcacgaaggggatcgatctatagggcagattgatatgttcaagtgttttttgaagatattttggttcaaacaagtcatcatctcgactgattgatcaccagccagattaatccattgagggccttttgcacttttcgaactccgtgtttgatgcaacggtcccatcatatatagttcttaaaataacctaagtttggagggaaaaaaacacaaaaataaaagaagcaaaacaaatgttagaaacgacttattaaagcataacacatcaacaattcccatcccaatatttttgtggaagctttgtttcagaccgctatgtaatttgttcatgatagttaattcgttttctccattttgctaaagactataaatacatgtgttttgtctcttaactccatctagttgatgatatacagctctctctttctgttacgtatcttaaatctgaattttgttcttttacattttcagatcaattcaattcacgtcacatgttggatatgggcttcgccccaccaacatgtttaaaagcccaacacatcgaaattagcaacaaggaaggaaggaagaaaagatcggcccgttaaagataaaagagcccagcatcaaacgaagcccacctcgaggaagttgttgatcaagagaaagtcccacatcgagaagaaaactgtactatagactgtccttgcagtactataaatactgacaaaggaatgtcagaaaaggacacctgaaatatgcagagaagagcaataaaaacttctacttcggattcaaaagcataagtctagttttgacttgtgaagtttgtatttacgtaagtttaagctcggctgtagaaacaccttgtaaacggccgaacttggggaatattaataaagatcttccttaaggctcgtcatttcctttttggtttggaggttcggttttatacaccaacatcacagtatcttccctttttaaaaaaaaatatttatctcacagtaacatgtatatcttcttctaactgtttttttttatgtctccataatggcttacgtctcacaacaacttgttttctttaatatagatagagaagacagattcattttacaaaataaatataacaaaacgtatatcaacataattaaatgatttcctgtacgtagtacaagattaataccagtatattagaaactttaagcctctaagaaaaagtaaaattttaatcaaaatttaggattaagaaattctttaaaatgtcgaaactgttcaactatttattcgtaaacgcgcatattaaatacccaagaaaaaccattatttttcgtttagtgtgtaccagtggcaaagtagtagcctagctatattattttttatttttttttgaaaataatgttaaattatattccaaaaaaaaacgtttttacaacaagtgcagattggttttgagaattagagctgagaatagttttgaacaaaagaaagaaacagagctaagagattaacttcttgactgaaaccaaacttggagacttccatcataacgcttgtcccccttgaaacagatagaggacagctgatttctaatttgtttatctatccaaccaacgagttgagatgctgtgttcggaggctcgccgtgacgcctaccattccgctccctccacacaatgtagattgtggcttggaaaacatagcggcggagaaaccattccacacggtgatgctgagagtttgtaatggcttcaattatcgattgccagtgtgaagtgtactgcgttttgaaaattcctctcgctaaatctacccaaattgcagaagtgaaactgcaagtaaagaagaggtggtcccgtgtttctagagtcccttggcaaaaaatgcagtctgttgcagtgccatttgcccaattgatcatacgatcgcctgttgggagtctaccatgtgctgcaagccaggagcagaaagagtattttggggtggcatgactgaaccaaatcaccttatgccatggaaccctagctgacgtagaacgagtatgatgccaagtatctctagtagagaaagtagtcctgaaaacatcagattttcctctccaaaggaccttgtcttcagtttccgttctagtatcccaagacttagcctagctatattaacagtaatgaattttattaggaaaagttttctttttcatacaaaactgtttccagataaccagaaatagaaaataattaaaagccttcaaattttagggggtgttattggtttattgatttgtaaatctatatagaatttgaaaatctctattaattatgaaatcaagatatatggatttttaaataacatgtatttacccatggatttgaatccttctatttttctctttcaaatccattcaattacatttaaaacataatttgggttctcaaatccaaaaataaatgactatgcgaataacaaaggattttaactagtatttataaatcatcgaatcaataacacatgattttagttagaattttaaaatcaatgattgaataacaaataattttgtttggatttccaattccttataaatctataaaccaataacccctccttagattcttatgtttgttttgtttattgtaaataaccaattgtcaataaattcaagagattttttcggaaaaacgaaaagctaaataaacaaaatatgatgaatttttctaaaactatatagactattttgttttgttttatggttgacgatttaggtcttctggattggtgttagtatttaggtttactgtacagtttaagggtggtttagactattttattaatttttaaaaacctatactattttctgagttttcaaataaaatttaaattaatatcataatttttccaatgtaattaatggtttatgtcttttatgttaaatgttaaaaaccatctaatgaacgataccattgaccaaactatgtatactaattttctttgtattactagtgttgctgtaatggtgttgttctcttaatatggaagaatatgcatttaatgatcaaaaacaaaacaatgtgacaatttaacacttgtgattttttttaataaaccatttaaaaattatgacttgtgagctaactagcttgtaagtcgtattttaacattgtagcacttaacacgattgagtcttattctaacattctaaacgtcaaaccttgaagctttgaactagaattaagaaatcaacaaacacgtttattgttcatcaagatcataaatccacaaacacgttgacacttcaagatcataatactaagtttccaaacacgttgatatataaaaacaaacatcgtaattatttgcgaagagtaacaatggtggctaggttcgagaatcaagctcctgaaaatcttcacgtaagtatccacaaaactcaaaacttatatcagaaaatctttcataatcgtttttcctcaagttcttgttgatttatgtctaaacaaaaacaacaggggaagtatcaagcaatggttgtttgctgtattcttggaatcggatctcttgtttcttggaacagcctgctcagtgtcggagattactactaccaagtttttccggtttggttcacacaattctcagattagaaattgtgtttttttgaaatatgatgttttggttttatagtaaatatttacagttgaaaacttgaatgtcttgcatcttcataggattaccatccttcaagagtactcacattcgtataccaaccattttcgattggaacaatcgtgattttcgcttacaatgaatcgaaaatcaatactcgaaaacgtaacctgattggttacattgtatttacaacatccatattcttgctcatcattgtaagttcaagtctaatctctcatattttgttttattgttattttttatgaaactggattctgattctaaaactcgaaacagttggatttggcaacaaaaggacacggtgggatcggaccttatattgttttatgcgcaatcgttggttcatttggcttcgcggatgcttctgtacgaggaggaatgatcggagacttatcgttgatgtgccctgaactcattcaggtttataaattataaagatataagatatcggtttaggttgactaccttgtagtatatataacttcttgcttctttgtagtcattcgtagcgggtttggctgtagctggagctctaacatcagcatttaggctgataactaaagcagcttttgagaaaacacatgacggtctaagaaaaggagcaagtgagtttaacgttttcttaagatctcaaatctgacaactataaagctaattagtgttgaaaacttcatgttttgcttacattttatttattcatgcagtgatctttttagctatctccacattggtagagtttctatgtgttctgctatacgcatatgtgttcccgaaacttccaattgttaaatactaccgaagtaaagctgcttctgaaggatccaaaactgtttatgctgatcttgctgctgctggtatccaaaaccaatcagttttggtaagtttaaatccctcaagatctgtccctttgtggttattttaaaatattcttttaaaaaccttcaccattttctatttcttcagattctattcatttttaaagactccttcattcttaagtcttaaacattgtttgcttcttgattatattcttctatatatccagactgctgatgatgtttccaaggataaacggctaaacaacaaagagctgttgcttgaaaatgtagattatgtagtgaatttatttctcatctatgttttgacactatccattttgcccgggttcttatacgagaacacgggacaacacgggctaggctcgtggtatgcgcttgtcctaatagcaatgtacaattggtgggatttagttgggaggtacataccgatggtgaaatggctaaatgttgagaacagaaaaggactaaccgtcgcggttttaacccggtttctcctcgttccggctttctacttcactgcaaaatatggtgatcaaggatggatgattttgctcgtttccattttgggattaactaatggacatctcactgtttgcattcttgccaaagctcctagaggatacacggtaatctatctactccatgtttgatagtttctttgagattgcgtttgtatttaggttaattggactaaatgaccatgaacattgaccactagttaaactaggtttaggtaaatgattatatatatctttatttttaacaaacacagtgttataatttgaaaaaggtatatcaatgttgtgaaatgtaaggaaatgtttttaattaacattagataccaaaacaattataaacattttaactctgcctacatatacagttattttgattttgtataaattttggctttgtttttatgaagggcccggagaagaatgcgttaggaaatttgctggtgctatttatattatggggagcatttgtaggatgtgctttgggttggttatggcttattggtaagaaaaatgccttctgagttctcatcagcaatagtttcacagtcacaacattatttttgggggaagaaggggatcatattacatttttattggtataggattcttatcttcttcataaaatctagtgttatgttattccctatttgagaagtaattttcaaagtatgtaaaagtgcgcttacaatcaacaccattaaaacactacaagtctttcctgtgctgacacctcagctttttcagttaaccacagcttgacacctcattaaaatcaacagccaatcagaacatttcgattaatacacctcatttacgttgaccaataaaaacttactatttttccatgtcattccatcaatttaacaaaattaaaattaagacatgggcatagcccaactaaactattttcaaaactaaaatctacattatataaaaacatgggcctaaacttcataatttagaaaacttaggcctcggaaaataaaccgcagcgaatgtaccgaaccaaaaccgatgaaaaaaactaaaccgaacgaaacaaaaaatttgaaaataaccgaatggatattaaattctataaccgaaaccgaatggatacaaaccaaaatattttggataaccaaaaatatccaaaatataattatatttttaaaaatattagttatttctaaacctaataattaaaaatagatatataatagtaaaaatactcgaaagtaaccaaaaatatatgaaaatataaaaaataactaaactatccaaataatatttaaagaaaaataaccgaatagatattgatttttaaaaccgaaagaaccggaactgaaccgaatccaaactgaaaccgaacaaaaattttaaaataaccgaatggatactaaactttataaccgaaaaaaacaataaccgaatggatacgaaccgatactgaatggataatcgaatgcccatgactaagaaaacttatctaaaggcttgactggttgaaacgcagtgcctacatttgtgacaacatgagtttacggaataagatggttgcagttttaagcattataaaactttttgaacgactggtttagcggttaaaagttggtgcattttcggaagctttatgattggttaacggatttacgtttatggtagaaaaattacgggtttatgtttttggcaagctaattaggggtttacgtttttggcgggaaaatttcgggtttacatttttttggcgacaaaattacggatttacgttttttggcgggaaaattaaaggtttaggttttttggcggaaaaattacgggtttctttttttggcgggaaaattacgaaattacctttttggcaaaaaaaataagagtttatgtttttggcacaaaattacgagtttatgataatgttattatcatgatgatatctatcatgactatggtatgttgatatgatgatgaagaagatagtatgatgatgatggtgatggtagtataatattatgagagggtaatgatgatgatgatattgtgttgataatgaataaattgatgggttgatgaagccatttggaaaaagattgattatattcaatcggtttagagattttggtacacttaagatgtcatttttgttctttaaactctaattaaatttaactctatggtatggttattcgattctccaataatctaagtttcaatttttaagttttgaaaaacaaacaaacatagcttttagctttttattcttcttcaacatatgaatcaagtatgcatgtggaacattaaaatcaaagatgataactccatataacatattcttataaatctacaatgactttaaccttaccagaattaacacctgatgatttttaactcttttcacttttgttttgtaatgactcttctaaaaagatgttcgtaatgcaaaaaaattagcttccaaaacttataaaagctatatagatcttacttaaaaaaaattaacaaatgcattgagctcttaatcactttctaatgaattcttttgttctacatatatcatgaatcatgacaaataacattaatacctacatacaacttaacaaaattacatttaaaagaaaaaagcctgcgacttggcgccggtttcgccctagaatgaataaaagtactttataagctagcttacactaacacaacttgtttaagatcaaattagtgaatatgcattatataagaatctatatgtgagttttggtctaaattcacaaagtatgagaaagactctattcagtataaagggttctaagttcaaatgaaaagcaaggaagagataagagtttttgggtcgcttagagggttcactttatgcgccaagtttgagaaacaaaaggagatctcttaagctctctctcatgacatcacattgtcgatttcgtacaagcaacaagagcagacaaccagaatggtttcttcaatcaagccgcctaagagattgcagcaattcaggcccgtaattgcagctggagcacctgacttgtgtaagattcaagcatgagcgtgtcgggcaactctagatccttctttttgtctctttaaaggagttggttgtgttgtgttgctttgtaaggtgtgagagaagtttgtaacaaagagagaaagttgtagaaccctaaaggctcaagataagagcaagttcttagtggatttccgagaagatctcggcgagacgtagggattcaagtttgaatcctgaactcgttaattcctgtgtgttcttactttcaagttccgcattttacaaatgagtgaacaacagagtgagttgagaggtctgagattagacaaagtacaactcgagaacgttataatcctcacagtttggtattagagcttccaggttactacctaggagcaagaagatctgctcaagatgtcttcgggcagagcagaggtggagaagttcgacggagatggggattacatcctgtggaaagaaaagttactggctcatatggagatgttgggacttctggagggtctcggggaagaagaggaagcagaggttgaagattctaccactgagattagtgatggaggaaaccaagacccagaaactgcaacttctaaactggaagacaagatcctcaaagaaaaaagaggaaaagccagatctaccatcatcttgagcctgtgaaacaatgttctgagaaaggtcatcaaacagaagacagcagcatgtatgataaaggtcctggatcagttatttatggcaaaatctcttccaaatcgcatttacttgaagcagaggctgtatggctacaagatgagtgagaatatgacgatggaggagaatgttaatgatttcttcaagttaatatcggacttggaaaacgtaaaggttgtagtcccagatgaagatcaagccatagtcttgctcatgtctttaccaagacagtttggtcaactgaaggagacattgaagtactgcaagactacacttcatctcgaagaaatcacaagtgccataaggtctaagatcttggagttgggagatagtggtaagcttctcaagaataactcagatgggttgtttgttcaagaaaaaggcagatcagaaaccagggggaaaggaccaaacaagaacaagagcagatctaagtcaaagggagcaggaaaaacgtgttggatttgtggcaaggagggtcatttcaagaagcaatgttatgtatggaaggagaggaataagcaaggttccacatctgaaagaggagaggcttctactgtaactgctcaagtcactgatgcagctgcactagtagtttcaagagctttacttggctttgctgaagtcaccccagatacatggattctagacacagggtgctccttccatatggcctgcagaaaggattggatcatagacttcaaggagactgcaagcgggaaagtaaggatgggcaatgatacttattgtgaagtgaaaggaattggggatgtcagaatcaagaatgaggatggatctactatcttgctcactgaggtcaggtacataccagaaatgttaaagaacctcatcttacttggaactcttgaagataaaggctgctggtttgaatcaaagaaaggtattttgactatttttaagaatgatcttactgtactaactggaaagaaagagagtactttgtattttctccagggaacgacacttgcaggtgaagccaatgtcatagacaaagaaaaggatgaaacaagtttatggcacagcaggcttggtcacattggtgcaaaagggctgcaggttttggtcagtaaaggtcatctggataagaacatgattaaagatttgcagttttgtgaagattgtgtgtatggaaaaacacacagggttagctttggagctgcaaagcatgtcacaaaggataaactcgactatgtgcattctgatctatggggatcaccgaatgtaccattctccattggtaagtgtcagtatttcatcactttcattgatgattttacgaggagaacttggatctatttcattagaaccaaagatgaagctttcagcaagtttgtagaatggaaaacacagattgaaaaccaacaggacaagaagctcaagattctcagaacagataatgggctggagttctgcaaccaggagtttgattcattctgcagaaaagaaggagttagaaggcacatgacatgtgcttacacaccacagcagaatggtgttgctgaaaggatgaataggaccatcatgaacaaggttaaatgcatgttaagtgaatcagggttggggaagcagttctgggcagaagcatcgtctactgccgtgttcctcatcaacaaaagcccaagctcttcaatagagtttgatattcctgaagagaagtggactggtcatccaccagattacaagatactctagaagtttggatcagtcgcttatattcattcagatcaaggaaagctgaatcctagagcaaagaaggggatttttctcggatatccagatggtgtaaagggattcaaagtgtggctgctagaagacaggaaatgtgtagtctctcgagacattgtttttcaagaaaatcagatgtacaaggaactgcagaagaatgatatgtctgaggaagaaaaacagctcactgaagtagaaaggactctcatagagctaaagaatttgtttgcagatgatgaaaatcagagtgaaggaggagaaaagtcaaaccaagaacaagcttcaacaacaagatctgcaagtaaagacaaacaagtagaggaaagtgattctgatgatgattgtctagagaactatctactggccagggatagaactcgaagacagatcagagctccacataggttcgttgaggaagatgacagccttgttgggtttgcattaacaatgacagaagatggagaagtttatgaaccagaaacctatgaagaagccatgagaagtccagaatgtgagaaatggaagcaagctaccatagaagaaatggactccatgaaaaagaatgacacatgggatgtcattgataagcctgaaggaaagagagttataggctgtaagtggatattcaagagaaaagcaggaatttccggagtagaaccaccaagatacaaagctaggcttgtcgccaaaggattttcacaaagagaaggcatacactatcaagagattttctcacgtgtagtcaagcacgtgtcaatcaggtatcttttatccattgtggttcaatttgacatagaattagaacagcttgatgttaagactgcgtttttacatgggaatctggatgagtatatattgatgagtcagcctgaaggatatgaagatgaggacaacacataaaaagtctgtttgttgaagaaatctctgtatgggctgaagtagtctccaagacagtggaaccagagatttgactcattcatgatcaactcaggttatcaaagaagcaagtatgatccatgtgtctacacacaacatcttaatgatggatcatacatctatctactgttgtatgtagatgatatgctaattgcatcacaaaacaaggaccaaatccagaagttaaaagagtcactcaacagagaatttgagatgaaggatttagggccagcaagaaagatactgggaatggaaatcacaagagacagagaacaaggcactttggaactgtctcagagtgagtatgtggctagagtgttgagagcttttgggatggatcaaagtaaggtctctcagacgccacttggtgcacacttcaagttaagagccgtaaatgagaaaactcttgcaagagatgctgagtatatgaagtcggttccctaccctaatgcaattggaagtatcatgtactctatgataggatcaaggccagacttggcatatcatgtgggggttgtaagccggtttatgagtaaaccctcaaaagaacactggcaagctgttaagtgggtcatgaggtacatgaagggaacacaagatacctgtctaaggttcaagaaagatgacaaatttgaaatcataggctactgcgattcagattatgcaactgatttagacagaaggagatcgattacaggatttgtattcacagctggtgggaatacaataagctggaagtcgggtttacagagactggtggctctgtcaacaacagaagctgaatatatggcccttgcagacgcagttaaagaagccatttggctaagagggttagctgcagagatggggtttgaacaagatgcagtagaagttatgtgtgattcacacaatgccattgctttgtccaagaactcagtccaccatgagaggacaaagaatatagacgtgaggtatcacttcataagggagaagatagcagacggagagattcaggttgttaaggtttcaacaacatggaatcctgcagacatcttcacaaaaacagttccagtgagtaagcttcaagaagcgctgaagcgactcagggtctcaagtaactagggagaccacagatccgagattggaagtcaagtaacagtaagaagatgagttcagtgaactttataccaaggaggagttttgtgcgttttggtctaaattcacaaagtatgagaaagactctattcggtatagagggttctaagttcaaatgaaaagcaaggaagatataagagtttctgggtcgcttagagggttcactttatgcgccaagtttgagaaacaaaaggagatctctttagctctctctcatgacatcacattgtcgagttcgtccaagcaacaagagcagacaaccagaatggtttattcaatcaagccgcctaagagattgcagcaattcaggcccgtaattgcagctggagcacctgacttgtgtaagattcaagcacgagcgtgtcgggcaactctagatccttctttttgtctctttaaaggagttggttgtgttgtgttgctttgtaaggtgtgagagaagtttgtaacagagagagaaagttgtagaaccctaaaggctcaagataagagcaagttcttagtggatttccgagaagatctcggcgagacgtagggattcaagtttgaatcctgaactcgttaattcatgtgtgttcttactttcaagttccgctttttacaaatgagtgaacaacagagtgagttgagaggtctgagattagacaaagtacaactcgagaacgttctaagcctcacattatattaattaaacatatgtgtttatctcttcaaaatgtatagtaacctttaaaccgaaaaagtctacactcttgccattgcgaataaaagaggttactaatcataccccatttcttgattttttgaggcaaaaagtcaaaaacaagtaaacatatgtaaaattcaaaaggttatacaaacatctaactcatctcagattagaggagcaaaccaaggaagacaaaaatctaacccatctcaagaggagcaaaccaaggaagacaaaaatctaacccatctcagatacggtaggacgttggccagtgtggtccgacaattttgagtaccctaggcaaaaaatttaaagaattaattgtaagaaaaggactaaaaaactagaatcttataagatccagcactttcgcaagtgtttacagaaacaggcacttttcctcttgtaaaatgacgatgttacccttgttaataatttgttaatgagacatgatttttttagtgccaaagacagtgacgatgatgagcttcggtcggcgactatgcgtctatgactgtttttagacggtggtgagaatcgtgggtgaccgagtggtggctaaatataaagataattttagatttttctcatattttttcatacttttgtcttgcaaatctggtagagatttgatacacagaaactacttccatatactttatcaaaatctccaattctaaaagtctttggaagaaaaaatacagattttaaccttctcaatttcgaattgttaaactattacaaagtaatcaaaagggttttcaagcttttgtgttgggttagtgttaattggtccatattatattatcttctccgattgagtagacaaatatgatttcttcttcttcaattgatgtggcttctccaagccataacatctacagttttcatgaatttctcatcgatctggaagctatgaattgctacgacatcttcaagtttgcttcagatttgttaatgctcaaatgttacatgaagacgacacgagattcacaatttgatggaaataaaggaggaagaaaatgaatcttcacaattcctttaattttccttttgggttcattatgtactagttttcttagggtttagtttttgtaaacgcagtcgaagatgaaagaagccggttcactatgtatacatctaaatctcaaaaaatttgtttaatttttttttattgggttgtctatatagtatcatcttagggtttagtgttcttgaatcaatggaagattgtataataaagatttttgggatgttagattttccattttataagaaacgaggattgaggagaagctgtgaaaatgaaggaagaaggaagaaagaaggagaaagaaaagctgatgttgcaggggtatgcaaggatataatcgtaaaagccttaaaatcaaagattttgataaaattgttcctattttaacaataatcccaaatttaaaacataccttttcgtatatcataaaagaaaaactacatataatattaatataaataaaatcacatagtctagctctaacaagtaaagaaaaaaggtgaacacaaacagcaaaaaaaattactaattcatattgtgaagcaattaccaatgtgaagaactataagaaaaaaataatcaaaaaggtatgtatcaatagtacgtactataaaaatatgaaacttactaagtttgcttcgaccattttttcatacaaatcaaatccaaaacatcattttttatgaaaatgttttttaaagttttaaaaaataatattttaagcaaaagagagtttatgatttgaaaataaatatatttccactttactaaaccagaattttataatcaaagataataattagtttaaatctaaaaataataatactgtaaacctagtttggggtacaattctaacccacttgcatttaaatggcttgagaagtatgacgtggaaatgtgtttgtaggaagtctacgaagctgtagctagctaatagaatgaatgcattagactaacaatagtactattaagtggaaaataacaattaagacatcgttttgttattttgactagtatcatctaatctagtactagtaaattttgatatttgactaacacgccagatttaatgttgcatggtttaaacaaataattgttaatttatgtagcaattaagtatagtaagatttgcttagattgactcaactcttaacataaataacttaaatgacacacgtttgtttcaaaaactgtagtaatccatatctttggtaaaaaaacgaaataaccttaatgattaattgtaatcaaattaaaacaaaaaataaaaaataaaacaaatcttttatattttaaagcacaagtcactccaccaataaaattttgacaaatcagcaaaaccaaattatttttcaacagaattataaaatcaaaaaagaaaaccaaaacctatattacataattaaaacaaaaacgaaaatccagttaacgtgagaacaaactttttttaaaataataattttgaacaaaatttagataaagaagaatcttcttcacatatttcgtttttgatgttaaaaatactaaagaaaaacaatttaattttattgcatattataaattgacttgttttagcttaccaataatattttgacatgtatcaattcacaaataattgatttgatggtaggaatagaagaagaaaaaaacggttatgaaaacccttggagaatttatcatgactaataaaattcattaaaattcaaatatgacaatattatgtaaaaatctgccgacattaataaaagtctgtcgtgacgttatgaaaatttctttttaaaaaaaaaaaaaatccagtcaaacccgatttaacatacaatcagaccggaaataatttaattgagggctagctaataaatctcatataacaaaaaatttcgaaattttaaaaataaatctgccaaaaaaagtctgttattactaaaaaggttattctagtcataaacaaatcggccataacattgacatgagtaaatctgttatgctttgacactgaaaaacaaaactgtcatcactaaaaacaaatctgttatcactatgtgactgtgtagtaattttattttttaacaaaaatctgttgtaaaacaccagatttgttaacaagttaattaaatctgtgattacacaaaacaactctgtcatgcctatataacatttttcgaggttaacaaatctgttataacacaacagatttttgggtgcaaatagaaaatctgttgccaccataaagaaaaatctgtggtccggaaaacaaatcagtgacagatttggtttcaacattcttacttttgaaatttaaataaaatctgtggagactgtatgaaacaaatcagtcacgattaaaaaatctgcgaaaaaaaaaaaatctggcgtaacataacacagtaaagtctgtggtacaaaacaagtctgttgtaaaaaatctgtggttgaccaacaaatctgtgatcgataacaaatccgtcgcaacaagagccacagatttaccaaaaacgacgatggcattttcgtaaataaatgtggttttattgccttgctggaattaaatagtaatggcatttctgtaatattgtttttctctgcaaaggaaaacaaggataatttaggtataattattactcaaataactcatatttttagcattccttttgggtcattatgtataaaatatgggttactctagtaaatttccctatagtatatcaattggcacagcttattagttgatgtatatatcgtagaagatgacttcatgcatgcattggccacttttccaataactttctcagggaaagtcatacattcggattacactataatctagtcgaccatatatagaagaagtaactaaagctttcaaacttttaattctttaatctttttcttttgagtcctcatctcaaacttttttttttttttttttgtattaaattgacctaaagggacgttcacatagtggaaataaaagaaaaggtgacaacaaagatcagaccttagggtatgccaaccttttgagtcttattttatcttctcaaatttgctgtcaaaccttaaaactctataatgattttactcaatcatctccatgttgtgagaatcttgttctgattctacatgaaagctttgctcgtaataatttcaacaaattcgttgactctacaaccaaaaccctcatgtgctaactttcaagtaagtatatgtagttttttgctcgaaataacaaaaaaaaataagaacaaaacatcatcttgtgtttgatccaattcttgaatcttgaaacattcttttgagctctctataactatttaaaaaatggcggatggatacgagaaccatgctcctgaaaaccttcaggtaagtatccaaaaaacccaaaatctttcattgtgttttgatcaaattcttgttcagttgtttgtttatgtatgtattaaaaaacaggggaaatatcaagcaatggttgtttgttgtattcttggaattggatctctcttttcttggaatagtatgctcactatcgcagattactactatcaagttttcccggttcggtttcggttttggttcgagtttcaattctgctatttcgttttagttatcaatttaaatttaaattttgaaaaatttgtgtttcatgtaggattatcatccttcaagggtattcacacttatataccaaccaattgcccttggaacaatcatgattctcgcataccgcgaatcgaaaatcagtactaggaaacgtatccttaccggttacatcctattcacgatatccacattcttgctgatagtcgtaagtatcagtttaagtcttactctcagaattaatctttcttatggaactgcatggatttttattatggactcaagactctaaaaaactttaaaacagttggatttgacaacaaaaggacacggtggaatcggacattatattgtcttatgcacaattgttgcttcttttggccttgcggatgcgaccgttaaaggaggattggtcggtgatttatctttgatgtgccctgaacttatccaggtacatcaagtttagcatattcaaggtctctggtatacaaaaatcagtttagataagtcagcttatataaaactccttccttgtagtcatatatggccggttcgggtatggctggtgctctaacctcagtgcttaggctaataactaaagcagcatttgagaaatcaaacaatagtttacgaaaaggagcaagtgagtttagcatcttaatcccaaatccaacattttcaaagtgtttaaagttccatttcttgctttgtttgtgttttccctgttacagtgatattcttagcaatctcaaccttcatagaactactctgcgtgattttatatgcatatgtgttcccaaaactccccatcgttaagtattaccgaagaaaagccgcttctgaaggatctaaaactgttgttgctgatcttgctgctgctggtatccaaaatttatcagatttggtaacatcaaactcctcaagaattctttcctttcttggtttctttaaaaaaaatcatcaagaatatgtttcttgattcattctttttttctacaactttcccactctttaaacattatttagcttcatgatttttctacgcagagtgatgatgattccaagaatcaaatgctaagaaagaaagagttgttgcttcaaaacatagaccatgcagtgaatctattcctcatctacgttttgacattatccatttttcctggattcttatacgaaaacacgggacaacacggactaggtgattggtatgcacttatcctagtagcgacatacaatttttgggatttgttcgggaggtacgcaccgctggtgaaatggctgaagcttgagaatagaaaggccctaacgattgcggtcttgacccgttatttcctcgttccggcattctatttcactgcaaaatatggtgataaaggatggatgattatgctcgtttctattttgggattaactactggacatctcactgtttgcattatgactatagcccctaacgggtacaaggtaatctatctactctccctatgctgttaaccaaattaatttgaatatatctagaaacttagattagttcatatttagaaaacaaaacacattatctttacaatttttttgtgttataccctttgcttttacgatttgaaaatataacacaagttttttttgacatataaatacaaacactataataaacaaacgacctctaccttcatatttaatctgattttgtattttgtgaagggtccggagaagaatgcattagggaatttgctggtggtttttattttaggaggagcagttgtaggaatttctttgggttggttatggcttattggcaagaaatatgctttctgagttctcatcattttgtgcaattaattccgatgaatctgactctttatggcaaaaaatgagaagcttggtgcctcgctcgaacctaactgtttattcatgaaaaaagaagaagaagagaatactaacacgtaaaactttcgaaagcttgaagtgatgaattcttatttcgatgcttcaccaaattataaaatttcactttttcaactccacaatttgctgtatctattttagttaatattttagacccatttgatcattttattaactattttctaaaatcttatatggtgttatttaaccatagatttttatagaaactaaatcctaacagtctacttttgtttgatcactgattataattttatgcattaaagtttagcattgttccatcagatatttgtaaaacaaaattaatagcaaaataaagtcattcatttaagctagtaacggacggttttcttcgagagaaaaccagtccggagtagaagagcttacatgggaaaacatagaacctcgtgctcttttcttcttagcaagacaatcagcagagacattgtttaagtatgtaataaaagataaagaaaaacgagaaaaactaggctttgaagcattaaaatcttttcactccgaagaaaaagcggactactcatcaggagtgttcaaaagttgtgtcgactccttactatctgtctataaaataatgtcgaaaatggataaaaatataagaaatcgtattgcccataagagagcctcaacagatatttgtaaattatatttaagagttttaaaatttggtcttattaaccaagtgttcatggccaagtgctttcgtcatgttggtccagactagagaacacttcttttaatcatgaaaacttaactcattgtttcctttatgtaaacattttaaagtggcaaaagttttttcttaggtatctacaaatattgagaactagtttcggttacgatccaaaaaagaagtaggtgttatttagttaagattttaaatattttgctaaaataagatttcaggcattttcgtgtaatttacaaatacaaaatgtagtgtgtaatttagacccatatttcctttcaaactaaccgatcaaaacattgatcacaaaatccttgtgtgcaactaattccccaaaaaagaagaggagaatactaacacgtaataatcaatttgaggtgaagtgtttatttatttattttgctaaatatttgaggtgaagtgttattttgataaatgcttcacttatcctttttcttttttacaacaaaattagttcatccatttaaattagaaacggatgattttttttaggagaaaaccagttcataataaaagattttatatgaaaaaaagataaaactttgtgctttttctttttcggcgaggcaattaataccaatattgtttaaacgtaaaataaaaagataaagaaaaacgataaaagttaggttttaaaatattaaaattttataattctagaaatgtccaaaaactaagtcaactacttcaaatgcttcacttatccaacttcaccgattctcatcgagtctatttcatacatagtttttattttcatttattacgtttagaccgatctcacagatatgtggatatttaatgattaaggattttaaagaaagttttgctttcatactatatcgtcaacaagttgtctaaaaataggaacataaaaaaagctttcacactttgaattctttaaattctataatcttttctttttctttttgagtcttactttatcctttcatatttgctgtcacaccttgaaaaggtctattattttactcgctcatctcctctttttaagaatcttgttttgaatcttcatgaaagctttgctcgttaaaaaatcaacaaactcgttgactctgcaaaaccctcatgtgctaagtttcaagtaagtatctctagctcctttatttgctccccagcaaaaaaaaaggaacatagcatcatcttgtgtttgatccaattcttgaatcttgaaaacaggtttatgttcttttgagctcaatggcggatagatatgagaaccaacctcctgagaagcttcaggtgagagtttccaaagaactcaatactcagatccaaaaatctctcattgtttttctgatttaaaaacaaaacaaattcgtgttttctctcttgacttttaaaaacaggggaagtatcaagcaatggttgtttgctgtattcttggaattggatctctcgtttcttggaacagtatgctcactatagcagattactactacaaagtttttccggttcggtttcggttcggatgattctcagattccaaattggtttattgaattctgatgttgtgtgtttagttatcaagaagttgaaagaaacaaaactttacgtttcttgtaggattatcatccttcaagggtactcacacttgtataccaaccgtttgcgcttggaacaatcttgattctcgcataccacgaatcgaaaatcaatactcgaaaacgtaacctcattggttacattctattcacaatatccacattcttgctcatagttgtaagtttttgtattacatgtcttgctcttacattaatctttcatatgtaaatggattttaattattgactcaagaatttgaatgaataaaaaacagttggatttggcaacaaaaggacgtggtggaatcggtccttatatcggtttatgcgctgttgttgcttcttttggcctcgcggatgctacagttcaaggaggaatgatcggtgatttatcattgatgtgccctgaactagttcaggttatacattttagagaatattgttttagactaaccggtttagattaacctgaatttactagctaacatattcctacttgtttgtagtcattcatgggaggtttggctgtatctggtgcgctaacatcagcacttcggctaataactaaagcagcctttgagaaaacaaacgacggtccacgaaaaggagcaagtgagttaatgtttttgaaggtttcaaattttgaaaaccgttagaattaaactccaatcatcaaagtgatatttttctgcagtgatgttcttagctatctccacatgcatagagttactctgtgtgtttctatatgcttatgtgttcccgaaactcccgattgttaagtattaccgaagaaaagccgcttctgaaggatccaaaactgtttctgctgatcttgctgctgctggtatccaaaatcaatcagacttggtaacttcacattcctcaagaatctatgtttcttgatttttattattattttcgtttttaagattctttagcttcttgattcttctatgcagactgatgatgattccaagaatcaaaggctaagcaacaaagagctattgattcaaaacatagactatgcagtgaatttattcctcatctacgtttgcacgttatccattttcccggggtttttatatgaaaacacaggacaacacgggctaggcgattggtacgcacttgtcttagtagcgatgtacaattgttgggacttggtcgggaggtacacaccactggtgaaatggctcaagattgagaatagaaagttgatcacaatcgcggtattgtcacgttatcttctcattccggcgttctacttcactgcgaaatatggtgatcagggatggatgattatgctcatttctgttttggggttgactaatggacatctcactgtttgcattatgactatagctcctaaaggatacaaggtaatctatttattttacaatttgcatatgcaaacgaatacaatctttgcgtttgagacaagtaatctcaccaaaaaaaatgtgggggtttttgatttggtgaagggtccggagcagaatgcgttagggaacttactggtgatatttctgttaggagggatatttgcaggagttgctttggattggttatggcttattggtaagaagaatgccttttgagttttaatcactccaaaacagtggttcactttaagttaatttggaggttaagttgctttcatattctttgcttgtaacctgtaaaaacagaggatgtttaattacattttctatgtatatggggtgttaaagaatgattattcctataactgacacatgtcattaagccacaagttaaggtgacaatcttcaagtcgattgtaagaataggattgagagtgacctctttccccgatatttttcgtatttgttcttttcgacaacttctttcgcatattagcaaacttggatgagtttgtgtatattctttttatcgctttgtttgctctaatgctctagctaattggctaattgcctcagggtatatcagatggtgcatatatttgctgtaaccattttgatatttgaattgaagaaaattagttgataaaaaagaagcagctgagcagaaaatgaaaaacaattggtcattaagttttttttaacaactaatttagtttttctacatttagaatatattcaaaaacatttgttctagaaatactattcacttttactctcccacctctcccattaaatttgtctcattaaataatgttaattaattaaaaaaaaccgcaatgtatatttgtcaaacgggtctccacttatatttttaacgtatattgcaaaataagtaattacagtttaaagagttctgcacatgaatttagttggccaaatcatgagtgtgactttttaattttatatatatgagacaagcccaaagctaaaatccaaatgcacaaaatttatccttcaacattgaatcctaagacagaacttctccctcaatgatagcattttttttttgtcaatatgttcttaaattatagtatgttatttcaatagcaactacattatactccaattgtaagatttgttttatatcgtaatcttgcattgttccctgttatgtgtaattcttcattatatttcttttctctaaccaaaaaaatatattaaaatttttatctttccctgttttttgtattaacgttgacatataagaattaagaaaatgcataaatgttttaaaagtatagaaagtaacggtgagattgagtgtcaagttttgtatgaaagtttatttgatttacacatatcaatattgatggaagataagaagtttcatagttcagaatttataaactctatatgatacattaggaagggagcatatgataagtttttttttctaactttacctaataatcaaatttggtgctctctattattgtgacgtcaatagacataaggataaatataggaaataaataacattaaattttataaacttttatgaattgtttttaattcaaaaattagttcaaactacataagcgattttatacaaactttatgacatgtggcatatttttctatgttttatttccattttcattctcacttgaaaagaaatgatatacataaggtatgaattataagaaaagcttataaatagtagtttacagttttacattgatttttattttatttagcatgttataaaataattattcttatcatcaaaatatatattttcaggttttttttttatatgaagatacatcacacaaaggatctattcatccaccatttttattaagtgatgagggtttacagtcatttttgtttttgatttgcttgggcttttcttatttttgctgatctgttcaaaaaatatgggcatgattatgagacctgatttactccatatttagcactttatcaaggttgtaaatattctttttgttaaattttattagtgttttcattgttttttgttgcatttagtatccacgtgatttttcttgtgttttagaaatcctatagtgtctttgtgtgtgtgtttttagttatgtgaagttaaaataatggaatacacacatgtagatgctaagaagagaaatgatgatcatgaacaagtccaaagtgtcagaaatatcaattcggatgaaggccttactttcgaatttagattcagaaatttagttagctttccactgatggtgatttcaagccaaacggaacagaggtttaagaattatcatcgatttagtagacacatatcattttcatgcttaagaaaagctcatccagaaattttccttcaatgccagaggttatattaacttagtgcagtaggatcaacatacaattagagactttttaatgatgtaatcatctaagatatgatccactttattttggaataatccggtccaaacaaatttatattcaaggattttttagacattttttaatatagtgagatcaacaatttttagacatttttaatacagtgagaccactagagactttttcatgatatcattatccaagatttgacccgttttatcttgggtcgaccaggtctaaacgaatttgtatttaagcaatttttagacattttttaactgaaatttgttttgtgaaggattcttcaattctatcatttatatttttgtttatgcatttttcttatatctttcaccatgtttaatgagtagtcttttgtttgatcatgagttatgatagattaggataatttgatagttaaatgatgatgatttatattgcttattgtagatttcttcatttaggttaatcttattattatgtgcaccgattatgtggttcataagtatctggtgaacattttattttaagtttttttgttaggttatacagctaacattaaaaaatagtaagaaaatacaagggataatatagtgaaaaaacactgatagtgagaacatatttcctgaagtctctcttcacttcatttggaaatggaataacttattttggcaatgagatgtttgattactgaacaataacatttggtggtttttgttcggaagatttctaaattggtgaaaatagagcagcatcttgtggggtttgatcaacatatacgaatgaagtaaaagaatgcaaagaaattgcgattaaacactatgcaattaaacctcattatggtcttagtaactgaataatctactcagttactaatgtataaatatatttttgctttatgataattattaattattattcatgtaaagtttaaattccaaataaacatatggattagtcatacctcaataattactcttttaatagtgcataatatttagttacttaattacttcaatcaagttttttttttgagttttcttgtcaataaaaaatgtcccgtttttttttattttgcatcaaaaaaagtatatataaaagaatacagagtaaaatagtattttaaacataaacttttcactttaacaaaattttctacttcaattcttaactagcggcacaatacttatttattttaagtgtttgatgatactttttctacatgtaaaaatcaattaacatatataaggtaatttttcaaacaaaaatataaaaatttcaagtatatttataaaattaaaatatatcaaaactattaaaaaaaattaaaactaattttattttgcacatcacgcgaggctacttctagtgtatatatattgtttgatgatgttgtgttttatatagagaaaaaacaaactcatagcataatgctttttaatttcgtcagaaaagccaaattaattagacaaaactacatttttcttctaaccacaccttatagagtgcttttttctttcaagtgcgtttctatatctgtgacgaagaaatacgtatcgcactgctttttcttttctttttttcttcaaaaaaagagtttgaaacaaacttaatggtgagaaataagtagaaccacacataaaaagctggaacgcgtcgtacattcacgcccttactttaatctatttggttctgtttctttttcttctgtgtctcatattatatccttccatatttgctgtcaaaaaccttttaaaagtcttattattattttacttgctcatctccttgtattaagaatcttgttttgagtttttgtgaaagcgttactctttaaataatcaacaaactcgttggctctgcaaaaccctcatgcatgtgctaagttccaagtaagtgtctatagctttctgctccaacaacaaaaagaaaaagaataacatcatccagtgtttgatccatttcttgaatcttgtaaaagggttatgttcttttgatctctctgtaacaatttcgaaaatggcggatatatacgagcaccaagttcctgagaagcttcgcgtgagtttccacaatatccaaaactcagaaccaaaatctttcaatgtttttgtaaatttcaaaccctaaaattcttgtttatctctgaaaaaaacaggggaagtatcaagcaatgattgtctactgtattcttggatttggttctcttatttcttggaacagtatgctcactacagcagattactactacaaagttttcccggttcggtttcggttctgactattctaagattcgaaaattagtttttgaattctgatgttgtgttttagtcatcaaaaagttggaaaaaagacataacgtttcttgcatgtaggattatcatccttcaagagtactcacacttgtataccaaccgtttgcgtttggagcaatcgtgatcctcgcataccacgaatcgaaaaccagtactcgaaaacgtaacctgattggttacattctatacacaatatccacattcttgctcatagttgtaagtttcttaattcaagtcttaatcttacattaatctttcatatgtaaatggattttaattatagacgcaagaatttaaattaaaaaaaaaaaacagttggatttggcaacaaaaggacgtggtggattcggaccttataccggtttatgcgcagtcgttgctgcttttggcctcgcggatgctaccgttcaaggaggaatgttcggtgatttatcactgatgtgccctgaactagttcaggttatacattttaggagatacaatatatccttttagactagctaacatatacaagaggaatttactagctaacatattcctacttccttgtagtcatacatgggaggtatggctgtagctggtgcgctaacatcagcgcttaggctaataaccaaagcagcttttgagaaatcaaacaatggtctacgaaaaggggcaagtgagttcatatttttgaaggtttcaaatttcgaaaaccgatagaaccccaatcaccaaagtgtttataagttttttttctttttggcagtgatgttcttagctatctccacatgcatagagttactatctgtgatgctatatgcttatgtgttaccgaaactcccgattgttatgtattaccgaagaaaagccgcttctcaaggatccaaaactgtttctgctgatcttgctgctgcgggtatccaaaatcaatcagacttggtaacttcagatttctcaagatcttccctttgttgtcaagaatctatctttcttaattttgtattttatttttataagattcttcaccactaaacattttttcaagagattcctaaagaatctatgtttcttgattttttctttttgtttttgattcctcaagattctttctttgttctaaaactttcccactcttcatcattatttagcttcatgattttcctatgcagagtgatgatgattccaagaatcaaaggctaagcaaaaaagagctgttgtttcaaaacatagaccatgcagtaaatttattcctcatctacgtttgtacattatccatttttcccgggttcttgtatgaaaacacaggacaacacgggctaggtgcttggtacgcacttgtcttagtagcgatgtacaattgttgggatttggtcgggaggtacacaccactggttaaatggctcaatattgagaatagaaaattgatcacaattgcggttttgtcacgttatctcctcattccggcgttctacttcactgcgaaatatggtgatcaaggatggatgattatgctcgtttctgttttgggattgactaatggacatctcactgtttgcattatgactatagctcctaaaggatacaaggtaatctattttcaccttttactaattaaaggtgtcagatttgattgtttatttttaagaaagataaagcatacaagtttgaatatttaaaggcaaatacaaacgagtacaatctttgcgtttaagacaagtaatctcacatttgttctatattgtaacaaaaaatcaaactttggttttgatttggtgaagggtccggagcagaatgcgttagggaacttgctggtgatatttctgttaggagggatatttgcaggagttgctttggattggttatggcttattggtaagaagaatgccttttgagttttaatcactccaaaaccagtgtttcactttaagttaaattggaggttaatttgttatgtaaaattacagaaagtaagtaaatatgtaaaaccaataataaattaatagaaacaaaataaatagaagaaaaaaaaataagattatgatattacatttagtcctaattatacatttgaatatataacagcacttatttttgtcccaaaaaaatatatatccaaaaagtatatcaatccatgcgaaatgaaacggatcacaaaaatcacaaaatttcaagagattgattacgtgaaagaaccgcttcacgttacttatgtaaataattttccacatttttgactcgtttgagccctaaataatatctgatgacaaaaaaaaagataactcaatagaggataaaaaataaacttaaccataaaaaacgatccgcatacctgtttaagtgttcctgaaaattagaaaaacataattgagcgcaacgctggtataaattcttttaatccattcaacaatgaaaaacaaaacgaaattacatcaacgctgcactcaatgatgttcattcaaacccaggaaaaaatatcctcatgcttttttctatcatcttagaaatgaacataaacatgattttatacttgaggagtagctgacattgcaatgcttgtgttggtttagaagcagtacaatgcttgttgtttgtactgtgtactacttacaaaccatactagaatatatattttgaggttccgagtttcttttcgtattcaaaattataactaatgaaactaaatttttctttggttttcatgtgatagtaattaaaatttaaaaacaacattgttaagaaaattattagttaaaaattttagaatagtccaagtgtttgtaatgtactaacgatcggtgttcgtgtgtactgcagcaaaacaccaactttatgtactacacgagatcttctctacgtcaacgacgtcgttctttgttcaggccctttttttgctttttgggatcaatcataagtagctttaactactaaagtgaattcgaagcaaatattctctaggatcatgattcatgaacaccagcttccttcatggaacattcacaagattgtacaattatacggtttggttcgatctttctcatataattggttttcgttttgttttttgttttttttttatttttatttttttatcaaataagccttgtgtttcattcagtcaatcccataaaagcaaagattacaagattatcaagcattaaaaggattacaataaacttcaaagaccagaaactaacaacatagaaggatagataagtttgataagtcatagaggataggagatcaaagcaatcaagcaacaagccacatgcaacctcaaggtgtgtcattgacatagatacttccgcgaataagtcggggaattttgaattagtcatgatcgagagaacttgatcttgtgacgttgagaaagtgtcatttgccttttcgctcaccggtacgaagcgcaatgaagacgtcgggactaatggtaagatatcacagaagataatggcttttttgggtacgggtttaatcttaagatttaagagaaaaagatataaaaggttgaagaagtttggaaccaccgctcattggagacaagattataatgccattcttctttaaacttgtaatttcaagaataatatcacttatgtagctaaatagctcatgtatgaaatcgatatgcaagtgaataaaagataaaaggttgaaaggatagggttttcggtttatatggttttatttatacaaaattcagttcgatttggctttaatggttttcaattatcgaaagatatgaaatgatatcaaatttggtttgcttttgatctggaaaagtttcatgcaatgctagtttaggtctattgtttagtaagattgtagaatttttttccaatagtaaaatcaaattttattaggtttcgagctagttgtattaaacaggacatttttagattgaaaattcaattcttacatgtatagctgatgtcttcctaaaagttctgacttttagctcaaactaaaataacataagcatatgttgactaaatacaaaagataaacgaagactttatatgatcatttaatgacactaatgattatgctataagtagacaacaatataaacataataccttatccgatttgaaaaaaaagaaaaagaaaaactctaattacttcgttaatcgaatatacattaattatatcttcaaatgtaagttgatcaaactgttttagctagatccaatattactgaattaaccaagtcatttaaaagccaatgttagtcactcaacacagtttagcgtggttacagttgattaatgttggatctaagggttttattcgtttaatggaatagttaagtgtgtttttcttagctaaatagcatttttaaaaatgtcctctatgctaatatatccaacttattatatattgttatacctcatatgacgtataaatgacgtactgttaggaccacatttatataacccatgtgattatagaagcttatttccacattactaaattatcaaacattgtataaagtctactttcggttttggcgacattaaattgattagtctcttggtcgattaagatcattaacatttctcctacacaagaaattcaaaagataactatctatataaattactcaaagtcatttagtatagtaaacttgatccattcctactataaaatctttagtacgtagatattatagtgtaacaaacaataaatgaaatggaaaaatacagccgtatataaacgacgaaatcttggtgtttgaattagagtttggcacggtgatgtataagaaaactctgatattgaaaatcttggtcatacaaatacacaacacaagtgtatatcgaggacaaaacgtgttttttgtatggaataatgaaaacaacttttgggatcatgtaaaacaagatttgcctttttagtccaactgattcatatgccaccgcccaaagtacttacatgtcttagagactttgtaggtttgattgacagagaatattgccaattaagaaaatatttgatcaaccaactgaaatgacaaaaaacaacctaaacaaaaatgaagttggtatgaggtgattgtctaaattaaatttacttgttaatctgtgaattttcgaaaaattaccttttaattataaaatttaaacagttaatgtaacaaataaaaacctcatttaatttaaatcaaaataaaaatcaaataaataaatttacatttattctttttatttctcaatctttttgtcaattatttctcagtttttagtttctctactttttaagtatatttttctttttgaaacaatctgtctattattagaaaaatatgataatcactttcttatcatatttttgctttattttgtgtttcatatgtttttctttttctttctaatggttaaaactggatttgtgttatgtagaaaaatgttcttgtgcctataatgtggccagttctttttttcggtaatagacttgccacgaaacaagttgtggtgtagtttaagccaactatttatggtgtcgaagttagactttagatttaaaactttagagtttatatatacagtaaaatctctataaattaataatattgggactacaaaattttattaatttagaaaggtattaatttatcgataaattaatatttattaatttataaaaagattttcaaaattttggtaactttttaaaaatttctataaaatttctttcattattgaaaatataataataatgtctacaaacaacaccaacagttttgatacagtaaactatgataattatattcaaacaaagaacaaatatgaatttaagcaaaaaaatattaaaaatatattataaggaaatgttttatgttttacatataatatatatgtagttgatacatttatacaattattaatttacgatattgatgggaccatatatttacataaaactttcaaaacaattattatcatattaatttatcgtttgtgtcactttttacactggttccaacttaagaccggaaaaatttattaatttatagaagttattaatttatagagtattaatttatagaggttatactgtataatattaaaagttggccaataacaattaaggaaattatttttaagggtgcctaaaacatatgaaagattttaatttttcttgttaaaacttgctaataatttattgttataagcttttattatagtctcttattatagtcctggaaatttgatgtttagaaaaaagtatactatgacgacagtgttttaaagtttccaaaaaaatcgataaaaatctcgctcaaactgaaaatcgtgatgaatagtgacatttgacaagtttcaacattcagtaaaaattgctaacaaaagatattaaaaataaaatcaaatgtggtaacattgtaaatatatgctaacataatcctatactattattgggaaatacataataaaataaccatattttttgtaagtaattacataggtatgcaattaaaaataaaatttcaaagagtaaaataattcatctttttaaatattaaaaagtcaaatactaatttaattaattaaatttaattaaaaaacaaaatacatttttaatttctaaaaaagtaaccaatcaaaatcaacatataagatttgatatccaaattttaattaatttaatttaattagacaaacgaaatacattattaatttccaaaaaaaataactaattaaaatcaacaaattagatttgatatctaaattatcatattaattttttattaattattatagttcatctctcatctttatatgattctatttttgcgaaaaaataatattattgttataaaagaataattagcttttcgcatgtgccatgatttatatttttaaaaacgaatataaactgttcaatacatgaaaaaatattataacaggtcaaaaatagattttagaaaactttctactaagtaacgggttataatttaaatatttatattcaatttcatacatattattttgaaaatttataatcttatatactataataattaataacatattagatttttttatgtgtatgatgtgattcaatttttaatacaagcttgaaaatcttagaattgacgggtttaaatcaatattaatacaagatggtaattataggtgaaactctaaaattaacaattaaatacaagtgtataatcttaaatactgaacaatataaataatatcaacaaaaatatacaactagcagtttactatacatttaaaatccataaaataatattatatatttataaatcacttttacaataaaaaattttagtttaactaaaatataagagtatctacggtataccgcacgtttatatctaattacgtatatataaaaaagaaacaactcaactaacccacttacgtttccgtcaattcaaaaataaaactatatattttaccaaaaaaaagtaaagaaaaaaaaaagtaaaactagatatatacaatttattctagttgcaaattaagcattcaaaattggcaagatatgtaattgtttaatttcgttaagactcttagcattaaaaccaaagaaaataatatgaaatttctcttactaaacaagtttttatttaatgaaaaaaacaaggtttatttaattaccacaataatttattcttataaaaaatgttgactctatacgtaataaaagatccactggaaaaaccgaacaaggggtcaaaacaaacagctcatcccaaaaaatgccgacgttcgtgtttacacatgctgctttgtccccacgcgtccccactctcagttggctctccgtacaacacgtgttaaaggtgattaattaacacaaaccgtgatttcaattaaaacgagctttttctttcaactttttccttacgttttccacttattgctttcgtgtcgtacaagtggcgtctggtcattagattgtgtcccgtgatctgaccccaattgcacacgtacgctaccataccacgtgtacttctagttcacgctccggccagtctcgccggattccggttagtaaattcgtaagacttctctggtggtcaaaatagaaagtttttcgtgcattttgattggttctagtgaaattgtgcaaatttttgattgacttaatggcccacttccatttcaaaacatttgttattagtattgttttggttcataaattatcattagtttatttcttcagagaaacaagagataataagtcaatgatataattattcactatcaattatttatctacctttctatttcgataacatttcagcaccatgtatgatatcaattatagtatatatcttcgaatcatattttaatatgatcgttgatacgatctccatgcatttatgtagaagaaaagccgaccacaaatattaaacaaaagagtagatagataccaataatagaaactccatcattaaaacaatgttatgagctgagctttatattgtttactggtgggatgttgctttccccttgacgaatatactttagtaataaatattttaaaactatagtattttggattttggatatgtaacaaaatctatataacaaatacaatgattgcatgtttacataactctattccaatggcgttttgtttattggaattggagaaaaccattaacatcaaacgaataattagtgatattatcactgtaataactctctttttcatcctcggtgctgcaagtgctactattgatgtaagttgaggaacttgagtttaacggagtcgggcttgaagaaggtgtggtcaagactgaagcaaagtcggagtaataaggttctaatacaaaattggacttcgaacaatcatcatcgtatgacaatgaattttggaccgtcgtcttcattggcatgaggtcttggaaattcgtgaattgatccatgatagggaaccaagattgtaattcttcattaccaggcatgttgtaaccggtttggtattggtttacttcggtttggttaaccgtgttgttctcgtgtgtgttgttggggtggttttggtttgaaaagagagaggttgcgagtttgagtatctcggggttaaccaatggttgatgattaccatcactcatcatgagcctcgacatgttcatatgttgttgatgatgatgatgatgatgatgcgaagagttgtagatagatgagctgagaatggaggagatatcgagaagatcaagacgtggagtgtgtgtaaccgggtcgattcccatctttagaagtctttttctgatgtgagtgttccaatagtttttgatctcgttgtctgttcttccaggcaaacgagccgcaatcgcagaccacctatacgaaagcaaacaaagttagaatctgatgcattgtagatttaacataaatcactagtaacatcattcaaagctatgactctaagactaatctacaagattagtagttttcgtataaactacgtaatggcaaaaatataaaattattgaaaagttcaaactcacttgtttcccatgatgctgtgaagttgaataatggtttcttcttcttcaaaagagaatcttccacgcttaatatctggtcggagatagttggtccaccggagacgacaactcttaccacatctttgtaaccctatagtcaagattcaagcaaaactttaaaaagacaattcacgaataaaaaaagtatgattaaaatgtaataatgaagatacgtatactaaccagcattcttgggaagagttctccaatttccataaccatgtatattgatataatcaatgagcttttgatcctcctcaggagtccatggtcctttcttgagaccattcttcttctcacaacatggtgatcgtcccatctttttgattaattgttaaccgatcgatgaagtcaaatgtttttaaaaaaatatagtgattgaattatgaggaaacagagagtagagagaaagagagagacgtagggtccttaaagagaggtacgaaatatatataggaaagagatgagactcttatcatatggggaaaaaaggtgaagtcaaattgattcggtgccgtcctctgttcatcgattgggctacgtgtcctttataatcccaaaatttgttttttccaaaaagttttttttggatgtatacatactatatattaatgttttttcctacaccttattgtgaattatgataatggctaaaactctagtaacaaagctggccactaaataacttaatttggtttttgtttgtaagtatttttgtaagtcatttatgttttaagttaattataactatgcatgcatgtgaatctagtgtgacacttcggtacaaatcttgtaatttgggtaaccaaaaatatttttcataacttagatagtatagaaaccatttatacattcttcttgttgattttttttttttttttgaatatcaagagattctggatcgaagcatttctctaggcctgaaaccatagcatgtaatttttgttccaagcgtcactcaaatagacatctctaagctttgcctaaattttttaccaattgagctaacgacacttgattcttctcgttgatattaataagaaaaatatcgtcaatccaactaataccctagtttcgagtgatatgtttcaaattaactatttttaattgattaggagtttcataatttataagagtctctataatagtatatagtctattcaactagaaaattgataaattctgttttaatattgttaataaagacggtagacaaatgtacgtatgatatgaaacacgtgattttggggagttttgtagtgttaaacactgtatagattaatgtataaacttgtgtgatgatacttaagacttaactaatcaattgataaatatgataattaacaatgcaatcacaatctaaagagacatggacgtcgtcgaggagtgtcgctctccgtagcttttggctgttttcacattagctgtcgccaaagttatgatgccacgtactctctctttcctcacaattcaacccttctgctttgttttttcctttggacttttttgcaaaaacaaaacatatacaatggataaaatttgtaaaactatcagaatactgtttggtaacataacttttaaaattaattttgatttttacgtgaaaagtatttaacaaattaacgcaggttcacacacaccaagttttataaaagattctggattcatctaatatcaaattttaaataaataacatattttcgtataatagttttttttgggtaaatttcaataaaaactacaattgcaatttttattaatgttataaaaacgacattaccaacctataaattcgtgagtttgatgtataagaaaatagataaataaatgttcaagtattaaatacatacacagcaaatttagctgttcctctctgtctctctctctatcccatcaaactttctcaagaaaaaaatgaagaccaatcttttggacttattagctttttctacgtgagattttgaatacatgattgtgaatttgtgatgcttccaaattccatttgaaatttttgattttgagttatatatatatatatatatatcttattattcattgggtggctttataatcattttgaagtaaatataaatgtgagaagaaaattgattgatacattttgcatggcgtgacgtcagatagattatcactcttataggaaccacgagttgtgcaactcatcttccctttcgtgtttcgacactttacatttaattacaactaataaaaatggattttattaactaattaagtacttttttgatctcctaagaatttgaatatatgagtagctaaaactctagaacaaactaattatagttaatgaatatttggattctatattattggcgcatatggccttattatatatgcatagtttcaggcaaacaaaaattcattcgaatattccaacaaacaaaagcatccaagtaataaaaatacataaacaaaagcagctagtttatagacaaaatcttcaaataatcaggaaggacgacgatatagattggtgattaatatattagtagtgatcgaatcattgtcacatttatgctattataatactatagttaaatataagtacattaggttaatgtctcgttccttgcggttcaagaatctgtcgggtttaacgacaaatgaaaactccgcaaagtgcgaaattatgtgaatgaataagtatattagttgataagaaaaaggagaataaaatttcatcactttatcaaataaataaataaaagaatacaggattaaaataactaaaaaaaaaaattagaagatagctagtgatgctatattagggtagtaacttgtcaaacatctagaggctttgcttgcgcatgaatttgccacaaagagcagcagcctacgtgttactagttactacatagttgaccatatcttatttgttgataatgtttgagccttttcatgaattaaatatgtttcatggatattggatctgtatatcactatggataaatcacttagagctcgattgatttaaacgtaatagaaacatgtgcaattgcaattgcaagaatttgcaaaaacagatgggttttcacacattttggatctaaatttatagaaacatacgtgacttcgtatatgtgaatcaaattgaagatatatttgtaggtcaattttcactttctaggtaataatagtacaaaaatttattaatttagagaggtattaatttatcgataaattaataattattaatttatggagagattttaaaaaatttgtaattttttacaaaaatttaatccaaaaggtagttcctctctacaatcaataatttttctaaaaatcaattacaagtataaaaccattattaggtttaaaaaaaaaatcttttttatacgtagtaaaattattagaattgaattttacaaagaattaatataaattgaagaaaaacaatactaaagtcatattttactaagttttacataatatatattcataaatataaatatatatatatatatatatattcataaatttatacaattattaatttataatattgatgggaccatatatttacataaaattttcaaaataattattatcttattaatttatcgatttgtatcaatttttatagtggtcccaactcgggaccggaagaatttattaatttatagaggttattaatttatcgagtattaatttatagaggttttactgtatgtgggcaataatagtatgtagccacatactatatatatatatatacacgatacttgcctaatttttcttaatataaaatatgattgattagtatgtatgttaaaataaatcgagtcacgtacgtagagattatcgtcgcattattccagattttgatacgtcagaaacgagccatttgaattctaaatagttgaaagacaaagaccaagagtccacacacacatacgtaattatgtatataacatttatttatgtatagaaaattacaatacatatgcgagtgcgatacgatatcggaattaatagttgtggagttgatgtgccacatagtaaagtagctatatctatatagaatatttgaattattaaacttagtggtttctattcttggaggtttcataatagaggtgtgttaatgatattaaaataacgaaatagaatttagctctggtagttggatttgaatccgtacaactctgggagttggatttggaagcggttgagtaagcttcgtagtctggcgagactttttttggtgtgtgaagtgggtttggctattacggctagtttctggtacgataattagactggtttgggttctcttttaaatctcacgagtcctttgggtcttcaggtgataggtctgccaaaaaaggcggtggtaagagacgcaatttctggtgataggtggagggttatgggttctagaagtcgtaatcccatcatctccttgatcaaagcacgccctgcctagttgcaatgatatcattacctatgaagtcgatcaaagacctccttctcactctttctcctctgctctgacttggcaagcgcttcacccttctggccgtcctgttgtgtggcataagtcggtttggtttaaggaccatattccaaagcacgcattcattacttgggttactgcttagaatcggcttcatactagagactgcatgaggaggtggggtctctctattccttcggattgtgtcctttgctctggaaatgctgaatttagagagcacttgttctttggatgtggtgtcagttttgcggtttggggtaacttcatgtttagagcaagcttaactcctccgcttctctttatggactgcctcacttgggtcttatctccttctcgtgatcctaacatttctctcatcatcaagctagtgtttcaagcttctatctacttcctttggaaagagcgtaaccgtagattgcatgatcacgcttcccgctcttctactgcaatcatcaaggaaatcaaggtcatccttacagctaagctggatcctctctctaggcgttctgaatttgatgcccccgacaactctctcctttctacttggtttcgctacttcaactaaggtaaatttttcctcctttgcgtttcttatgttctgttgggccctcttattccttcttgggcctcagggttagttttcggacctgcgtgcctttttgggcctttgggccgtgtatgttttttggcctgcgtgcctagtttggaattttgtgtcttgtaagttcttttttatctaatggaaatttaaaattaaaaaaaaaaagaaaaaaagaaaaaaaagaaaaagaatttaaaataatgacaaagacgtggatacaacggttgacgggaagtccggcgtccgaattcacctgcttctggacgagatacggtgaatcccctagacctgaaatctcagagactggacaacctaaaaaacactatccttaccttgttattctttcttctgaatgtataaattttcttcaaacaaaacaactttgtttataatatatgccactttgaatagaaatatttggaagtatagaaagaaagataaagagattaacttctcgttgctaaccaaatgcaaaaggcatcgcttagcttaaaggagctggaatgctataaggagcataggcaatttcgtcaatgttaataatctgttcgcggattgggtttagtgctaatattcggcaatttaaaaccggacaacccattataacttgccattaacccccacgtgatccgatggaccggttgggataaaatatagggttctagtgtatttaattagtttaagaacttctatcagtgataaaatggtgagaaacaaccaatcttggttttttttttttttttttggtagaaacttaatactggtagtttggaacgtgcaattaatgttttactagtttagtttagttactaatgattttctagtattttttcggttttagttagatttaaaaaatttagtcactttattataatcgttaggcttcatattttgttaatgtatgattatttttatatttacatttataaacctatattaatctttgttcttttggggacattcgataaaaaactatattaatttttataaatgaaaaataccttaataaatttttatttaattaaaccgtgttggaacctagttcatgatccataacccgatgatctaaagtagtctggttcaccttccagacatgtttaataatattttacatataattagcaacttgaatttagaacaaaaatttgaatttcaaatttacataacggtgagaaatcaaagtaaactggtgaaatctctaacgatcatatgattgtgtcaaatgatacgattcaaggtcatgttacttttaacattgtttagtaaatttagtattaaaattggaaaatagtataaaattttgaaaaatatcaaaactaaaactcgattgcaaaaatttttaaaatcattttaaaagtttgaaggaaataaattttaagatttagttgtaaaatttaataattttaagagtaaaaaataaaaaaatttgtataccaaaaaccagctagtttctatatcgttatgtgaatttagtgaaatctctaacgatcaaatggttaggacaaatgttaagatccaaaatccagctagtttagggggtattaccagcggcttcgaccacatcctatcctctctagctactggcttctgtggggaatctatatcgttatgtgaattttgtatcaaaattataaaacacaaacaaattaaattaaaaacttttgttgagttaaaaaagaaagctagataaagatgagaaatttgacctgtatgcgatagacagtttgggtaaagcgaggacaatgaatattgagcagtatcttaatgagctctgtcgtctttaggctttacatgttaggtaagtggaactccgttttagtaattgggcttgtacgacggcaatgagagagactactccgccatcttccttcaacctccttagagccatctttgattcatcctcctcattgtcgcaagtgcctctctttcctaacgatgataattccgtcgtggctacggtagggattgaggttgatatcatgacgtagaaaaacacagtaccaaatcaaggaggttgatatcatgaggttaatgttttccttttccttttaagcttattgttagaaaaggattatgataaataaatagtaacggtaaacattaacaagtgtatagagagtagtagtgtcataaatcaaagagttggtgaagcagaagagatcatctcaagaatctgattatgtaaacttccgttgcttactacaacaccgcccgccggaaaaatgagcctcctttctgattgatcttcctccaaatttatttcatctccttcccaatctgttacctgatgagattagagagcaagaaagagatcatgatcctcagaatgaaaaaagttttgttccttttcaggctctgtgtagattcctaagttcataaaactatcatgaggaaagaccataaacctcgtattgattaaatgatttggaaatatatgtaatatgatttcaccaacctttcctccagcttcatgtacacatatgatcccaacagcatgatcccacgactacatgttatttaagacaatctcttgagaatcctcgctaccacaaagtaagaaaaagatagatccagatcaaacaatcgcgtacctttattgttctctgagttttggctcggagaagaaaaactgatgctctgccagaagctaccatcagatacttgcacaaactgtacacacagattaggaaactgaactgagtagaaatatcataatttgcatacaggcataatagagtagtattataaggtgatagtttctctaaagagataaaattgttcctttagtagagataccttccacaacatgtgggcaaaagaagaatctctttatgttttaagtcctctgaaacagtacttgcgtcgaagaaaccagagagaggaagtgattcccaggtttggctttcttgtatacaaaatcttgctttgttcattaaaacacaagcatcaacgaaacaccttatccaatcaccggctacattgccagagacattttgtaacttcttggtccacgttccacagcctatatgcgagagcattagggttccagtagatccatctgaagaatctcctggccagtttggacaacccatgactcctagcacaatttcattatctacaacaagggccaatcctacctgagatttttacatatgaatatatgacgaagaagtaaatatcagatataaaaaccatgaaacctcatacatgtcaaaatcttttttcttgttcatggcttggaagtaattctaagaaccaatagagctaagcaaggaggtttttgaggatatatcaatcccaaaagatatatagtttcagtgacccttacaagaaacatttcatgacacaaaaaggaaataagtaaatcgcatggttaacataccacatataaagcctcatctcctttaagaaatcccctggtgccatcaattggatccaaaacctatagaaaaatcaatgcacgagttgtagaaagcatcgaaagtatattgaaaacttttcgatgaaatgtatcatatcatctagacacaaaggatatgagtatcattttctatcttagtgccatttcttctgttgcaggagacacaaaaatcgagtatacataccacgatttacaaacttcaaaatggacaatctactgtggatggtaaatgtcttatgtattaagattaacagggtggagcattgacaacatacagcttataacagtaagaccgtaacaaatggaactcagagaaaccatcatacaatgctaaaatgcaacatacccaataagtagctggtttgttgcaaaacgtgtaagcatctttgccacctctatcaattgcttcaagtacatcagcatcagacaagtgattgtctccaatgcttgcttttgatttgacttcacttaccacagagcttacaaggttattagcacgcacaaaatgagagtcttcctcagccactaatggtattgaaggaaacaatttcgaaagctctgcaatcacaaatatacaaagataagcttgaactcaacgagtagtggactcaaatttacttacccaagctgactaaagcttgaactccaaaatctgcaattgtaactggagtttgatcattcttctcaacaatcttctctttagaagaaaaaagagatcttttgacctaaacagttatcaaaaaccaaactttaatagacaccaaatctgaaattgacgaaccacagaggtgagatattaacttacatcaacacagagacgacaagctcgatcaacagcatcaatggcgacctcaagctctttatgatacttagcttgatgctttgggaatggaagattagctctggagatacaaaaatcggaaaacgattggagagatcagagattgtgttacagagatggagaagtaatcaattcgtgtggtagaagagagagaccttacgatgaagtatcgtctacggagagatgttggaggaggattgaataccggtgagaatctgacggcggagaatcgagctccggtgtcgagaatgtacattgcggctgatatctacggcggaaggtaaaccggtgaaattaaaccggtttatttttataagcgtttcacgttccaaccaactccgttatcactttatcagttactagtgaactggagaaattgtctcttaacatgttcttcttttttttttggcaatttttggtcaactaagtcccgatccaatctggaaactaagatcttttaattatataaaacattaaagtttctaagaatatagtaagatttattttcaaattttgattaatataaattttaatattctcagattatttatttaaaattttattttcatctttgaattattcaagacaataatatatatcatagtgtttatagttatctttattggttggtgagagactcattatcttaatttttttttataaatacatctacaatatttttatatactaataaattgcattcaaaattatttgagtcaacaattttagtggttagaaaaacaatgcaaaagtgaaactacagaaacatataatttggtttaatgtagtcaaagagacattttgtaggcaacactaaactatgttcgatgtaaaaacatttttttagtggtaaagtagatactaaatagatgtaaataagatgatggtttgactaaaagtttgcatgtaaaacattttcggaagaagttgagaaattatatttttggctgagattgcaaaatcattttttttttttttaagaagtaccatttcattaacgtacctaagatagagaacgattacagaaggcaaaaacctgcacgagagaataaaaactattacaacactattacccttgaacacttgaaacaagtaaacaagaaagaaacagaggagctaaggcaacgctgctccctggagggacattatctctgatgttctactgataaatgtcctcttcgctagaggattaatcgcatgtggattagggaggcattgacgaagaatctgaatgatcgggttcctacttctgctattagagagccaccattctccacacttaatagcttccacaaccacagaacctaacgagagactagaaattataggatctgtaggaccagtcaaatctaagagaagatcctaagttacaaaagttacaagtaatctcagaatccacctgacaaacaatgaaaggtttagagcatctacattgcacaaatttaagtggatatctttagttgtgattaaaataaaagaacaaaagaagaaccaatgacatattgccacctaagcaaagatgtttctaaaaaatatctttaatgtctccccaaagacataatttatttctgtgcaccaatttaaagatatttaccttattattttattcatttagtatctaaagacccttatattatttgtgcaatggagttgaccttagcgatactcttaagtttacataggtttctccaaatccaaccagagagagagagggattaatatcccaaaaacaattatctccaatgagattgcgaaatcaaattattttagattttgtaataataattattataaatatttgtcaaatgttttggttatttttaatttaactttagtatattattggaattaatgttacaataaatttaaaatatagaaatgcagatttgtgtactaacatatccagcgtcaataaactatagtgaatatatatgtcatttttgaaaagaagtgcacttcaagatctctggttcgaaccaaaagaagtgcacttaaagagtcattatcatcaagttatgttttccgaaaagagttgacatccattgatattggtggaaaaggaaaatgatagctcgattgctccttccattgagctctgcagactccatgtgagtaataacagataaaatgagaagaacgaaaatttgaaaaataaacaacagatgagaagaaattttcaatgtttttgtattacttgtttctcattctcttacataaaatttaagaatgtaatcgaactagtaagtacttcaagtactagaacttgtcttatattaccgtttgttacactttaaaatattactacgagtacaagaacttttaatgtgttcattgaagcatcatgtcaattgtttttttttttccttagtttgaatatagggtgaattgcaaaaataacctatttggaagatgaaataaagaatatagcaccataaactgtataatatagtaagtaacacatgtatgtgttaaaaagaccacagactccttcaacttatcaagaaagaggtgatagcgcgtggagcaaccaaaaaagtgaccaaaatatattcatcccattcaattttgtttgctatgtaagtttaaaattattatttggttaaaactaataatactattaaaaaaacagatttttttttgtttatctaacatgatttgaattttaaaaatcggaaacaaattttttaaaaagtgaatagtagtaccaagttctatacatatcatcacagaaaatagaatagtatatatttgttcaaatagaaacgtttgttctgatgaatccaaataatcaattaaatactttttgatggaagaatactaaaccctaagataatatatagggaacccaaagcttttaatataaaacactaatcaaatcacttaacatccttaatcaaaacaaacaattcattttaaaacgtatatagtacaaggtatacgtaaatagtatatttacaaaatagaatattatctgtcaaaaatctttcaaaatcaaaatcgatttattggctatttccctttagaatttctaccatcgtaaacccttcatcgcttctagatctaagaatgatccctaatttatcaatatttaagaatgatccataatttattgtagatatgtggtgagcctgtaactatgaagaacaaaaaaattaagtgataaattagtttcagaccataaatgcattttgatgttaaaattatgtttcaaaaaagacaaaaaagaaaaaacaaagcttagaacctaaataaatctcacaaaaaggtaattaatgaactgtaactaaaaacaaaaaaaagcaaagaggtcatttggagagaaagagaaaaagaagtaaggagaaaggcggagaggagagagagaagaagagagagaaggagagagggagagaaggagagagaaaaaaaagaagtagggagacaagcggagaagggagagagaaggagagagagagaaggaaagagggtaaagttgtgattaatatataaaatataaagaatatcatctcatttttttgttagtgttactttcttaattatagtttttttgtaggttagttttccaaatttcccttgaatatatcacattattgtgttcaactcaccttctgctaagttccacactaagcttaaaatgacaaaatcatttccaataggcaaagatagtcttcgtttttcttttggtttcttaaatagaagaaggaactaaccgttcatacaaacttttacacaaatgaatactgtatgaaacggaaacgtgtgattagtaaaatgggaaaaatgtcaattaatctcccaactttcaaaaaatggccattttatacatcaacttcgtatgcggccgtctaaaacataaactaaacgttgactaacttttacaacatgatcattcgttgaccaggccaaaatagacatgccgttatcagtcattaacggaacttctaacgtccgttatcatctgttaacgactttattagtcaagttttaaattatggtcattttaaacatcgactttatatgtggccattttaaacatgaattaagcgttgactaccatttaaaacatgagaaattcgttgaccaagccaaaataaacatgttgtcatcattcattaaaagaacttataacattcgttatcacttgttaacgactctattagtattcctaaaacgactttgttttgagaataatcaaaagaaaatcaggattgttttctaaatgaaaactccagttctccaaatctatttctacaaccgcccaaacaagacgaacaatcttataatgggttttcaatttgcttccatgattccttttaaaatttaaaacaaatatataaacgaaaacacctttatttgcttccgattactggtactacgattatctctatatcaaactatgttcttgggttctgcttaaaactttttgatatgaagatttcatatggaaaaaatctttctgttctttagattattctcaaacgacgtcgttttgaacagattaacagtcattaacgggtaataacgggtttctaggttctactgataaagacatgtctattttggcctcgtcaacggatttttcatgtcttaaatggtaatcaacgtttagttcatgttttaaatggccacatatgaagttgatgtttaaaatggctacaatttgaaacttgactaataaagttaacagatgataacagacgttagaagttccgttaatgactgataacggcatgtctattttggtctggtcaacgaatgatcatgttttaaaagttagtcaacgtttagttcatgttttaaacagccacatacgaagttgatgtatacaatgaccattttttgaaaattggggaattaaatgacatttttcccttagtaaaatacttaaataaactggatatttacttaatcgagaagaagaagatgttgttttgttttgagaaatttatttttattgggataaagaagaaatttatgcagctggagaagaactttttgtaaatcatgcctaaattaatgaaatgaaggaagtctaaaagtaatatgcatcttcgacatcactttatatgatatatatgtttgatcttcaatcatcaatttgtttatttgctgaaatcagagaacaccattagtctcaaaatatgttgacttttgcggtgaaattgaagctaaagagcaaagaagtattctaataaaattgctgacctgctaaaaatgtttgtttcaacaaaaagtgtcaaataataatcaagtagatagtactctaagaaaaaacgaatgagaagcgatagtcttcttgtttccttttgagtggtagtgatgattacaccttgttgttggtggttcccttcctcttcttctcttttcgtttgctgttcctctctcttcttctgcgtcttgcaatgggatcatcaatttgcactaaacttgaaacgtaacagctagataacataattgcggtataagatcttgcagtgtttccaagactattcatttttttcaagtagccatcatctccaatgatgtaagaattgatgtgagaattagatcttttgcagtcttcagattcgactttatcaataaccaccgcgagtttcttctcctcgtcaatgaagaaattgttgtaatctatatcaaaccaaaaatcaagagcaatgagttgctcaatataacattttaagaaggaggtccacgatagtgcattgggctctatcttagtagtaatccaaatctctatcatagatgtatccaagtgctgatataaggctacgagtttctcttctctaacccaggatagactcatccaaccatgctgaaaaggtggatcaagaagctttccaaatctttctgccgtaaaatcaaaacagattagtaaatttggggtttcatctatcgtcctaaagtaagtatttccctttaccgatgcactctgcccatcatcatctatatcccacttgggaatgacatcaaaagccctccatgaataagacttcaaatcgtaaatttcgtatgagccctgtttattatcgagaaacctcaatatcttgtggtttttgttgttgtcatatctgagacaaaacgtggaatacatagtttctgttttgagttggatccacctgatttgccccaaatacgggttccaaatcacgagcctagtatccgtggtgacacataacaatataccgccgcagtaatacatatgagatatctcaactttattaagaaaattaccaatctcctttactgataagttaacgaattcttcaccattttccttgaaggttccagagatattgaacctcattgaacgaagcctataatcagacagcatgaacccttgatgaaactgctgttttggttttgctttacatagaatccgatctttggataaagcgttccatcctttgcaagtggatctcactgctcctagggaagttatcggaaccctagacaatatctctttcaccaaatcctgcgtaagatcgaacatcatcgtcattattttcttagtatgtagaaattagggttttcaactctttagctagcccactcttttctacgattattaatataggtttctacaagttattattttattttttttggtagtaattaacgtaaacaagtgtcgggccctttttaataactttcactaagataaataatatgcggtttctaatcttcgggaaatgttaaatatacaaaaaaataaaaaggacatgtttcctcactaatggaaattccgtatgtgaaagtattctctttctgtatttagttttttattttggatcaaaacctgctctatatttctattattaactttctacgacacaactaccacatgaacaaagtctaaaacataaaaattaaggaggtaaaaccgctgtaactgtcagtgaaactgcttcaagtccctgcggaaacattaatacataccgataccgccgaatgggattagggcatatggttatcacacgaccactcttaaattttaaatactcatttttgacatggttaacgacacgaaaccggttaacgacggggaacagaatgatcaaatgacaagttggagtagacatatcttgtattttctgtagtgagcaggtagaagaccgagaacacctattctttacatgtggatatgctaacgagatttggttagggctaagcaagaaggttatgggtcataattaaattctcaacaagatggaatgatattcaaacagtcctcatagacatgtctttggggatgcattgcctattcttaacatggtacaactttcagctctattcaatttggagagaacgaaacagttagagtgaagaagtattgatctatatgctaagtataagagactctctaagtgtttcagaaggtttcagggtcaactggttgacgagctaaggagatcgtgacacgtggagcgatccaatccgtttactctcaacggcattttcttatcctttactcgtcttattctgtttcctttcagtattgttgtttctctgtagatttgattgatttagaaatttgttgaataagagaagtgagagagagaaaacagaacgattgtagagagagaaagctcgttttgagctaagtgcttttagtgaattccggagacatctccggtgagacgtagggttcctcatcggagcctgaactcgtaaaatcttgtgtgtctcttttaaaggttctttgtgttcaatctcacacgagtgtccgatcgatttcgttagtgttcttgagggttcgaggatcacaaattggtatcagagcccaggttctgagctcaagaatttcagatcgattcaaggatgtcgaacacgaaactgaagatttctcagttcgacggatcaggcgacttctcactatggaagatgggattaaaagatgcgctggtggaacaaactaagtcatcttcattgacagatgaagaagaagacgatccagcaaagaaaaaaaagattctcgaagaggaaaaagcaagaattgatcgagatgagaaagcgatggatatgatcttcataaatgtcggagataaagttctgagaaacatagaacattcaaagacagccgcagaagcatgggcaactcttgataaattgtatttggtaaagactctaccaaaccgtgtttaccttcaactcaaggtttacaactatagaatgcaagattcaaaaactcttgaagagaacatagatgagtttctaaagatgatatcagatctaagtaatctttagattcaagttccagaagaagtccaagcaatcttgattctaagtgctttaccagaaggctatgatatgcttaaggaaaccttgaaatatggaagagaaggcataaaacttgatgacgttgtgagtgctgcaaaatcaaaggaactagaactaagagatggtttaggaggatcaagaccggttggtgaaggtctctatgtaaagggaaagtttcaggccaaaggaagtgataacaacaaagggaataactcaacagaaggaaagaaagtctgttggatatgtgaaaaggaaggtcacttcaagagacaatgttacaagtggcttgagaagaataagggaaatggtgcaggggaaacaacattggtaaaggacgatgctcaagacttggtcgggctagtagcatcagaagctaacctaagtgaggataagagagatcaagaagaatggataatggacactgggtgctctttccacatgacacctaggagagactatcttgtagactttgtagaaggcaaagcaggaaaggttagaatggctaataattcattctctgaagtaaaaggaattggaaaggttaagttcacaaatgaggatggaagacagatcatccttcatggagtgaggtacatcccagagatatctagaaatctgatctctatgggaactcttgagtcagagggatatgagtttagaggaggtaacggtgtcttaaaggtaattcagggatcataagtgttcatgaaaggagtcagaagagcctcgttatacattttacaagcggaagcgagaaagtcagatgcagactctcttacaacagtctcaggtgaatcagatcagactcagttatggcatagcagaatgggacatataggacagcaggctatggaagttttgagtaagaaaggttgctttggtaatgacaagatatcagagataaagttttgtgaagactcataatagggaagactcacagagctagtttcggatcagcacaacatgtaactaatgagaaacttgactatgttcattctgatctatggggatctcctaacgtaccgcacagtcttggaaaatatcagtacttcatatcatttacagatgactggtcaagaaaggtttgggtgtactttctcaagtctaaagatgaagcctttgcttcattcactgaatggaaaaagatggtggagactcaaagtgacagaaaactcaagaaattaagaacagacaacgggttagaattctgtaatcaaaagtttgattgtttctgcaagaaggaagggagagtaagacatagaacatgtacttacactccacagcaaaacggagttgcagaaagattaaatagaacaatcatgaacaaggttagaagtatgctgagtgaaagtggcttagacaagaaattttgggctgaagcagtttcaacctcagtatacttgattaacaaatcaccatcatctacaatggagaataaaatccctgaagaactgtggacctcagtgatttccaatctgtcaagactaagaagatttggctgcattgtatacgttcattctcaagaaggaaaactggatcctagagccaagaaaggagtgtttgtgggttatccaagtggagttaagggttttagagtctggatgattgaggaagagaagtgcaccataagtcgaaacgttgtgttcagagaagatgtgatgtacaaggacatcatgaacgccacaacctcatgtataagtcttgaactccctttgactactaataaagttcccatcttcgaatgtgcaggtgccagtaaaaccagagacagttcagatcatggtggagctacagagagtatttctgatgagactacagaaatcattgacattgatcaggtagacactacaccagaaggaaatcagagaacaagacagatagctcgagatcgacctaaaagacaagtgattatcccatcaagactcaaggattatgagatggatgaggaagtattagatgagattgcaggctatgcttacctcataacagaggatgggggaaattctgaacctgagtgctatcaggaagcagttcaagaccctgatagtgagaaatggttagaagcagctgatgaggagatagaatctctgataaagaataagacatgggttcttgtagagagaaacagtctacagaagcctattggatgtaagtggatattcaaaaggaaagctggaattgcaggagtggagaaaccaaggtttaaggctaggcttgtagctaagggatactcacagaaagagggaatagactttcaagaaatattttcaccagtggtgaaacatgtctctattcgcctcctgctatcaatcgttgctcacctagacatggagttacaacagatggatgtaaagacagcctttttacacggctacctggatgagacgatctatatggagcaaccagagtgatatactcatgaaagatatccagacaaagtttgcttactgaagaagtcgctgtatggactgaagcagtctcctagacaatggaacaacaggttcaatgagtttatgcagaagattggatatgaaagaaacaagtatgatagctgtgtttacttcaagatgttgcagagtggagagtacatctacttgcttctatacgttgatgatatactaatagcatctaaggataaaaaggaggtatgtgagttaaaggttcttctaaactctgaattcgaaatgaaagacttgggggatgctaagaaaatcttaggtatggagatcgtcagagatagacaagctggaactctctccatttctcaagagggctatctcctgaaagttcttggagattttggcatggatcgagccaagacagtcaacacaccctggggatccattttaaactgaaacctgcaactgatgaagagattcagaaacagtcagaagtcatgagaacaatcccttatcaaagtgcagttgggagcttgatgtactcaatgattggtacaaggccagacctagctcattcagttggtgtagtatgcagattcatgagtaaaccattgaaggaacactggcaggcagtaaagtggatattaagatacattggtggtactttagaccgaaagctgtgctataagaatgaaggagagctagtcttagaaggttattgtgactcggactatgctgcagataaggaaacaaggagatccacttcaggagtggtgtttacctttggtggaaacacgataagctggaagtcaagcttacagaaagtagtagctctatcaagcactgaagctgagtatatggctctaactgatgcagcaaatgaagcagtttggctgaaaggtcttgtaagtgagttaggttttgcacaaggatcagtaaacatccattgtgactcacagagtgctattgccttgactaagaacgcagtctaccacgaaaggaccaaacatattgatgttaaatatcacttcatcagagaattggtgaacgatggtgtggtgcagatattgaagattgacactgaagacaatccagcagatatattcaccaaagtgctaccagtgagcaagtttcaagacgctcttgacttgctcagagtatctcaaagttaaggtggagctttgctccgggttttaagctgagtgggtttactcagggagaagaagctgagtgggtttactcagggagaagaagctgagtgggtttactcaggaaaaagaagctgaacaagttagttcaggtaccggagaggaattcaaaagctaaaggcagcagagcataaagatcaaggtggagatttgaagaagtattgatctatacgctaagtatcagagactctctaagtgtttcagaaggtttcagggtcaactggttgacgagctaaggagatcgtgacatgtggagcgatccaatccgtttactctcaacggcattttcttatcctttactcgtcttcttctgtttcctttaagtattttgtttctttgtagattcaattgattcagaagtttgttgaatcaagagaagtgagagagagaaaacagaacgattgtagagagagaaagctcgttttgagctaagtgcttttagtgaattccggagacatctccggcgagacgtagggttccttatcggagcctgaactcgtaaaatcatatgtgtctcttttaaaagttctttgtgttcaatctcacacgagtgtccgatcgatttcgttagtgttcttgagggttcgatgctcacatagaagcatggagaagaaccaactccaccagcgcaattgcttcgaaatctggacaaacaggttcgaaatcacatctcttctatatgggaacatggagatagaagatataatagatgtatggaagcttggtttgcttggagacaaagaaatcggcagagtagttttgatttgcataatatcataaaaacatttactaaaacgttgcactctgtttgaaaaaaaaaaaatcgaattgatattacatttatttttaaaaaaccgctacgctacacttagcaccctttgatgtttataggtcctagatataatctaatgtttgaaaattgtaatggaagttggtgaaattgacattggtgaatataagaacagatcatttgcttgcttagcttatattgatgattacttagaaccctttttattgcattgcattacatttactgttttttaactattactaagggttacacactagatttgtgctattttttgtttaaaattaaatctattactaataaaatgaattcattgagacttttcaatgtgtcaacataagcctaaaaaaactttttcctctcaatgtgttcatattcgtttttttgttattctattttgaaaagaaaaaaatgttaatttttttaacatatatatatacacattttggaagttattttttcaattgagattatcctaaaccaaaatctaaacattttcttttttgtgcacctaaccaaaatctaaactaattttctaaatatttagaagatttgttctttggctttggccaacacagcaaattttcatcaaagcaaaactagtccatttaagtgatctattttatcaaatattttagcgtaaattgtttttaagaaggtgatataatttttgttggcttatatataagttctatagcttattaatttcgtggttttgattcttttgacgaaaaagccatatataataaataaagaaaatattatttgtttgtggctatggttatgttgtttcgcttctttgactatgtcggtctatattatgccataattcaaattgctacgaccacttgttatatatggaatcttgtcctcgtttttaatcttgtgggttcaaactaaaagcaaaactgaaattatgtggcttagatggaaacatcggtcggatccagaaacggaaagggttggggatttagggacctacacaattcctccataatccgaatcatttcctctcaagagtgttgcgaagtcggtattacatggagagactctgcaaatctcggccaaaaacatatttatttaggatggtgatacatgactacatttctagctagcaatggagagtttgcaaataaagaatgatctaattataaaccgtaaaatatgggaaccttttggattaaatccacaagagtaaatacaatagttgcaagctactcgaatatgtgacaacttgcatactttacctaaactaccatcaccatcacgagtcacgaccaaacaccatcaaatggatgatacaaatctaattatacgatggcattttccatcgtggtggtctacatataagctcgggttttattgtatgagatgaaagaggttattatctgcttattataagcttttggctctgtacgtagaacacttatggtgtagagaatccgatagataatcatggtgataaattctaaacaacctataaaattgatcaacaatatgcatacaacaacaaatatacataaaaggaaaacaactcagtggcagacaagcttggaccccaaattcttttttttattggtcttttcatttaatatcccatttctacgtattctggtttttttttttttttaatatctgaaaatttaagttcaaaggccttatatcttccaaagacagagacctataccaggttaaattcatcttttttagacaagagatcttttccagcatgcttcgaacccaacacttctaataagtctagattaaatacatctcctttgaaaaatagatccttcccaacataccttgaacccaacacctccatatgggaaatttactactagactaccaccacgttgtttacaatacaagaaaatgacatgaaaacgattgtagtttataacattgaaccctaataggaaccatgaatccgagagagaacatggcaaaaactcaatttctcattaatgaatcagaaagtttgttacatcaatgtatagacaacaaaccaactaaaccaaaaataaaccagagattcactttaattagaatgaataaaccgggactataccgaacccttaatgacttctattatgtacaaatatacttagtatagaaactatacacaatctaataaaccctaacactttcgagatgatttagaattgaaaaattagtataaaatgcacgttgaagaaaaagcacgattgacatatttttataaatagtaaaaaaatcttggtcaaattcgagtagacaaccttatcaaaaaaagaatttataaattagacgacaaagtgaagcaaaaacagaaaacgttatctagaaaacgattaaatgaaacatcacaacctaatttcttcgtcaaagtaaaaaacatcttatgattcataattatccaacggaaaacgacacagatattataaataacttttccaaataaacaaaaatgaattaaagtaataaaatatccattcctcttcgatcatatccacagttcccacaccaacatgtcgcgaaagttcctaaaaccgccacgtgtcagtcacttatccaacagtaatccaattattcgtcaagcctccggtttattaccgtctaaaccggtagctcctcccaaatcatatggctcactcacttctccgtctatataaacaaaacatctcttactcttcacaaaagaaaaaactctcttcggaatctgaaaagccataaatcagcagaaaaaaatcttaaggatcggaaattttataatcggatgaatagagtgattagtcagttttccggtaagttgatgaaggagaagagtgttaccggtgtaagcggcggagatacgactttaagatctgccgtcaaagaatcggtctcgtctccacagagtgcgtcgtcgtcgtcgtcggtgaggaggcttaaaggagatctggaatcgagtcgatttggtgcggcggcgagtgagaggctgaggcaagcggaggaatctttgaggacggtgatgtttctgagctgttggggatcttgttagatctggttgagaaaataatagatgagaaaacgaaaccaaaacgtttctgtttgtgtttttgagttttggatttttgttttctctgtgaatagttttttttttttttcgttttctttgtactttgtgttttatgtaaatcatgtataaaatgaaaagtaaatcaatgaagataatggtttgtcttcaccaaatcatgtatttacatgtggatttgaactatagattatacaaaaaaattagtttgataaagacgatgactcaaaatgtaataagtatgttattttggattttaataagtcgatttttagataatgtataattggtaaatcgttaaataaatcgatatataaaagttgtattctaaactcagcaaattgtcataccatgcctaaataaaaatgctgaaataggtagatttggtccattttggttgatactagaattgtttgaagtctacatttacgattataataatggataacaagatattttgtaagatgtgagatggtcatatagtttggagttgtcaagctataacgttaaaatggtacaattatttatcaagctaagcgaagatttacagcggatttttgacgcatttttaatcgtttttgataggtctgggcaaaatatctaaatctgaagaaccgaatcaaattcgataaaaatttttgatccaaacttgaattcaaaactttaaaatatccgaacggatcacaaatttcaaaactcaaaaatccgaattcgaaaccgatccgaatatgaacccgatcaagtatccgaacatatccaaaatatatacataaaaataatttaataatatttacacaacttaagttcctaaaatatttgaattttaaaatattttgtatattttggatacttaacctacttttcaatagatttggatagaaaatactcaaattttgttagaaaattttatatatttttaagtaatttaaatattttgatacaaaattttgattttggatactcgggtgaatccgaaaaacagatccgaatctaacttagagtcttaggtggtgttattcaattatggtgttaaagtcaattatttaagctttagatttgttttctgatattgcttttaagaatatgtttgtatgaatttcaaaatctctgcaatatgtcttggattttgattttaatgatttactcatgaaactccaaagagctttcatttcaaatcaattaatatacaaagattttaaaagtcttttagttttgaataacattggattttaatgaaatatttcaaatcttaattgaataacaccaaactttagaatctattaagcatgatttacaaatatgagttccaataacactagattttaaagctggatttagaatcattagttaaataacagtggattagtgtggatttcaattctattaaaatccattaacgaataacacccccttacaatatccgaatggatcttagatttctaaatttggaatacccgaacccaaaaaactcgactcgaacctgatccgaccccaatccgaatacccaaaaacccaagccttattttttgagtgtaactcaaccgtttttattgcttttcagaacgcaatcactacaacaaccaaaaagtaagctttaagcgaatccaaacgctatcgtattaaacgctattactatctgcgttttagctcttcatcttcttctccacttcagatgactttctcgcttaataaaaaaacactaacccaatcaaatccactttaatccttccctctctcgcgtccgattctccgatggctttaacggaggacaaatcagattccgatggtcgacgttggggcaaattcaaacttccatttcgaaactctaattcccaagctccttcagcctcctcgtcctcttccatggctacttcttcttcttctgtaacatcttctcatctaaatcaaaattacattcatcaatctcgccattttcaatatcacggtcctcctgtcgtcgaaggattgggtcaaaaccatcatcaatccgccgccacgatcccttctatgtcatctgtcgcgagatcgcttcttccaacaaaacgccgattaaagcttgatccttcagcaaaactttacttcccttgtgagtttcttctactcttaatcggatctcatcgaagactttgactgatcaattctataaaatttcgaatttttttttggatcatagtgttgatattgacttaactggtttagctttatctttgggaatcatgaaattggatatatattgaaggtgatgatgatgttgacttgtaatttgacttattgatacgttactataaactgtataaagccattgagcaaatttaggaataaaatgtggagtcttgtcaatttcaagattcactctttattgatgatcaaagattagtgatttagtttatgaactttgtatgtagatgagcctgggaagcaagtcaggagtgccattaagattaagaatacgagcaagtcacatgtagcgtttaaggtttgtaatggattcaaaaacgttttgattatggttgttgttgttgtcattggtgtttatctctgctgattatcttggtttactcagtttcaaacaacagtaccaaagagttgcttcatgcgcccggctggtgctattcttgctcccggggaagaaattatcgcaactggtatttgcttctcttgtatatatgtttctttatactgtttgattagggtactttttatcattggcctcgatgattatgtggtgactgtttgtttctatgtcttgttgaattctttagttttcaagtttgttgagcctcctgagaataatgaaaagccaatggaacaaaagagcggggttaagtttaaaatcatgagcttgaagatgaaagttccaacagactatatgcctgagctggtatgtgaaacttgtagtaactactggtcagaaagaaacagagaagataagataaaataagacttttgttcttggattctaagaagtgtggatgctcttgtgttttgcagtttgaggagcaaaaagatcatgtctctgaggagcaagtaatgcgtgtggtattcttggatcccgaaaaccctaactccgtgagtccgtccgcttcttcttctttttctggttcttatcgccatcatttgtgaacttgattgggatcatttactgctttaagcaatcctagatatcactgattctttaaactttgttacctctctctttacagatgatggagaaattgaagagtcaattggctgaagcggatgctgcagatgaagcacggaaaaaagcatcagagggtattgttggtccaaagccaattggagaagggcttgtgatcgatgaatgggtgagagacgaatgccattcttttcatgccttactctcgtcttctttttatgttttgttttataagacaacaaagaaagtgtgatactgatgttaactgtgtttatcttctgtactaatgaccagaagcaacgccgagagagatatcttgcacaacaacaaggaggagtagacgctgcttgaaacttaaagaccaccaagaccaaaaagtgtgtgtatgtgttttttttttttaattttgtgccgagtcaaaatgtgttgtgtgacgagatagaagattgtatttatgatcaattatcttagtaatcccaaaattatttgcagaggagatcatcgtgtttggtaaatgaaaaggatatttgcaaaagagtgatgtcttgatttatctgaatgtccacctgaatccttgcaaacagaggagatatactaagcctttggaagagtgtatagatgagctagaactctacacacttggtcaatactagatttatctgcatcaaatgctttccaccagggtggattctctgggagaggtacttgaaacctacgtgcagcagcatacacgaccccacaagccacaacctcacttgtgaaccttacacaaagggttgtacgcagactatcattagccaaattccaagcttcttgcctcaattccggaggtgtttctagtgttcaacatgacaaacaaaacccatctctttcagtatatgtctctcagttgtgcttaattcaaatttcaactcagagaacttcttggcatacttatccagattatctaatgatctcatctaatggtaattcaactttcagtatatgtctcgcagcaaactatctttacatcaaatttttaacaactcaatgcacaaaatacttttcctcaacctaaaaataaggcaattagccaaaaacaactttgcgtgtgaacaacgcgtacacgtccctacacatacgtgtcaatttataattggctattgcttccacgccttagctttctcgtgaccgaccgagtcgtcctcgtcttttttgcttctataaatcaaatacccaaagagctcttcttcttcacaattcagattccaattttctcaaactctaaaatcaatctctcaaatctctcaaccgtgatcaaggtagatttctgagttcttattgtatttcttcgatttgtttcgttcgatcgcaatttaggctctgttctttgattttgatctcgttaatctctgatcggaggcaaattacatagtttcatcgttagatctcttcttatttctcgattagggttcgtatttttcgcagatctgtttattttcttgttgtttccttgtatttgatccgatttgttgaaagaatttgtgtgttctcgattatttacgctttgatctgtgatttttatctagatttggtgttagtttcttgtttgtgcgatcgaatttgtcgattaatctcggtttttctgattaacagatgcagatcttcgttaagactctcaccggaaagactatcaccctcgaggtggaaagctctgacaccatcgacaacgttaaggccaagatccaggataaggaaggtattcctccggatcagcagaggcttatcttcgccggaaagcagttggaggatggccgcacgttggcggattacaatatccagaaggaatccaccctccacttggttctcaggctccgtggtggtatgcagattttcgttaaaaccctaacgggaaagacgattactcttgaggtggagagctctgacaccattgacaacgtcaaggccaagatccaagataaggagggtattcctccggaccagcagaggttgatcttcgccggaaagcaacttgaggacggcagaactttggcggattacaacatccagaaggagtctacgcttcatttggtcttgcgtctgcgtggaggtatgcagatcttcgtaaagactttgaccggaaagaccatcactcttgaagttgagagctccgacaccattgataacgtgaaggctaagatccaggacaaggaaggcattcctccggaccagcagcgtctcatcttcgctggaaagcagcttgaggatggacgtactttggccgactacaacatccagaaggagtctactcttcacttggtcctccgtctccgtggtggtttctaaaccttgtctctctctcttatggttactgaaccaagttcatgtatcgtttcatctagtactttggtggtttatgttttggggccatgtacagcctctgataaataattgatcgactatgtttccgtttctttcatctctcttttctttcaaacaacaaatcgaacttattctctattgcaattatctctttcgattcacttttgtcatcgttgtctctttatatgatgtgcttagtttgatgagtgtgagaagtacagagtctctatctaatgttcagtcctgtcaacatctaatggttttaacttcttgacagtgtgtgataaacaatatcaccttataagtgtgccagtaaagtgcagtgcgaatttgaaacaatgttttaagcactttcaaaaacatgtgcaagcaaaaacaggggacaatacaatgagatgtagaggagactgcaagatgctgagtctatcagcaagatccccaagttctgatatgaacagagccttctccttcactaaactctgatttgtttgattcaaactcaatttcctctccatctgcaacatttgtaacacaattatacacacttttcttaaaaaagagaggaaaaacctataaaacaagagtacatgagaagacagtacctttctctaagattatatgcacaacacaaaacggaaccgcagcataaagatcaactccttgcagcgtcatccaagtggtttccctagagccatgagatccacacgtgggaccacatttgttgaaccaatggtttggtttctgtcccaatcatcgtagaaggaacaaagactagtagtctttgtagttagagctcttctctttctactaccacaatctactggcccaataatattttattcagcccaaaatacatataggctcttaatgggctatatggtaactcgatcaaacgcttgggtttgaagttatgccgcctcgtacacgttagggtttcaagttatatgccgcctcgtacacgctagggctttaagttatgccgccacaaataccctctatataaatacagattctcttctccctctttctcatatcttcaacaacgttttcttctatcttagttttttcttcttttggttctctgtttacttgaaatcgtttaatgtttggttacgagttttgattgttataaacccgatgaagaagcaatcccaaaagataggaagtgccgtatgacactttacacaacagctagcgtgactgaattcgttctgtgtctgctgtgtggttgatttgacaagggtccgctgagggttttttctttttgttttcttctaaattgtagaaattgtctgatgccacgtcgaaggtagctcttttttttggggcaatgatcctaactcgacgctatattagacataaacaaatgtacgtgtttcgcttactgataggaacctgtggatcttgttttacgatctacggagccatagcgattacaattttcttttttgttgaaaaaactagttttgatttggttattggggagattaccgatgatgatttttgctaatctgtgtgttttaggcaagtatttcagttttgagtttggcttataatcatgtaccaatttgagctttgaaccaattcgagttttgtttaagtatcaattaaaccaaaaaaaaaatggtcaagagattgtgttaatggttattgaactggcattctcacaatgaaacatgatcttactgaaataaagtagatgaagtttaattttgacccaaaaaaatctagcgaccactaccaaaagagaataccagaaattaatgtaagtgaatatttagggtatgactagtaattaggaaggaataatctgatgattttgttaatggacgaagtgtagaactcttcatggttatctcctctgaatgatctaaacttgacccaccaagccatgcctcacactttaacaaacaaacaaaaaaaagcccttctctgtctttctttggacaaagcattgtgttatggtatcaaaattcctgagaaagagttacgaaaacccctaaaaacacacaccaaaagttactgcagagaaaatatcaactcctggaagcatcgtccctgtggtcttttactagaagtctagaatattgtggatctaaagtgattagtgacttaaatttgataaaaatagctttgagttaaaagtaattaggaaattagttttacatcacatagaaaatagaaatctaaaggacttctataaaaaatttgtccatatatatcttttttttttggagaatgccaatttggatcaaaatacctctactctatattttaagcatttttgaaaaagtttaatcttgataacatcttctagaaaaaaaaatatagttgatttgaaaaaaaaaaattgttatttagttgaaaaagttatttttttgatagataaagttttgtctaaatttcttaaaaaacgatttctagtgatctacttagtttataatttctattctaatattttgtacatattctacgatatttagacaatttttctttctaacttagaaaataggatattcaatatctaaaaattgtagaacatgtattctaaaatttccttcatgttctaaactatgtgtgaaattgtattctaagaatttttatagtttctgaaaacagtagaaaacgttttctaagaaattttcacttttagaatttatattctaaccaaatttagaattttgtttctaaactatttagaattcctagatatagaaagtgaatctttgaaaaaggaaagtaaatatttattaaatattacgttttaatagtatattttctgttaagattacgatttttactggatttagaaaacaaattctaatttttttagaatacaaaaaaaaaacgcccaaaaataaattgtaaacaaacgatttgtgccctagtcgatttgtgccatattattgatctcttcttcttcacgttcttccttttccatctcgtattctgtttttcattatgcatatctatgtgaggagtagtatgtggagattgtaggataacaaggagtggagatttatttttgatgaaaaaatcgtgggagattgctgtttttggaattgactacaactttcaaacgaatgtaaaccccaatgatatgctctcaacttctcaaggtccatcaccaacttgatgtattttactttgatatttttcttctcatccctagcaaccactattcagcaatcacacacagataaacaaaccttacccggtctacttcatcccacatgtgaacttctgataattgcttatccatgaaggtcttaatgcatatagtgttccctttcttaagcaacttgctccaaaaccccttgtcatctctctaagaatctaaatcatgcctaaaatcatcttcgtatttcaaaccagtcactgcatagaattcttgcatagaaaatcgaagaggcttgtttccaaacacaaaccagagttcatgtttcttcctagttaccaactgtctacacattaagctatgcaccgtacgagcagagtatcctaaacggctttcaaatatggcaaagacgtgtgcaaactgaggatcactcttcacttctttatactctaatggcaaagctttcttgattctctgaaggatgctgttttgtagaagttgttgatttttccaacaaaaggctctctaccatgtctgaataagcgcttcggatactccttatcaatgtgtgcacataacaatcacttatatattaataaaacaagagataatagctgcagagttattagtaaatagctctcatgagaaacaaaaataaattgtatcttaaagtacttgaactcatactcgtgatgccttcatcggtttccattaagaagataaaccacagacgtaatatagatcaaaagcctgaaaaaacaaagtacacactttagcttcagcaaaatattgaatgtaatagacaacacacttagcaagttagaggatgaacacgatatagcttcattaaccaaatgtttggtgttttgagaccataaagtgtaaaagttaacatgtagatccgacaagaaccgctactttagtttctccagaagtcaaattaaacacctcatcaaaaccatcaaagtacgtgaagatatgaatctgttctcgatgaaaagggaaactagtaactaatcaataagaaaaaggaagactttttatccaaatcaagttcaactcctcgataagaacaaaacctaccaccgccacctttttttatggattctcataaacctaagctaaatctaaaaaccagagtcaacagaagatgggttcatggattcgtaaggcttgggatttgatccaatcaagaagaggaaagacaaaacaagaagccaaatatgagaattggattagtcttctccatagaaacagaatggacaacgacaaaactaaacatacccattgtacacaaactcaatagaaaccatttctttgatgcatcaaaatcaaagtttaggggataaaaaaaaaacagagatcgaacacatttgtctgaaagttatcaaagaccgaatatgcaaatactacacaacaaacaaccgaaaaagtcataactacaactgcaaaaaacagcacaaaggacgatgaatccaataattacgttatgaacccgaacactttaaccttcaaattgtctatattccaacaaagaatctagctaaacttaaaacaaaactaaaacacccaaatgctccctaacattatgactaaccaaaaccctaacaagagaaactatgtagctgctcaagaaattatgtagttgctcaagtaatgctctctaatattttcaaatacatatcgtcactaatgaatccaataattattccacatctacaaaagaatcatcacaaagcaattaaagaacaaagcaaatcgaataacataaaccctacagattgaatctacttagcaatttaatctagtacatatctaaattgtaatagtaaatcaacctaaaaacaaaacaaaactcaaacaccacaaatcataaacaagaacacaaacccgaaaacaaaatttctaaacttctcttgcaatatacatacaattcaattatcaatttcccacatttaagcaaaatcaaaccaaacttcaattgaaaattgtatctctcatgaattgaaaattgaaaaggtagatgcatggaaccgaaaagaaaaaaaaaatagagggagacaaacaaggaaccatgcaatcaccggtgggaggagtcgactgaaattgccggcggaaggaaactagtgaatcgccggcgagaagggttcgagagcaattgatgattagagtgagaggactcgagttaaatcgccagaggctaaaccaagggtgagaggactcgagttaatcgccggcagaagggttcgagagcaattgatgattagagtgagatgactcgagttaaatcgccagaggctaaaccaagggtgagaggactcgagttaatcgccggcgagaagggttcgagagcaattgatgattagagtgagataactcgagttaaatcgccagaggctaaaccaagggtgagaggactcgagttaatcgccggcgggaggaatggactgaatcgctgatgtgaaataggactgaattgccggcgaaagaggtgggtcttttttttgtttcctttgactgtcacgtttcgatacacggaagggctatgttgcaggagatttttcatattatggtttgacctgtatttatttgacatgaaggtttatcttgcaaaaaaaaaaaattgaggttttttttgcacaaaatccttttgttttcaaacggagttatcgatgtcacgtcatcgatacacgggagggttgtattgcgggtgactttaaaaatggtaggattgacttgcataattcagacttgaatggtaaacttgcaaacaaaattgacttagagagttattttgcagaaaaccccaaaaaaaaagaatagatggacaatttttttgtagatattatttaaatttaatttctccaaatgaaattatagaacagaatctttgtgtgaaacaaaaatagtttattttccctctattaatttgccattctttttttttttgacacaaattaaagttgatcattgactatttgactcttttggccattcataagttaaggagcttaatctttcttcggcctcatcaaatgacggagtctaggaattaaacggcccgatcgagatcctgacaccaactcttgataacacatacaaagatcgagataaacacatgacgcgggagaaacgtttgatagctgtagcatgacgtggggggcaaggatactggtcgcccaatagaagaagaacgccgatattaaggaaatgatgactacaaaccatttcacatgcccaaccgcagtaaccacaccacaaaggaatgccaatggcatgcagagtagagaaaaaagcagtaagggcaaggccacatttaaggatgatgaaacgagtgatggatcacccaactgcgcccatatatataagagtacatattgatgcaactgatgtttgcattgccaatatgtcaaatagcagaaaaaagaagagatttgggtcagtggtcaaagttgctcttcctaagtgtggagcagagctattaaagccacctggtattgtaaaacctgcagcaaacgtcattgtggctacaagtgctgctaccagtagaagagtgttgacgtaatctctgctcttttcatggtctagtggttctgatggttttgttaacgacttaacagatccacaacccctaaacgcgtgagcgtctaataagaatgccagtgtcaacctctgtaatccaaaaatggccaagctataaaatcattaatgtgtgatcaaatggtatgatatagggaatcaggcatacctcatgaaagatgtagttgggtttcagcactgactcggcaatacccctagctgttaagccgttatcgtttcgtagttgcagtatctttacatccgaagctagcgttctaattgatcggtagcgccaatttaggacagcaaggtgcaaaggtgtattaccatccacatcttgaccaacacccaaatgttttgtatcatcacttcgcatcaacgattttacaagattatgttccccaatctttgctgcaatgtggagaacgttctggccaagtttgttgagcatgtgttttgaatgtggacaacgttttagaatctctttgacaattctgatatggccgttctctgcagccgtatgtattggaaaagaaccatcttcgtcacagacataaacattctttgttgatcggtctaacaggttgcatactcctttataaaaccctatggatgctgcaaaggatagacaagtccttccttcttcatctcgctcgtcctcaagacttggatattcgttaagaataacatcaaggacacctgctcaaacaattgggaacaacaattagcataacgcagctggttttacataagaaatttgaacagactaaatgccaaagcgagagataaacctatacttctggcattcaaagcaacatgtacaagatgttttctcccttccaactttgaatctaagttagagttcctcccttcaaggtcattgttacctgcggttttcaaaatttctttcacaagagtcacatctccagcttctactgccatgtacaaggaagatattccctcattattttcaagaaaagaagcattctggttctcgttcaccagagaggcagccatctccatatagcgtccttcaatggccaagtgcagagcagtatttccatatttgtctctgagaacatatggatttagtctctctctatcttcttcagccagtctatctgaaaaaaatgttaccgacgcaacaagagcctcaacaatagccgaatgaccggcatgagctgccacatgaagcggaagctgatccttgaagtttaactccaatacaaggcatgggcattcagagataatgttcttcactagttctagatgaccccatctagcagcaagatgaagaactgaatctcctctatcgctcttgagacatgccattggcgttccaacgcctttcaacatctccagacactctttgtccccatcactcagtccgctaaaaacttccgtattcatctggacattttcacccgggagatggaaaagatccgataatttgaggttgttgaggaactctagcccagattcattgtctcccataggtggcgtggcgccatctcctcctcgtgaacagagtttgcttgcgactttgtttatcagattcattgggaagtatctttttttctgttggtcatgagacacatccgttgacctctgtgcctcaattctatctagatgtgcttcagaactgtccatcacaatcctaaaatcatcacacaaaaatcgtttgaaaacacatatttaagttccccaaccaccaaaaaaaaaagtcaatgataccaagaagagggggcagagagagagataccaaaaaacacatatttaagttccccaaccaccaaaaaaaaaagtcaatgataccaagtaaaagaaggatgatttgctaattcttgacaggggaaagagactacaagttagtccgtttatatcacttccttgtgccatgtgcgtggcgagagcttactgttctgtgtaatggtcacctataaattaagggaatgtctttctttaatcagaaaataattagagtaagcatccaatgcagagttaatggaagccaggtcttttattttcaatcagaaaatgtcaacgttcttatcgtcttaaccacctcaaacatgacattgtctcaaactagaaatgtaattcacaaagaggtttcatatggaaagcgagagattcagaaaagacctgatttacaagttataaagcacactattagaaagatatacatgaacacttctatattatacctgttcagtaaacgcaagtatttgcttcatgaagatcttattagtgtctttgcacaccactggtttctgaattaatgccatctctgtcccaaaagactgaaagaaggaagtttataaagtataagaaaccaaattctattctttgttattgaaacaaccaaaccctataacaactaagctattcatttatgcaatataaaagtttcttgagggtaagacatttctatacagtttttttcaccaaaatcaaaatgcagatttcacaatctttggtttggctattcactgaccaattttccataacacaacatagaaaattaacctaaagacacaaagctcagaacccttgataacaaaacaacaaggaaagactcaaagactgtcaattggtacctcatacaaaagagagattttcaactgtggagagctgtcaactagtacctactagtcattttttattacaatttagaacacacattcattataaacgtacatcgattgagaccaaatcagagcatagaaaatgaaaaccctcacacgattcggatagaaacaagagaaagaggaataagttaattgaaaagtttgaaactttaagggattcgggaagaaactcacttcaatttcagaaaagttgggcttgggaaggactcatatggcagacgaacagagaagacgaggagagtcgcaaaagatagagggagagagagagacacgacgtcgtttcaggaggaaaaacaaaaccaacttaaaacgacggttaaaccattaaccggtggttgaaccggttttacccgcgaactgatcaacccgtttttggacctacccgaatatacttttttttttttaaactatgtatgtatcagtgtcaagcgggccaaagactcacgggctagtaccatgatggagcgggtttggacactatattatatatccgaaaaataacgggtcttgcggatcggccaaaacggattacggattttagtggacttgacccacggtttggcggattgacctgcagactacaaatattcaataaaaataaataaataatttgtaagaataattaattttacttaattatgaatcctattataatatgtaaaatatgtaacaatatgaagaaattaaattttttaaattgtaatatttacaaaaagtatttattaaaaattaaattaaattaaaaataactaaaattaatatttaaaatatatatatttattattttttaaatataaaaactaagcctacggatcggtccataaacttgttgggtttagcagggcgaacctggagaaagttattttgtctgcggtcctagcggactgctccgttgcagtccatctaaaactaatggccattgtgggccggtccgttcgacacctctttgcaagtaggatgtagtgccgtttctttgtttacaattttcagtttgctaaattttatttggttttaaggttaataatttgttttattcagaaacacgaaataagggactagtttcctttcgggccttttataattcaggaccggtcgtggtcctcacggtactgactttttagatgtgcatgataaaaatctaacctttacctaaccaaatctaacccttatgagtcaagcaataccttatattgtccacttaaacgtcaacatttatactaatattaactacgaagcagttgcatgaaaattactctgcgatttcgtagcaaataatagtacaaataaaatatgcatattaatacatgttaagcaatgtgccataagaaaatgagacaaagacagaagcacttctatatttacacacgtaaattatagtaatcatttataccaaaaggacaaaaaaaataaggtttcattttctccaagaggttccaaaatggccaaggtacgctaaaaacatttgtattctaaaagtctaacatatatacggaaggttttaggatgaagtatatacgtagcagtattattatttgtaatattggaattttcatgagcagaaaatcttgatgtcggtaagtatgaggtgcgacaaatgtcgttcagaagccctcaagatcggagccaaaaccactggtaagatatcaattagaatccaaatatatatatcgaaccggcatttgactatgctatgcagggccggctcaaacttcttaaagaccttgtgctgatttatagaaattggctttagttaatactgttttttaattactgaaaattttggaccctaaaacctcaagtaaaattggaaaaaaatttaatgaccctgtgcttttgctcctctggcacccccctagagccggcactgatgctatggatagcaaattatattcgttctaattcgcttgatggaatgatctcatattctcatgtttaaataacggagcaggagtgacgtttgtgggaatagaaggagaagagaaagacaaagtggtggtgatcggagaaggtgtcgacgccgcatgtttagttgtccggcttcgcaagaaagttggtttcgctgatattatcagcgtcacagatgttgacgacacttaaaaaaacaagtcttattctagattcactttttcaaattcaacttttcaacaattgattatgtaatttctctgttttcctagccactttaatataaataaaacaattgaaaattttttagtcactccatatctttaataaataacaagttaaaaccattttaagctaatccacgatattaaaaataccaatattttgaaaagaaaaaaagaccatgatattgaaggagaaaaacagagagcaagaaataacaaaactcagttttagtcatcgtactaaacaaaatttgaggaaaaagcttacaaaaaaagaggatataaaggtaaaaagccaacctgaagaatatttgcagagaaaaacagagagtacaatcctcgggatcagcaacgatatggccaacgaaacgaggcaatctctcctcgttacttgtggtcattattttattacaaaatataaaagccgatttggatttccattttttaaagtgaatcaaaactttttcctcatgagaaagttagtgtaactcgtgagagagagagatatgtgtattggagccttggaggttgaaaatcagatgctactggaatctctaccaaagatgaaacgcctcatccaatctgaaaccacaagcactctcgtacgccagctcacttgcttactgttccaaatccaaacattttctaccttaagtaaaaattgaaaacattcctttgtggatttcattttaaaattttcagaacaaggaagcattttaacctggcgtagacggagtaccagagccactggctgctgtgtccaatagaaacccaatctcctggaagttgtgctgccgtttgctcccctcccagtggtgcaaattgtcccagatgcctatacctgtcaccataccaaaccatacccaaatattatttgagtccaaacaccaaaaccggatttcacaatttttttattgtgtttctatatccaaaggaccttcaaaccacaatttcggcagtcaaaaactttgatctcttttaaaatccttcaaattaaacttgtaccaaacggatcaagacggtttcaagttggttctaaaccaacaaaaaatatatatatatatatatatatatatatatatatatatatataatctgaaccccaaccaaatcaaaattaggattaaactacataaactcactaaatgtgcttcctaacgtcctctttatctttttcattcttacctaataatataaggaattaactccatctttcctacacccttatggtccaatgcacatgactcagtagtatcttgagacagagttttggaaattcctctcaacttccatattctcaaaaactatgtaacattaaggatcaatgcttacacactatatctactacgtcacagttttggtttggtttaatcaacaataagacaaagatattggttcaaatttttagggaggactaacctgaaggggcggaaacggtgacgaccttctcctctcatcctaatgggaccttctggactcttctcacactcttccatacggtcaaagcatttagctaggtaagcaccttgctgcgcagcaaccttaaaaatccacatataactaattgataagaatccagcaaaaatgagatttattgaagatgaacgaagacttaaattcctaaacttccaccgaattacctgtgcagtagctggaagaaacttcacttgtgagtcaacctgagatagagccgatttgaactcttcgatcttcagttcaatgttattcttagatacatcatcagtttcggcttctttaagaagatctgcaatgccacgcatacgtttactcttcaagtagagctccacttgagggtatctaacacaaatgtcatccattgcttcttggaactctttgagagtcagtgtcccagacttgtctttgtctgctttgctaaaaatagcagaaacatcttcctgcaacaagaaaccactaataattttgttttataatccaaaaacattattccagagtttgggaagcaatagaagcgtcaaattaccatgactttgcgctggttaatggttgcgcaatcaccaagggcatatatattatcagttccttctacgcgaagccattcatcagttgccagagctcgtctattaccctgaaattacaaagacaatttcttagagcgagttgttgaaatttgtttgctaggagatgttgaaaattgtaaagtgtgagtttaaatctaaagcgcattactttacctgaccaatttgtttcataaaatcttttatcacaggacgagttccaataccagttgaccagacaatcattccataaggaatcgaggaaacctctcctcctttggttttagcagatatatctttctcattcactttagttaccatcgagccaagtttcacatcaattccatctctgctaaacttttcttcggcaaactcagtgattctcttgtcaaacctgtgaaagaaaagctttccatgaattagtaacgaggtttttatggaaacctgaaacttctaatcgtctgaccaaaaattatagggagacgattgatcaaaaattttagagtaaagaaatttcacatggtcaggatgtggtctgcggcctccagaagcgtgattcgcactgaacccttggctctaggatagagactgactagatcctcagtaacaaaatcatgtagctcagcggcaaactcaacacctgttggcccaccaccaacaaccacaaaatgcaggattctctttctctcttcatcgcttagttctggtagacttgccttctcaaaggaatcaattacagttttacggattctctgagcatcttcaacctcctataagcacataatgaaaccaattaaagccacagaaagttaacatcctacaaatgatcactctactttcacatgcttttcagctttaaactatcaatgcataccaagtagagcaggaaaaggaattaagagccaagagaacatactttcagaaaatgacagttctcctccactccgggtatgttaaaggtgttagactgagctccagtagcaattacaaggtagtcatagtcaacagaaaattctttctttccatttgaactaaggccttgtttggatcggcagtaaaccttcttgctagctggatcaattttgaaacattctgcctccaagtaagaagtatcaacattcttctatttgtcaaggcaggaaaacgaatgtgcattagctattttttcaaccaaaatttccatttagagttagccatatttacagcagaattacctttcttccaatgtttcgaataggctcaacaacactacgagcttcaacagttccacaagtaacactaggtagtaaaggagtgaaagcaaagtagttccgaggcgatataatctgaacctcatattgagaattgttcaaattcttcaagaaactagttccagcccatccagttccgagcagcaccaccttcttcttcttggttccagtttcaacaacagcaccaccatttgctccataagatgcgtttgcctcagaatacgctataagtccaccaccactataacaatacacagaatctcacatcagtcaacacagatcacaacaaaaccttaaaaactacacaatcaaataatcagagatccagtactctaagatccaggacatataagcaaaaacagtaaaacgaaatttgcaaaatccagatgattgagtttcatcgaatcagattatgaaacgcgttcttcctgaaataaactgggagattcagaatttaacaaaagcaagtgttgcgtaaatgatacaacctaaagaatctattcaacagatagttttccctggagaatttgttgttcgtacgtttccaggtagagaattgaaaggtttcaacaacagagaaacaagaaaaaaacagagagctacgagaatcgtttttgaagaagatgaagacctgatcgtggagacgacgagaatcctggtgagagaaggatgatctttaaaagctttagagaatctctcgaagacactgaaatttctcattttcgctcttggttcgattcaatcgctgagaagaagaagaagaagaatttttcacacagtaacgccaagaaacctggagaaattttaatctaaggaggaaaagagagagagatctagagggggccaggagatgattgtgacggtggagaagtagagtttgtcatacgttttggttgaccacgtggcatgcgtgtaaaagtcgagtcaaaataaaatttaaatggaaacaaaaacaaatacgaggttatgattggttgagaatatttatttgttttgttaatatatttatttcagagctacagtttcgtcacgtattaataatgacatttaaaacattattaatattgtggaagagaaagtatagtagttaaataaatacttgtcaaacaatcttggtggccaagccagatcgtcctctctgaatctgaccatgttgttacttattatatttggtggaaatgtatttcattttctttgtcgacaacttttaatatgttatacgtaaatcgtgacgacattacacattagagaaatcaaattcgagtttgtttgttgagaattataaaattagattttacttgacgaatcaaattatactcagaaatcagaatattgctgccaaaacaagttgttagaatattgttctccaggaatataaaactacaaaaagcgtttccgttttgatttcgtatatacaacgcaatttctccggcgaaccggaattcgaatccggtttaaagattgacaacgatgggaatatctccaccttcacgaaccgagttcgatcttttacatcaataaccaaattgttgtccaattcggagtcgtaatccatatcagattccggtttaattgacctttccagcctcacgaaccgggttggatcattttcactcataaccgggaaatcgcggtccaattcggaatcagattccgggttaaacatcgataacgatggaaacctcttgatcatcacgaaccgggtcggatcttttacacccgtcatcgactgttcttcttcttctttgtgaataacttccaatggagctcccaatttaaagttccattccataaaatccgggtttaaaccgagacccgttttgagttcaggtcctatcgaatcctcattgcttccgggtcgggcaatggatttccgggtcgacccgagatggaggcaggagattaagaaagctccgatgaggagagggacatgggaaataagaattcgaagagaatcttgagggaaataaagaagaaatatagtgtagagtgaaatgaaacaagagaacagaggatgagagaagaagatcgtccatgggattttaccagtttcctccattgataaactggaagagaacacttgtgttacagtgttctaacaagctcgtaatattgagtgcggttaaaatgacttttagttgttacctttatctaatcaccatgattaattagtaaaatgtgtaatatgtgaactctttttcattagccttaatccttatttatgttgtgttaagaatggaaatgtgaatctctatttcttaacctcaagatccgatacatcctatacatgagaacattcctagcacatcactagaaacatcaatcctctcttagcatacaacaacaattaacaaagcataagaaatgagcaaactattcttatatatgagtcattattaagcataatagattgttggcgtttgtttttttcacctatatttttacacattcacagtatacggcaatatcatttttcaaaaacatgaaaatcataaaattttgattatttgataacaagtaacttaatcacgtttacatagcgttaaaacatgtaaaaatgatatactatttacctcttaataaatatagtcctttttaactcaaacaaaaaaagctagtgcattttttcttatttcatattctttctgttcttttttgtttaatcttttaggaaaaacacaaatattaagaaaacatattaaatgttgtttttaaatgtattgttctttgtgatttacaattttcaataactctaaaccaatgatattcaataatttgtattaaagtttacaatttatcaattataactaataactattgcattgaaaacctaaaaaataaatctttttgaaataatttttttttctaaacaatcaagatcgtcattgatccttttatgatttatttttacaatgcatagttaaagctattaagtattaaccaatactcctgttaacaagaaaacgcgtcaaatttttgtttttggttgttttttccacctaaaattgttatattgtgtactttttgtctttgatgtccgaatgtttgactacgcaaagcttttgtaattactcccatgatggtagtttagtggcacttttttgttggtcaatgccaaaaaagtcgtttctcgttgaagtcttcttctcttgaccattagaaaatttacatgacgattataataaaatccaaaattaagtaacctttaatccaaaatcacctgtttagaaaataagagtaaaacaaaggaaatgacatttttggggtattttgtcaacgttgtgcatgttctacggttgaatgataatatatatatagggtactataataatttttattgtggttgtaaccaaaactaaggaaatgacatttggctaaatcctaacatgttactcggtagattagtggaagatgatgaagttggtaggtcattagttattatgaattataatttcaaagaataattaggactagcaaatctgaaggcaagagcttgttgggacatcaaaacatggttagttggagattgacaacccactcttagacctacccaaatttgaccatttttgggtccttttgtgtttagataaagacttgtttttattcatttaaatcaaaccaaatatataaaaaataacacaaagattataaagtttaaaatgcaaataaaagagacattcccccatatcaaaacatgatagataaggtgaaacgacggtaaatcaatgagagctttaaaacaaatactattgagcattctgaaacatgtgaggttaagactagtcaaatgatcttccataaacaaatcaatggaaaacaaattggacacggtaaaaagatgaggtgacgttgaaaataatttcataaccgaggttttcgccggcacgaaaaagatgagtttgagttgctcaacggcaaggagttggttgactatgtttctatgattgaccatttttgggtcataagacgtaaagacaaatgcagatgatcggtgaccaacattggaatttggatgtataagataaagatgccacaaaaatgtaaaaaccacatgagacgttagaactattttcgaccgaccatgtgtcatcagtttgtttgaacctccacacgaaatgatcaaaactttaaatttacaagattgtatggtttaggttcgatccacgtagttcgggttaaagcccctttagttgcatttttttaacatgaaaaaaagaatggatcatggggtcgattatttacaactttccagataacaaaaaatagctgtcggtgaggtttgtaatatatataagagagaactttcgtgaagtgaagctactttttagctaatttatagaatttgcctctcttttctcttctttactttctacaaccacatgtggagagcaatgtattaaataaaaaacaatccattttgagctgttgatcggagtgaatatgcattatatgacataaagtctgcataataatttaatctgacacacaattgatttattcatatataagtacttttttagattcattcaatatgtttacttacattagattaaaaagaaagtaacatgtaagttgtttattcggtgtgtgatgtcgataaaacatggtatgttgaaacatggttgacttacaaacgtaacaatgctataaaatctgttcacatgatttttattagcaggatcttgttatgttgaaatgtgacgggttgataaagaaaacataatgatcttgaataaaaactgtttcatacagtgcaaaacaactcggatagtaacgaaattatatatgtttgttattattagaaccgtaccgtacttttttgcatccccgatatgtccattttgcaacaatatacatttaataaattgtcattacattgtatttttactcatttaaaatgaaaaacccaatatgtacaagagttgatttttaacttcttaattatttgaccaattttattactcttgatttgttcatataagcaatacttttagattcattcacttgcattaaaaacaaataggagaagaaagtcaagaaatagcagtattaaaaaagaatcttaacaatatttaattgaaaaggacaaaatcaatacttaggatactctgatcacaaaacaaataaattattcacaaataataaataaccttccaaagtctgcaaataattggttatattcacatggtcagtaaatataataaaaagcttcaatgataaagaattgaagcaaaagcaaactcttctatgtcttgttctttcctcatcttctgcacaattagctgattctttttttttacctttcttcttcatttaaacaataccatagagatcttcgacaaatccgattctcgattaataaacctccttcgaattggtgcattaggaggctccatttcatcatcttgactactggaattcgaatttgaatcaaggattagtattgcgtctcgaaatggcaatctctttttaggtgtgctataatcaaaatgcgacttctttgcttcaattacctaaaaaaaatcataaaattcaattaaaaaaaacattaaattattattgcttaattagaaagaattcaatgatcgatcattttcttgattcaaaatcttgaaaaaaaacttacagcttttcttattgttttagatacacgttttagtgtggctaggtcctcgtgatccacatgacaaagtactcgaatctgcttatcagatcaaaatcaaatccccaaaactaatcacaattaaggagaaaaaagagatttattaataaatgaacttaccaaaatatcttgatgcagagtttcaagcagagacctacaagattccgtcgtttcatgacttggtctcttcaccggcggcgaatcattttccggagctcgtttagatatgagaatccttttcctccctaatcctctagtaaacctcacaaaccctaaccctaatctctcatactcacgagtcgacttcatttcaaatccatcactcaaatacgccataacttaaactgaattttcagaagctaatggaagtataaagcaaaatccaagagaagataacagaagtagaaaacaaaaagattatgtgaatcgttttttggggagagagaatctgagactgaagatttgatatgaattataaattaggaaacaagaaaaaaaaaattaaggaagaagaagaagaaaaaaaaagcaaataacacgtggcgttatttgattggttaaatgatgaagtggtgatcgtggtcggtcggtcgttttcggctggcttttaaaaagggtagtgtcgggttttaacacggcttctttttcttctttatatacggtgaagtggagaatcatgtgaaataaagatcacggtttaatcggtgtgttttgattatgatcgtgcgacacgtggatattgaacggtaagattttgtaacttagtgaggaaggttgacttgtgcagtgtactcattggattccgttaaaatgaaggatgacggcgattacttgattctccacgtgggaataacagttaaattttaaagtttttgaaaaagtgtggaaatatttcatatttataaatgaattataaattaggaaataagaaaaaaaaatgaattaaggaagaagaaaaaaaaaatgatcagcttatttataaatcttccatatttgtttttgggttagacggtgaataaaaaagtcttactagtggcgatatcacgtgtatttaaggactattttttgtgacttttatcatggtcgtacatatttacgatgtttttgttattaggttgtgactacttaacgactaacaaacttatagacgcaattttgtcgccaatgtacgacacttgcattaagtcggagaatggtcaataattagcgactcacttacgataattttgcaacgtaaaaatacaaattcttttttcttaaaatttcactatagtcgcaaaagagtcttaaatttattactactttgcctctcattaaggactccacggaatttaaaatttgcaatttgatcaaaaagaattattcatatgtcaattaaccatttttgcattgatttgacaataatacattgatagattatttcacaacattttaattgaacatgtttaagactaaatgattattttacctcttaaaatgaatgatatgcttcaaaattggaccctggaatattcaaaatacttattactaatgtatttagatcttaaagttcagaaatcataaatattgggttgtgactcataaaaaaacgtcacaagggaatggtgctttacgactactttgcctgtctttagcgactactcgtgattttagaattgcaatttgattaaatagaatgattaatatgttaagtaaccatattttgcaatgatttgaactaatagagagatagattctttgaatagttttttttttttacatgttttagaccaaatatatgtaaaaaaatcaaatcatgtacaagatgttacataagtttttaaactaaatgttcttaatctatttaggtttcaaaataaaattatccaatgatggttttacccattgaaaatgaattttatacttctcaattggattgtaattgatttccagtacttataactaatagattagctctcaaacttaaaatatctaaaataatgacttgtgattagggatgttgtggtgggtaaaaaaaactcagctcaggacaaacccaaaacaagcatgcccataaaaaaacccagattcaaaaaacccgaatgagttttggtatttgtgggtaaaacttagaaaaatccatgtgttctagaacaacctttgggaacccaaaatttatatagatatatttaaattgtatttattgtttgtattatatatatatattcaatgttatatgtattttatattttgtataaacaactttatttgttatccttaattgatttaattctttactttcatcaaagtttctaacaaatttataaacccaaattccactcaaacattaataatttaaaagattatacaaaagagagtttcatcaaagtttctaatttgaaacagaaatacaaaagtagtaaaaaaaatctaaacaactttttctcatactcgagagctggttgctatcgatgttgtaccttcaatgtcacctacaatttgaagatataaattaacaaaaaaaaattaagataatatttttttttgaaagtcctatgtatatatatggtccatcaatatcataagttaataattatataaatgtatcaattatatatataaattatatgtaagaaatttatttgaaatatatttataatatttttttttgcttaaattcatatttgttcttatttaaatttagttctaatattttactgtatcaaaaaaattttgatgttattttcaagatattataattattttttacttgtaattggttttagaacaatattttctataattaaaaagttactaaattataaaaatctctatatatataatattaatttatcgatatattaatacctcttcaaattaataaaatttcacggtccttacattactcatttatagagattttactgaactttgtatccatgtaatttcacattttttaactatctctctttttgtttgaacttagcacaacgacctcgaagttagatagtccaccacagtatcttaattcactcaaacaaatctgcaattatatatagtcccgtgagagtaatgaatcaatagtaatttggtttagataaaactttcatataaccaaaatatggtacacataagcacattcaactcctcaaacgtgtaaaattctcttggaattaccactaaaccagactaaaccaaagacttttacacaaaaacaaaaacaagaaacgtaacctacattgatcttaattaccagctttaggcaaagctgccatgaaagagttgtatgatgactcgagatcaaagtgaagttgccttgactgttgttccgtaagctcatcggctgctcccatcttagacaacctcgaaagccattctttcatcttcgtcttcccttcgaaatcgggcggtagaatactcagtttgttgagagaagcagatagatcagacaagagaggataaacctgatcgacagccaccatgtttagtttcaaagaatccattgaagtgatgaaattctgtacacattcagcaacaatggatgcagagttcgacgtagatgctgcaacggtagctcggtgttccactgtggcaggaagacctgatgtcaccaggcggtatagagcagctggacagtccattttgtatgtgtctgcaaatctttcaatgtttggcaccgtgtctttgagtgtagcggataaagttttgaagtggacaatgagtttctggcattcagattcgtactctgaaggattgattaggtctcttatataagctttctctagcttctctgtggctttgatgattgcaaaaagctctgcaaaattctcatacatctctctttcgcgtttgtcgttccataatttgacctccatcattagagcaagtcaatctacggagaagagaacggtacacgcacaagctcttcctttctgtatcaatgaccacacagaccaaagtcaagatcctaatatctcaatagaagaaaacttcaaatcgagaagaaatgaaaagcaactagaattgtccaaagaaactcataacctatcaagaggctaacagttcttcactaaagctttctaaatctattagaagtaatcaaaatcccagctttcttcatccaacagactcaattctaatacccccaaacacagtaatatgagtttgagagtttaccacaaaagctcaaactaagaagaaaattaaaaaacagaatcgaagtatctctaacctatcaagaagctaatttcttcactaagcttcccataacttgcttaaagcaatcagatttcttcatccaacagagccaagttaaaactctaatctcacaagtcagtaatagaatctcacatttagcagacaacatggaacaaaagctatgaagaagctaagtaatttttcactagattcctatatctcactcactagaagcaataatcccagatttcttcaaagatgagacaacaaatggagatgttacttacacgaaggtctgtcaagagatgattgcgtatgaaaacgatgaacaaaaacacggatcaacaaagttaagcaaaacttagtgatgagccgtcgattcaaaaaccctaaattcaagtaaattatgggagattcgagaaaaattcgagatctaacatatggaggggaatatctgaataaaaaatagcgaagaagattcgtaaaccatacgaatttgaaagtgaaagaggaagaaaactgacctgagaagttatgaacggtgaaagcaaaaaaaaatctgatcggagaagttgaattgagaaagaggattggtgaagaagaagatgacaattggttttaatctaataaatattgaaccggttggtcgaaccggtactaccggatcagatcgggtctattaaatactactaccaaaaattgattttccgatctaatccgaatcaaaccaacataatcaattcgaaactcgaatttactttttatttaaatattgtaattttttgtttggtatgaagtatgaactatctatgaagttagattttggttttttatttcggtctatttataaatattaatattcattataatacatacctttgttttttgtggacaaaaataaaagatatctaatttaaatgatttgataccggtttagctgataaaatataatactataatacaaattttggttgtagataaatttttttgttttaattttttatatattaggtattgaacccacgctatccgtagatattgttttaatatattttggtgaaaattatatacaattgtttagagtttttaaattatttctaaaataaaaatttcatttcaaatacaccatattagaaattataaaacttaatagtgtgtacgagtcaaattagatcaaaagaattataaataatcttatatcatatttaatgggatgccaataccatcttcgtatttcttttcacattcatcgtttcttacttttcatatttttttcgtcatctttattgtcgattttcttatgatcgttgttattattactttcattatccgtttcttcgttatactcttcattttcctcttcttcgttatgttcctcactctttctcatttttttcatcttcttttctgtaaaaaaattaaatttaaacttaataaccttaaccaaacttaattccataagcatatgaattaaatatcgaaacgacttggtttattcctatgaactcgaaattcgatcccttagttccatgtctccggaatactctaccaaatttcagacatttcgagtttattcggatgttcggtttttttctccacatatctgataagatctaaaactttagaataaatcttctcgaaccaattgaaaaagcttagataaattacacacaaaaagacgtttaaatctatatcccaccattcaacctcaaaacagtaataccagacacctcgtcatcaagtctagctacatatgaaccaaacgttgccataaaaaagtcttgtcataactgttttctcacttttctttgtcatatttgagaatccaagtttgtgttatgctatcaaccgagtttctctttctccatcattttagatggaaatcaaccctctttctgacctaaattttggtatcaatttgttcgtaatacaaaaaacttttcattaattaaatttattacatttcttacgccttgtcaatttccttctttttattgaaattgatatttttaaaaagaacaactatttccacaatttcaacacaaatcgtcatacttttaactggttagataccatcaaaccgaagtatatacaaccgaagttcaaaaaaagaaccacgtatgaagttatctcattatccataggttcatccaattgtcgtttgacataaccaattttaattatatttgcatatatatatatatatatatatatatatatatatatttctcaagagaacttgctactatgatcttatatgtatgttcttgtttaaaatttctaatttttttcaatctttttctaatttcaaaaattttaatattaagttttacacgtatcaaaatctaaaatcgctaaaatagagacttgtcatgatctcgtgagttactaaccttcaaaactgtactttatataataagatagattttagaaattggtttctaatcaaagaacaagttaaatttgtaaattaaaataaaacctacacaagtttttttttataatagattggaagttttgaaaatcacaaggaagagaaaaagtaaaacctttcttacaaaaaaaatcatggttttatcttttacatgataatgaattatttattatgtataacataactatgcaaaacatgagcaaaacatatacatatgaaaaaacctttatgtgcaaatcacatcacctaaaacatgtttaccaatgtgaatatcatgaaattaattcattatatagagaaataaagaaaaaaacttattagagattatacatattttaagggtatcaactagtctattagaacataacatactgccatgaatgaattgaagtaaggcatattcactcaaaattaccgcatttccttacgtcgctagaatcaaccatatggaaaacttgtccacaccttttggttttcttacttttttttagtagcatttgttttaacaaacatatcaaatgagattctaaattaaaacaaatactgattattcaaattcaccacaaagataaagagatgatgtgtgtaaattgagattgtaacgaggcagcaaaaagttcacacgaacaatgttctcatggccaatgaatgattgaacaaaagttaatgtcgtgaaggcgattaccctcataaccaaaacctcaactccatacacaacaacaattataaaacgatcttttaagctatcggtcatgctgatgaatatgaggaggaagatggtttggatggaggttccaaaaccattcacaaaaaaagaatagagctaaatggatgaaacgatgaaagcctatagcgaaaccatatcaagctgctcatgttctttgattaaagaaaccgtcatatggttttccacctattttaaattacaaatttaatttattctttgttccgactcatagaaataattttagatattgatttcttaatcacataacaatttcaatttgtaaatttaaatataaactacacaagattttttttaaaaaaaaagatatggaagttttgaaaatcactaggaagagaaaaggtaaaacatttcttacaaaaaaaatcatggtttaaacttatcttttacatgataatgaattgtaaattataaatatatagatgcgtccattatgcataacataactatgcaaaacatgagcaaaacatatgcatatgaaaaaattttatgtgcaaatcatatcacctaaaacatgcttagcaatgtgaacatcatgaaattcattcattatgtagagaaataaagaagaaagcttattagagattatacatattttaagggtatcaactagtcaattagaacataatattactgccatgaatggatggaagtaagacatattcactccaaattgccgctttccctacgtcgctagaatcaaccatacgaaaaacttgtccacacctttttggtttgcttacttgtttcgattagcatttgtttaacaagcgtatcgaatgagattctgaactaaagcaaagactgattattcaaattcatcacaaatataaagagatgatatgcgtagattgtgattgtaacgagtcagcaaaaaattcacacgaacaatgttttcatggccaatgaatgattgaacaaaagttaatatcgtgaagacgattgctcataaccaaatcctcaactccatacacaacaacaattataaaaagatcttttgagctatcgatcatgctgatgaatatgaggaggaagatggtttggatggaggttccaaaaccattcacaaaaaaagaatagagataaatggatgaaacgattaaagcctatagcgaaacatatcaagctgctcatgttttttgattaaagaaaccgtcatttggttttccagctattttaaattataaatttagtttgttttttgttccgactcatagaaataattttagatattggtttcttaatcacagaacatgttaaatttgtaacttaaaacaaagactacacaagattgttattttaaagatatgaaagttttgcagatcagaaggaagagaaatttgaaaatacatttaatgagatagttattataatttgctattgtaactaaagatgaaatactaataaatttagagagactaataataaattatttattttcgtttataaatttaataaaatagaaatttacatgttgatacattttatattatttggtaacaaaatgtttagaaaactttccatattttcaaatacttttttttatttcatatattggtttttcctattttacaaaaatctaaaaaaataaaaaaataagaataatttcataaatgttaattagcgagatggttaatctcgattggttgttttaaatcttatgtagacgctttgagaagcaaataacctcgacttttctatagtataaatgttcaaatttagattcagcctttttcttgaatattctaatgttgaaactatttaaaatttataatctaatttgttccttttgaggataatagttgcaatcatatatttgttgtttgtgatattaaaaaataataatctgcattcccacgagggtgatttgtaatatttttgataatttaattgaaataagaaaaaataagaaactaagaaaaggggtaagtaaaaatggccaaagattgaggtggtggtagtgactccgacgttggtgactccgacgacaattttccagtgatgatttccattgatattaatatttagcattctaaaatagttagaaagtttttctttaagcagcatttgctatgttcatcatgtttttgagtttgtaaccttgtttaatatgttttatgattactctttatgtatcttgtagatactgaattaagagagataaaaggatgtggtggtactgtttctacgaaaaaatgatgcaaatagacatatccatagtggaaagcatcataaaggaaactagaagaaaaaattaatcgttggatgaagtatgaggcaaagaggatattggatgacacattgaacagtcatcctccatgctttccttacaaccttgatgtctttgcttgttaaaacgaccaatctaagttagtttttcaatacagttttttctgtgaattttagtttagatgtagctttctcaatacaaaaacacatgtttaattcgtcgtaagttgattacaactaaagcaagaccaagatcaatgtaaagaacagagaatggaaggagctttaggcttgtcaccaataacaaaacgattttaaattgatattttataagatgaaggaggagagttgtttccaactctcaaagttacaatcataattctcattaaataactatatatatgaattttctaatttgctaaaaccctagttacatggacattacattgggcttgggcttgctttagttgtgaaccctaataattaattcattgaaaagaatttgttgttaattaaattaattctaaactttccaacaaaataacataggtatgaatttggtcattccaaaaaaacggtaagtcgttgctaatttacgtgtcaacatagcaatagatttgcctatttgggattatcattgcggttattttacgggtcgggttgggttgttgttgcattattttacatgtcatagcaaaattgaaaccaaaggcatataacttacaaatttccactgagttttgacttaaaaagttagatgtttttatttccttctctttttagtcatcaatatagaagttatatgttaaatgttatcaacataatagttcttttatgctcaaactcattatttagttcattttagtgtatgtgtttggttaatgaagcattaatttggaaggtgatcaggtcgccattaaccttaggcccaatatcattgtgaacacacgtggattggaactaattcaaatcaatcttgaacttccaatatgattatagattgagatacatactcactttggataatgggatcaagtaaaaaatgtaaaatcaagatgaatgtagtaatatgcagatttggtcacaagatttacataattaaatctaaagacatacacatctaaccatatatgatacaaaatgaagacaagtctccgttacataattatatcaactttcttacttttcatcgttgtgaccacggaaagacttgtaacgtcttacagactccaacctttgcaacttcatctcatccttgaattttgtaatgaaggcttccactcgtgaattgagctcctctcttcccattgataactcttttttcaacttcacccacgacggaatcctctccatcaacttctttcccggccgcgcgggagatgaaggaggcctccttgctcgcgacgatgacggtgatagcgaagacaacgaaggagtaggcctcctcgctcgtgacggtgaacgtgacggcaacggccatgaagatgttgacatttttgtgtctcccctggatatgacgtggtcttgcaacgagttaggtttctttggttgcttttcggctttgactctctcccacatctcctccatggtctcgctctcgtcccccgatgtattgtctgatgatatagttatatatatacgaagttggagtttttactggaactaaatcaaagtaattaaacgtaatattcattgttcataacgaaaatcacacaactcaacttatcctttttatttctctaagtctcatacttttcgttggacaaaatgatactggaatctatctgttccttattatttgattttctagaaaaaatattgtttctaaaatattgattttttttatataatattttatatataattaaatataacatataattgatgtagaattataaaaaaatgtaaatcacaaaaaaaaatacatttagaatcagcttttaatatgttttcttcatatatatggttttctagattatcaagtattacagaacagaggaagtattatttatagaattttttataatcttcttattgttattttgttttcctacaagattttcagtttggtttatgtttttctaaatctttaacaaataaaggagggtgtattcaaattagaatttaaagtgatttgagttttcttgagtttttaaatgattttgatgattttagtctaggagaagttcatatgatttttgtaaaatccattcaaatctcacccaaaactatgagatttggatttctgtatttttaactaagaaaatcctctcaaatcctccaaaatcattaaattcaaatccacaaattgttttcaataacagtggattttcaggtggattttgaaattattagttcaataacactgaattttatgaaactttttaaaatttatgtttaaataacataggatttataaattctatacaaatctcttaaaattccactttcaatacaagtttgggttatatctttaaagtttgaccaaaaaaattaaaaaaaacaaaaactgaaactttggaacaaaaatacgattcaaaaataattctctataagaaaattgtggatatacatataaattaaaatatcaatataattttaataaaggattttgctgaggactctacaaagattttgagacggcacgtaatagatagataccttgtggaaaagtctttacaggaacagtaggtggacgtcggagaccgacgggcttctccggcgccgttggaaaaaaacgaacctccggagaagaaaccccataagatcctccactctctgatctcactggaaaattttctttctcgtgaaccttattattgttttgatcaaacgaagaagtggatgagttattagaagaacggtcacgatcatggtcgtgatgatggtcctgttcgtaatcatacgtatcatcatcatggtgatggtttgtggccggagagtctggtccgtttccgaagagtgaagtagaggctgcgagggcaaagatgatgccgttgatgatgaaaatagggtgtaaattagtagggagaaggaagcgagctccggtgaaggagaagttaaaaaccgatcgaagcatcagtgatatggctccgactaagcctgaagagatgatccatgtccttgaggttaacattaatttgttttctctaaattgtcgtctctcttttgtgtttttttgcccttacatatatatagccatatttgtcccagtttaaagtctttgcatggtttgcatatatataaacccaaaggtcatgagtgaaaaactgaaatttatttaattgatatatatatatatatatatatatatattgtttcgttaatttgttttttcacccatagctagagacttgaaaacttcgggttttcttttgttgtatatatttacttgacccaaaaacatttaataaaattttgatatttgctcttttctttttgtcatgagattttttttagagttcaaaagagctaattcttagaaaaattatttacaaaaagtgatatgaagcgatttggtatgaatttttcgtgtcaatttgtccgctttaacatttgcagtacgagaaattaaaaataagaaaaatcttgtgaattcttccttatcggtctggaatttctccaaataagttaaaaacactggtcattcggttagagaatacaccatcttcaccaggtctgaacagtctgtaaaaaatactacttttttgttgtcggtgccaatcatacacttcatcgcccaaagtagagctttgacttctgtatggagtagagaaatacttctacggcagctcccacggttgatgagtctccaattaatgtgcaaaattttgatattccaaaggtgtgtattcaatgaaattgttttgtcgtaaacaaattttttgttttgatattctacaatgaataaaaagttggtttgttttaataaatttattctagaccattattcaaaattttaaaataccactgactaaagttatcaaaggattaccatttttttgcagcactgttaaaactatctttgctatgcctacaacgaaaactagtccctataattggaatataaactaatgcaaggaaattggatttaggtatggaaattatatatgtaacacatgcatgtcgacattattgattatttgacaaggtcaagatattttatattagtttatgattcttgattgaagtataacgagctagatagggatgagaagtattttttaagagatgaataagaattattattttgaaatcctttgtccttttaaggattattagattttaatccgcggtacaccgcgggaacaatttattttttaaagttaatatacataaaagtttacaaattatatctatctataaaatacttttattttatagtttacaattgttattaagtaacgttctgccaaacccgtcccgccaacctgtcccgtaaaaaaacattagttttattaatattgatcttatttatgatatgtttatgaattattgtctaaatattttgtaattttgtagtaattaaatgctatcaaatatttctgcagtttgatggttataatcgaattgttatagttatggagaaaagcaatgaaaatctagtggcagccattgtaaataaatctcaactacaagatttatttcacaaaatagttgcaaaaatgtatatgtagatatcgtttcaaatttggtccccaactattaaaaatcccgaccgtggatagaatttccaagaactcatggaagttcatcgaagactgtatgcatataataatactacatgtacttttgaatattaaatgagagtaacttataaatatcttgttgcattttacaactgtttgatatgtttaatgttgattatatgagcaacgtaagtttagatggcgacctaaatgatacttgctattcattgtttaactaattttaaaatagaccagcttggtcaatattatggcctttgagaaacttattttcggaatatttaaaagacaaaagggccaatgaaaatttcaccacgcttagatgtatctagctagctactattctagtgtgtgtatataatagacatgcctatgaagtcaagtaaatatacattatttacattcctgacgttgcatgggcatggcagtaatgtcgactgtgtaataatgtatatcgatacatgaatcatgatactaaatgtatacacatgtataattagcggatacattggtttacacatatatacagaattatataaatcataccgaatttgaaacaattaatatatacactctaaaaccgatcgaaccaaaaaatatgtctacacaatccaacatatctttttttgtacaccagtcaaccaaatcgaacatagctagaactgaaattcatattaaaatcaaatttagttcaaatatattttaatatttgtataaacttttgtaacttattttgttgaaacgaactgaagaaacctatcaatataatacttaaacgaaagtcaataatctaacatttttaagcaatctgatatcgatcgtaaacgaaagtcaaaatttataaatattatcaatgatatcgatcttcaactaaaataacaaactcttctaatttaaattcaattgctttgcatggtaacctattatcaaaacaatatattttgtataattttaacagttattaatcaaaaaaatttatcaaaaaaattatttaaaattttactttcagttcttatgtacagtttttttgtacagttttttcttacaattatgcactatttcgaaaaaacttacagattcagctaacagctaaaaactttatatagttttgtgttactaatgaaacccattaatgtatcatgcatgcatgtaattatgcatacataagttttttggctcatcaattaggatatgtgttctatttgactgtatcataattggcagtcagaaagtgtattttatgtatagcgtgaaagaattgtatcaatatagctaatttcatttttaatatattctcatgaagtttcgagggctcttcttaccactagagcgtagattggatttccatcacctaaagatctcaatcggtcacacacgcatcatcatgagtcattacattgacagaagccataaatcaaagtgcatgaatatgagtcatttgacgttgaccagtcaaatccaaggtcgagtgaaaataatttacattaatacattacaatttgaattttgactataattttcatgtggaaggtcaaaagaatagtattcgttgttcactgatatactcaattatttagtacgaattcatgaaactcgttttgagttatgctcaaaatttctaagcaagaatcaactggctgtataattctcgaaataattaaccctagtagaacttatttatatttttcgtaggttttttgcccaaaaatccttcacctatgtactattttcaatattagtccttacaaatttaatttcaatcaaatactttataactaaaaacttacaattagttgaattgtattaattagttgaattaactctttcctaaatttttatccttaattgaatctttctttattgaactatattcgattaaagctaatttcctaaatctatatatcaacattataaatatataattttttgtttttatatatagtttttttactttatatataaaatacatatatttaataaaatattagatttttttgcatctgatgaaattcaaattttttaaaacagacatataatactccatcgatgaaaacaaataagttttaaagatcccacattgcttaaaaaattgggaaatcgttaaaagtcatactataaaaaagaccaaagtgtttctgaatacaaatgagaaagaaccttgatatatcaaacatccaaaattaaaagtgttgttcggtttactccggttctttattttaaataactacaagtttaaaagttttaaaatattatatttatttaaactttattaaaatttaaatattacaatttttaacactttttaaaaagttaaactctataaaataaatttaaatattaatgattttaaaattttatgaactttataaaaagtttaaatattataaatattaaaaagatattaatactgattacgggtgaaatcatatatgtaacaatcaatatacaattatgaagtttggtccatattaaaacttttttgaagtttccaatattataaatattcgaacttcataagaaaatgataaaataatatttaatttcacaggacgaggttatatggtgggatgagtttggatcgatattaatatgggatgatataccatggatgaaatcctaaaattaacaatcaaaatacaattatacaattttaaacactaaaacaaaaactaaaattttcaaaaaaacaattagttataaaaatcataaagaggtgtatcatagtataatacataaaaaaacaatagcatgtatctatagatcatcctaaaatcaaaatactattttttatttaataaaaatataggcgtttgatgtatctcttgaatatgttatatatatacaaataatattaatcaaaataaaaatatctaattttctaacaaaacaaatcaacctccggtataacgcgggtcaatctctaaataatacaagttaaaaataaaataacaaaatataaaaaataatacatgtttttgatctttattacctctaaaaaatccaaaccataaaaacaaatactgaattttaatattaaactaacaaatatgagaacataaatcatgaattatcctagataaaaattatgtattaaaaatatattatttatatacaaataataattcttataaaaaaatatctataaatttttaatgaacatatccacatatacatttttggaacacttttatcaaataaattttcaagttagaacttatttacaataaatgtcgttggcattaattcttatcaattaattaatattcctgattactaacattttcttatctaatatatctccatcaatatttgattaaaaaaaactaacttaaagatttatttgataagaattaatgccaatggcaatctagattataacaaattaattactagcattaatatacagttcaatgagttaaaatctagattataccaaaataattttaatttttttttgttaatattatttattttgtttagtgtttaagatcattatcatttttcttataattaatattcttgattactaacattttcttatctaatatatctccatcaatatttgataaaaaaaaataacttaaggatttttttgataagaattaatgccaatgccaatctagattataaaataataattactatcattaatatacagtttattgagttaaaatctagattataacaaaataatttatttattttttgttaatattgtttattttgtttagtttttaagatcattatcatttcttatcaattaattaatattcttgattactagcattttcttatctaatatatctccatcaatatttgataataaaaaaataacttaaagatttatttgataagaattaatgccattggcaatcttgattataaaaaaataattactagcattaatatatagttcattgagttaaaatctagattataacaaaataatttaaattaatttttctgttttgttaatattgtttattttgtttagtgtttaaaatcattatcatttcttaaaatgtgattaaaatataaattctaatatatgaggtatggtcattatcatgtcgaccttgagatgattagcgttaatggaataactattcctaatcacttgacacccatcaaaggaaacacaatcatcgacacatggaccacaatattaaactcggctggggaatcgtacggtgagctcaaaagtcatatcgacaacttcattgacgaaaagctaaacaactttagtgatggccaactagagtgttacaatggaacagttcaacgcgagctagcttcattgcctacggtaacattgacattctacaagggagtctctttagatttggatctaaccagcttattccaacaaatcgaagaagagtatttctgtttagctgtgatgatgaccccgggaatcaatcttaacatcatctggacaaccgtatttcaaatgtacaacatcggatttgatcttgaagatgaaactatctactttgagaaaatctcgtgtgatttgctttactagattcaattgcattttgtacgagacataagatcatgtttaatatgatttgtaagaaattttaagtttgtaataagagctgagctttctttttctatttatgcaacattgctttcttaaatcacaatattataaaaaaatatacatgtgagctttcttaatcacgataatctaaaagatgtaaacatgtgttttcatttcatgctttttccaaaattataaacagaggtaaaggtactaaagtcataattctacatttcatgattttgttattaaagattttgatgaatttctacttatgcaaaatattaagatcacaacatccattactacatatactataaaaagacaattatatattaagataaaaaaaaatctatattatgacccaattttatttgttgataactatatatatatattaacccataatattttggagtcaatattactgagctggcctgttaataaaaagcattagttagggtttattactcaatccacacacttgaactggttgcttctttctcaagaaactgatttaggtttataccaattgtcctccattcccctatttctcttcttatattccttcagcttgttaagtcgatttgataactggacttagtaaacctaatttaaggactctaactattttcatccgttgaaaaaaagaactctttgtaaacctaagaataacggctaacctctaacgataatatatagtctctacttctacaatatttagcataaccttcaggagaatccaaagtgttttaatagaattaagagcagtgataattatagtcaaagatttctatcatttaaaacttttctaataataaccatatgagttagagatagagaaagagatagagatggattcaatctttctagaatttccggactgattttgtttccgagattttctttcattcattgttgaagaaaaacacaaatctttctttcttggcacgcctttgtttaacagaatcacctgaaaaaatattcattaagaaagagatcagactctctttctaatggattctcctgattgaataatattttggttgagaaatcgatttttcgatttcaaaactcgcgatgtcaagcgggaggctttgcggcttcacgccgataaccttctgtcgcaaaatctcaagattgcaggttcttttaaacatcattgttcctttgtgtttatatttacgtgtgtctttacattttatggttttgtcttcttctctaaatgaattaagagcacaaacgctatatgcaaacgagaattatgcttactctatatgtttggtattttttttttactctaatcaccatttatattaagttatcgaaaagagagcggagagtcattcataaaccgatatacttacatgggagaaaatgctattatgagctttagctttcttcgctaaatagtctgctcgggttttaagactccaaagaagaaatctaatactaaaagatgaaaaaaacaaactaacgaacggaaggacatatgtttggcatttgtgtttgtattttacacacttattttatcaaaaagttaaactgaaaaaaaaattttatttttacagaacttaatgtgtttttgactcacatctacatttatgtttgcattaacatgttaaaatattattctttatgatgttgtgtttaggtcgcaagagggcttgctctaaaaaggcttatcaaaggaaaacacgattttagacgcacaacaacatcaaagaacaatgtcgaaaaaaagaaaaataaagagatcagacgcacagtttcacagatctcttcttctgttgcacaagcttcttctccaaagagtttcaattctacaaaacatgtttctactcccaccgcgaccgcgtctcctttgtcagtaaagaactcaaagacgaaagcgaatacacctagaaagaacactttggagggttcttcgccgaaatgctcagcaaatttcattttgatggttgagttaaggaaaaacatattcgcttttagagatatgattgatttaccttctcttgatggttctctatctgtcaccgaggtcagtagctaaagataaattataacacaaagatctaaaagagctaaagaccctaatgtcttgtttgctttcgagttgttatagattataacacaaacaatgaaggatctacaaaagctatctcctgagattgtaaccattaatcaatcttttgaaatggaaggagctgacatggataaggtacacataagagtttaaacagattttgagttacttgacaaacactccaacaaaaaagaataaaatagaaaaactcttgagtttgtttacttgatgagtcttgttaatctgattgatgaaccccagaaatgccccaaaaacagatgttaattttcttctacgaagatctcagagctattggggattcttggattatggatagtgactggatttatcgatctaagtacaaaaacagtggagttgggaagaataaatcagatcgtctaggtttgtttacttgaacacttttttgaaccctagaatgtgaaacagaactcttaatagactatttttgtttgtttgtttgtttcagtggagcatgtattagcagctcttgatggactaatcaaaacgacgagagaaagatttggtatgatggatcttgaatctgaaggaagaaagagttttacaacaccaaaaggtgtttcatcagaagcaagaagaagctttacaagatctgcttcttattcagaaagtaacaactctttttatccatctccattaacaccgagatcagtacttccagggacaatgatgatgtctagtaactctacatctccaagtctatggaacttaagagctcaagctttggataggttaagtcctgttgatttgaagcggtttgctatgcagatcttgtcacagagagattcagagagtgttagtgaaacaaagattggtatcgaagaagaaaatgaagagagtgagatattagcagaagaaaaagaagaagaagataatgatttctctgttttagaaacagagggaacagagcaagagattaaaacagaacatcatagggaaagttctggaacagagcatgagactgaagcaaaggatcatagcgaaggttttgaaacagagcatcatcgtattgaatgtttcgaaactgagcatgagattgatgcagatgatcatatcgaagattttgaaacagagcatcatcatattgaaggtttagaaacagagcatgagattgatgcaaatgatcatatcgaagattttgaaacagagcatcatcatattgaaggtttcgaaacagagcatgagaatgaaacagaggatcatagtgaaaccacgacttcagagactgattcaacagaatcttctccaaaagaagatgtgcctccacctccaccacttacatcaccgcaaacgccgtcaccaacggtctcaacgttcaacacaaaatctagtcttcgctcacaaccaccaccaccacctccatcaccggaacacaaagctccagctcctccaccgccgcctcctatgtcaaaagcatctgaaagtggagagttttgtcaattttcgaaaacgcattctacaaatggagacaatgctccgtcgatgccggcacctccagcaccaccgggtagcggaagatccttaaagaaagcaactagcaaattaagaagatcagcacaaatcgcaaatctctattgggctctcaaagggaagcttgaaggccgtggcgtagaagggaaaacaaaaaaagcaagtaaagggcaaaatagtgttgcagagaaatctcctgttaaagttgcaagatcaggaatggctgatgcacttgcagagatgacaaagaggtagatgacttgcgccacaagttaaacctatatgtcttgagtttgacactgtctttcatttgtgtcataggtcaagttatttccagcaaatcgaagaagatgttcagaaatacgctaaatcgatcgaagaactgaaatcctcaatacatagtttccagacaaaagacatgaaagagttgcttgaatttcatagcaaagtagaatctattcttgagaaactaactgatgaaactcaagtatgaattctcctagtgttttttgaatcgagtcgctattttcactctcgaaatatgaatctgtcgtttgattgtttaggttctcgcgaggtttgaaggtttccctgagaagaaactagaagtaataagaacagctggtgccttgtacaagaagttagatgggattctagttgagctcaagaactggaaaattgagcctccattaaacgatcttctcgacaagatagagcgttacttcaacaaatttaaaggcgagattgaaacggttgagcgaacaaaagacgaagacgctaaaatgtttaagagatacaacattaacattgatttcgaagttcttgttcaagtcaaagaaactatggttgatgtttcatcaaattgcatggagttagcactaaaggtaaaaatatatacacataaattacacaaattgattctcggcggtgaaagactgactcgttttgttttctaggagaggagagaagcgaacgaggaagcgaagaacggtgaagaaagcaagatgaaggaagagagagctaagaggctatggagggcttttcagtttgctttcaaagtttatacatttgcaggaggtcacgatgaacgagcagattgtttaacgagacaacttgcacatgagattcaaacagatcctgatcaatccgaatcatcgatcatgtcttgaaaaccagaaaaagcttcatcacatgttttactcactcaaatcaagaagaggttgatgcttgaagatgatttacaatacttacatttttgtgtctctagttttgattttggaccaatgcaaagagacagagaacattttttcatttcctatatatataattacatgacaaagaagcaatcaagcaaagagcttaagaaacgaaaaagtcaacgagaggctatcttagagaagacaagtttcaaaagaatccataaaagtcaacgacagactcttcttcaagaacattatcttccatgatcttgtcgctattatctctatgatcctctctctctgtatcttcttcgatcatatcaatgtcttcttcttcttcttcttcttcttctagaggttcttgagagaagaaggctattctttttacttccctttcatcttcagtcttaataatcgtatctgccgatatcaaatcattatgatctattaaagtcgaatttatcagacagagcacaactctaaaacttgagttgatgggttttgtaatagaacaacttacctatctttctctttcctaaagaagtttcttctttatcttcttcaaattgaaaaggattttgtacttgtgggatctcttctttgtttacttccatgagagaagagctagagagttcataggaaaacattatcatgttgtctttcgacatttcgagatgaacatatctctttacacaaaaatacaaaagcctagtggatatttccaataacgaactttggttatcaagtatatattatggaacatttgtttaaaggactttcaaattacttaaatatcccggtctaaagtataataccatgatcgtatatctattgactatttgtcaaagttatcactttttcggagttgttaaaagtaaaaaaccattcttgctttacaatgctttataatcacgtaagattccagtatgattctcttgcaataaacttgaatcaagaaatgacaaaatgattcgagaaacgcttaagaaaaaaaagagtgaaagacgtcaaaagatctctctccaaaagcaaacttttttttttttgtcatctgaaattaattagagctcaaatgagccattttctgagaaatgttgtttacataagtgatatgatgcggttggacacgcatttgcagtgtgaagagtctaagagcacgtaaaaatcgtctccacaagcaaactatgtgcataagagttgttaaaagcaagagtctcctaacaaatgcaaaagggtcaaatctgtacacgaccaaaacaactggtgcagtgtgaagcataccgtcatttttctaagctccctcatattaccatctctcaacaaatcaagaaccctgcaaatatgacaaaattatgtatttaatcgtaaggtcttgacaaataaaatcagtcaccaaagcaaatgaagatagatacataccttatatgtttataaacaagccaaaccaaggtcaaacaatcaactccaaaatgctaaccaccatgaggaaaaaccaggcttaacctggagcaatgccacaaaacggtggaggatgatattaaaccaggctaccataagctgcttcaagcaaaactttttttgctagagaaaaggatatcgcccaaccttctcagaccaactcatttcaaaaactttaagaaccctgcaaatatgatgaaatcagtcttattaatggatgtttagttaatagtaatcagtgtaacatataaagaagatcttattctgaaccatacccaatatttgcttcaagtggattttttgccagcgagaatgatagaaatctgtaaccctctgctaaaagcttcattgaacaaaatccgtgtttgcatattctgaaaaccgggcaaccatgaaagcaatgcaactggagccataactatcagcccaaagaaaaggtcgtaaaagcgagccacagagattactgtgtcccaaaccactgttgataacagaaacggtttcagtacttgagctatagaaatcaatccccagcctgtgggaacaaaagccaagagacttatcaacaaatcaactactgtaagtttagtgaactgcagcatcatcacgaccacaagaaccgtaaggagaattactaagaactgaatgaatcgatattttatatgctccttgacagaatatcttttctgagcatagattgttgtgatgtatatcgcaacaatcccgatgatgcatccccaagaaattaagtatacaccaatgctggttcgattctctgcaatgcgaagatggtacacaatactgtactggaaaaagaagaaccgaagatcaagtataatctcaagcagttttccccacactccggttgttttcagatgctcttgttcctcattccaccacgtaaaccaactctgatctgctttcgtaaacaacccgcctctagaccatagccatgcaatgaaatcatcaaaatcatttactgttttgagccaatcgaagccagaagggttaaacagaaatggagaaataatccaagatgtaataaggaaccagctcgaaatcgtcatcagtatgtaaacaaacgaactcttagccaacgggctataagccgcatataccaacagaataatcgcgagctcaatagctttaatgaaatgagttcgagcatacaatctgtagttctcagcaaatttcttatgctccaccacgaaccctcttccagtggcacgatacttggctccaccatggagtatagtccggccaaagtaatgggttcgagttcccatggagaaagtgtagaaaaacgatgcaagttgcagctgcattgttatgaagtcccaaaccgctggaagaaacccacgctcgagagaattttcaagaatcattggaagtgcagtgaaaagtcctagctgaataataaattgctgattcaagattgcaccaagagcttcattgctgctactcctatcctttgctattttctcaacaccactaagtgctagataaagccgaccccacaagaatgcataaacagtaaatactatcaacattgtgttgaaatagtagccaaccgttgtgtagaagaaagagagcattctaaagaagtccagcctgtgacctaacctgtaaacgtctctgctcaatgcttgctcaccgttaccactcgctaccttggcttcaaacatagagatctgattcaaacccacatcccttcctttgcctacctgaatgtattcatggtgtgtaacgttcccacctcttaaagtacaattgaatccagcaaatatatcctcactgatgtttataactcttgaggctttgctaattccaccccgaggcacaaaccaaaaccgatcaaatacatccggatgaccataatgcatcctcactttcagtgggttggcaagaacacgctgtcctaaggttacaaaacttgtttcctgagcggacataaaccatgcgagtgaagatactgaaccagtgaaaactttctcacggactccaagaatagtaggcttcctaatgccatagtaagtcttgaatgattccaacaagttcctcatcttaagagcctcctcaaaatggttatcttgattcatatcaatggtctgaatcgcatctcctcgtgtaaagattagagcatggttttggttttctggttttccctcaccaagcttcaaggggcctggcagtctgatacgatagatctccacctctctctgaagttgttgatcaaatttcacaagaactgaatagtactcgacctcaccccttcccaggtcaacctcatcaacatatgcaatacgaagggcgtcatgattcttcatcaggaacagaatctcctcagctctatggtcccctcttgctttatgttgcccataaacttggcatgccacaacatatgtgaatttcatcattgcactcccatactcagaccctttaagcaagtgggttataccactagccattctgctaatttcctgagaaggtgttggttgcagtgtgttatccccaccatcatttgtgtagtacgaacggcgtgcctcaggggcaatctgagttcccatcctgatgtccatttcagaagcagaatcaagaaaggcaagtttcttcaaggcactataataatacatcatccctcgcactgttctggacaatgtttgtcccctatatgaagcccagaggcgaagatctctaaccttctttgaccagatatcattctcattctctgctccctctctacgcatccgctccagaaaattcacccattcatcttcataaattctttgaaggtagaatagggtggaaattccatcctcattctcagctcggagcatttcttgtcgatacatcacttcttcgtcatagtaaggagtcaacacgctgaaagccatcatcttttctacactgggagcctggggcatagtcataaagagagagttgctaaagaaagcaagacgctctctggcctcaatattcttgggcacattatgcattggatctctagaagtaagaattgtatggacccgccgtatctgcctataaaagacaacatcatcaagaggagggagattaatggcattgacaaacagcaattcagtatctgcttccaaactaatgggcgccaagccaagctgccttaactgcggagtgctcctcctagtttttgggaattcccatgcacaaagttcatacagagcttgcagtatattcacgatcctgaatactttcttttctgggtccatcagacgctcaagaagtgatattagcttctcatgaatccggagtagtactgtcagcttatatacttcagttatcttttcgttttccacattttcatcaatctccataaacaacctgttcagtatggattcttcttctgtgccatttttaacaattttaagaatcacaaatttgatgctatcaaaagcttccataacagcacaacgcctgtactcactgctacagatttttgaccaaagccagtgatcaggagcgtcacagagctcgtttgcctgacttagcgcaagtaggagctcattgcaaaggaggaaacacggccaacggataacccgaatattccaacaattaggcggcaactcgagtagctcaacctccctatcactgataaggtcttcctccctaaatgtgaggattatctcattccaaatcagggcaaaccaagttgcttcaacctgactggattcgatcttgttgaaaggctgaccaattccatatcgcaatttcagccggtgaatagcatcacgagccttcttaagcattgttgctttagggctcagaagatgctcttcaggtttaagattaaactgcatagcacttgagaaaaactgaaatctaagtctcaactgatcaatgttccggatctcccccaagtgagaaaacagaccaattgttgcacctacaagggatgagtagatcgagtaccaaatttgcaaatccatcaggtaaaccaaaataacagggagccagagcatccctactgctatcctgtgagtgctaccaaaaaactcatgccaattgtacgtcgcatccttaaggttcagtagtgccctggtcggagcaattagaggcctaatttgtaagaagtaactaaatatgaatttagtggccaatacaataatccaaaagagtgtatacttaacattgtccactaaaccttccctcatcccacgaccaacaaaagtcttgctatagaaccaccatgtcagaaagtacacaactccaagattcaactcctcaacccagttccttatacaaggaacaataaagagtacaagagctaataactcaggtataacataaacgaacacaaccttgagaaacgtgacaaccctctcgtttgcagcccgagaccatacaccatccttatttttctggctccaaatccttgcatagaagaccgaaaacaaaactgtccatgccacagccaccacgaacttcaaagtcaatctgatgaaaagccaataagtttctctgctcaccaaactgtactgagtactagcatcgagcacagattggagcaacctcaatcccgcccaggagatgaaaacagtcaacaaagcaacctgcaagtagaagaacagaaaatgtctttatatccaactcaaaacacatattaccgtaattagatcaaacaaaggagaagcttttagacctctacatcacggtcttgccaaggaaacttaacatcactagtagcaacaataatagctgcctgcaagtacagaagcaataaaatccataaccgatcaaagctt

SEQ ID NO: 535 - DNA, 145453 bp, Arabidopsis thaliana
ggtgagagccgtctcagtgtgcttcctggtttgaaaacagctgttccttatgattatcttgacgtgatgtcctggtagtggttggcttcaggttcttaagatagcggaagaagagtttcagaaagaggatcagagttctgatgaagttgcttgagcttttggtcgaagcagacgtacttgagagttctcagcgaagcaagaagagttagattcttgggtatctgaaggctaaacaaagatttttttgtgttttcgtagttttgcctacatcaataagtgttgtgttcatttgttgttctgcaacggtttagatcctaatgttggaccatcacatataatgtaattaactaactatataaaaaatgttttattgaaaaatactattttttcattatatagaagattttaacaaatatcaaacattgttaaaaactataattttcataaaactgaaacgaaaagatatcatcaaaggaatgtcaagtagtagtaatagggtaaataaagaaaatgcactcaaaaagatacaagtccacttgcttgctcttcacgctaccaccattccatctgcctctattcgtttttcatgccttaacgccgagaagctatggcctcaagttgtaggttacatatagtgccaacaaggatacaaatcccagtgagaaccccgtttaacagccccgtagcacttcatcaatttcctttgtctctgtggatttcttatttttttttttgtctctagttgtagactttaaagttatctatgtctctttttttttaacaaattttatctaatataaattctaaaaaacataaatcaaaatccataaactgaaaacaataatccaaaaactataggaaaatttgcacacaataattcaaaatgcataaaccgaaaacaataatctaaaaaccattaaaacaattccaaacattcatcaaatactagaaaagccagccatacataagccatactaaaccgaaagccgctcatgcctcaatagtaatcctttggcagagtgtttgctaacttgatacatttgcaaatgtcataagacagattttctataagatatctcaagctcgcaggctcgtctatgtgagtcccttgatgtctgtctcggtgaaagcatcgactcccttcttcccaacttcaccgttgatccaaagaaaggaagcacgtaaggttggattgcacaaaacaggtttggaaaacatcttcatcctctttttggtggggagtttacttgttgcgaaaataacataaagtacatctcctatatatttacaattacttggagaattagttaacaataatttttggagaaatgaagatgaagttatatttgatgtatgtggtgatcaagattttgtttggtcaattgaagatttagtatatgacggatacacaatattgtcagtaattgacaatgagtcgacaaaaactattttaccaacatgtctattctacatggaattgcatcacatggccaaattttgcactagtgacactaatctgctattatattatattgaatattaattatccaagcaaagaatacaagattgatatcgaaaacattaattttataacaaattgtatcacttgaattattctaaaatcccataataaaatgttatagtgtggtagatttaaagtacaaacaattgtttcttgttatgtagttagaaactagattttagcctgaggtacaccatagaaccatatatatatatatatatttaaatgaaaaattaatttgtttagtagattaaaaatagattttttggtttgtattttctaaatgtacaactgttgagtgatgtctttttgttgttaaaaccaaacagaaggaattggggaaactaactagaaactacaactagaggtttggttaactaagtactttttagtatcttttgctttttccttaaatcatggagtaggaagcttgtctacaaaaggtgatgtcttgtagtaggtaaggtgtaggcgtgtgggtgtaacagagaatgtttgttgctttctctatgagtgtgtgtaagaagaaaaacagagctatgtgttcttgtaatgacgtttgaatgataacaagtttaaagaagaattttagctactcaatgttttcttttctcaaataaacatcaaatatctataaaaaaaaaacaagtcttatatatgtatattattaagtatacaattactatgtttgaattttatcatttaaaaatataggaacaataacatacatttcattaatttaaaatctagattatatctacatacatttcaacaataacatacatttcattgttttgttaattttgtgtttaagatgatataattgtattttgattgtcatatctaagatttcacccgttgtatactgtttcgtattaatatcgactcacacctgtcataccatctaatttgttcagtgaaattaaacattattttttatttttttttgttttaatgatactttattttaaaagatatataatttaaatccaaatgacttagaccatctccaatggttaagaaccaattgcatcttaaaaattattaaaattaaaattttggaacatgacacataactgtttttgtcactcataataaactcttagctaagaagcaaatcttagtttttaatctgttttgatttatttttgggtattatcactctgtatacatagaagattacaaaattaagtgtcagaaaaagctactgttgagccttttctctccatcatgaaaatactcttatacccctatatcatatttgctcttgacgttaaatatgttgttaccttttaataataatgttatcatctttccataattataaaatctttgaaatcaaatcgttggttcaatagctggtaatttgtttatatcgtcaactatattattaacaggttaaataggtttgtaccctaagttttttcatccatatatcaaaacctcatccatattttgctaacaatattatcctgataatacgttatctgctaactattttgatgcatgtattttttctacatgattattcagtcgcaagtcaacttttttgctcttcatgctaaatattttgttactttttaataataatgttatcgtcttcgcatatatatatatatgtctttgaaatctaaacattggttcaatacatgaaaatttgtttatatcgtcaaatatattattaacatattaagttggtttgtactccatgtcatttcatccattcatcaaactccatccatattttactaacgatattatctcgataatgcgttatctgctaactatcctgatttttatcatatctctttatagggatatatttgttatatagattttagttgaaaaaattaccaaaataaatggtcttcatgtatagattcttaattatttgatggtgcatgtatagatttttaactcaccctttattttttaaaatttaattctaagatattagtctaagatagacctaagatgcatcatttgaggtgttcttagattcttggttatttgtagactacacaataatattttgagttatcgtagttgtgcctatttcgataagtctcttgttcgattgttgttctgaaatggtttagatcacgatgttgaaactttgattatgttggtgtctcttttaaaaactgtttgtgtctttatatttgtcttttcttctgcaaataattgtgttgagaggtaaatttgttcttactttcggattggttggtttctcattatcaattttatggtgatcgtacatgaatgtagcattattattagggtcaaaccggtacgatccggttcgggtttagacagtcaaattatataacaaaccaaactgaaaaaaaagcacaaagaagagaaataaggtttaagatctacaaatgatgaagaacatttgagattctgactttttacgatccaaatttttaaaatttatgggttctgataaaaaatatttcaatggcaaaacatggtatggaaagatagattttgaaatgatatggaaaaacaaaaaacaagtgaagttggtgattttgttgttctatcctgaaaaagtctatccatctcttgttctcatcctttctgaggaagtcaaattaaaaactgtatgaaggaagcgaaaccgtatggagcggtagtgctttgggatgtcatgcatatagaattttatagagagagagagttaaagatacttcattcttgcctaatagacggacgtgtgtgtgtctctctctttgtcttagtttagctttttgaccagatttaacatttttgtggtcacaaagctcttgttgagaaaaatattatatcaagataacgaagtaacccaactcgtcgaagttcatactgtaattaccggcccaggcccataatattattgtaaaaagtaaaaacattggggttttcagttcaatatacttttgcctgcactcaatctcatagaaacataatactacgaggaccaaattgtaaattagagaaggaagccgaaaggtcagtggaaaagtactacttgtctttgtttaacttccacagaattgacatcattttatgattttcagacatggttacttcctcgtcttcgccgccgttggctacttcccagcttccggtgatgaaaggcgaagaaaagccttcaaactgggcggagctacccccggatttgctgtcttcaattctactccgtcttagcccattggagatacttgaaaacgctcggaaagtatgcagatcgtggcgacgcgtctctaaagacccattgatttggcgtagaatcgacatgagaaacctgagaagattgtactgtatttacgctatggaagcctgttgtcgtcacgtcgttgatctcagccagggaggcttgcttgagttcaacattgatcagtggcgctttcagaccacttctctactcaactacatggccgagaggttctttataaacccttaaactcacgagcatccaaattttattatatgaaatataatgaaataaccataataacgtttcttttccattgtgaggaatgattagggcaaaaactcacgaccatcttaatgattagggcaactttgcatagcttagaattgttttcacgaatttttgcagctacttggtctcttatacttatgagttgataagtactaggagatactttatttttgttcttataaacaatagatcatgttgtaactcattattgcaactctttgcagatcaagtaatctgagacgtcttagggttaaaggtggtcaaataacgagtgttggaatttttgaagcaatcgtgaaactgccattgcttgaagaactcgagcttttgtactgctcaatcgaagaagagcatttcaaaactataggccaggcttgtccaaatctgaagacattgaaactagtggggttttggagtcatctaaatgagagtgacaatgatgctctagcaattgctgacaccatgcctggtcttctccacctccagcttattagtaacggactaaccaacattggcttgaatgccattctcgacggttgtcctcacctggaatgccttgatttacgccagtgtttcaacattaacctttttggggatttggagagacaatgtttggagaggatcaaagattttagatgccccaatgatgtacttgatgattacaattatgtcattttctccgataatggttcgatagaagacgaaaaaggcgaagaagaggaaaattactcatatggtagcgatgacactgagtacggctacagaaggtcagctgacttctaagatcattcagacctgtattatgactactaaggagacatgttgaattgacactatcaatggtgagtggtaatgaactcgttatttcctctttctttcagtaagtccctagttacagtggacgtgtgagtccacttttacttttgagcttgtaatttccatcacatggtaagaacatagtcccaagctttttatcggcctagagccataatattattctcaaaacaatgggcttaccatactttagactgatttgattttcataaatacattatactattgagtaccaaatcgtaaattagagacacacaatgggaaaagcttgatagagcttcacttcgtcaaaaaaatgtacttcacttcttaattatttcactgaatggcttcttcctcctcttgtccgtcgtcttcttccgtgcctccgctgatgaaacgtttggaagtcatgcatgttgcagtaactagttttatttcacattgtcactctagctcatgtctcatgagtcatcacacttactttgtgttaatgagaaaagtagaaggttattagcagaagaagaacatccgctcataaaactcttatgtctcatacatgtactagttaatgaacccaatttaaacaatacatattgttcataacatacgcttctaatttggtcagtactatgaagaaaattattctgcttaattagtttatgatttacctaattatttgtctaattaagtaatctaattaagaagccttggacttccaatgtgctggcgaatggtgcctaatggacttgtgaaagcagtcgcaaaacttccatttcgtggatataagagcatcattattggtggtattttagccaaattcttatgctaagatttgtgaagaaagagctcttatataagaatttttaggcttatataattttacttttttcacaaatcttagcctaaaatttggttaagataccaccaataatggtggtgtaactgaacttcaaagttatataagacatttttgtccacggctaaattaaagacattgaagctaaactgcgttgttgtaataactcagcatatatcttaccaaaaaaaaataacacaatatatattttgcatatcattcattcaactttaactaattgttcatctttttttttttttgagatagatcatctataacttaccacatttatccattacagatcatccatataaaatgagattaatcattttatcaaatttaacatatatagtataaaatttatatccgacccgcttctattagattcaaaaaattcaggtattcataattttataaggcaaatcaattatcaaaaattaatattcattataaaaaaacaaatgacaaataacaaaattttaagatggcttatatatcatagacttgcttaaagccttagtagtgtttgagtaattaaatgttttcgaatctcatgccttaataatgttttagatatatgaaggctaatttccatgctatcccgctgttatgaatctattaatagtcctttgttctcacattgttctagtcttgttttgtttcacacagttactactctcatcgtacttaattaactacttatcctttatcatggttaaagataacaagtagttatataataagaatatcgttagcttatatatcatacacttgtttaaagcatcaatacagttattctttgctcttcatatttttatgcttctgagttgattagtactatgagaattgctaattatggtatttttttgtgctaacatatcgttgttattcttctttttagtttatggtttaactcttcacataattatttgcagatcaagaaatctgaaaagtcttggactttcaacctatgaaccaaggacgacgtacaaaggaaaacttccattgcttgaaaccctcgagttcttcaactcatcgtttagactggatttgaaaactatctaggccacgctttcccactgaacacacatggttgcttttgatggtcttgtcaacttatgaactcgttcatgtttcctcttctctctatgatgacagtgactattattcgtattaaatactgaattttctcaacattgacgagaaaacatgtggtttttgttggtcttgtcaacttatgaacccagttcatgtttcctcttttctctatgttggtagtttcaaagtccttatttccttctgattttttaagaactctacccagcttcttattaactaaaccctcctcccgcttgttactccacgtgagtagcagaccatgagtcctcatatccagtactaaagaacaatacggcaccacttcttgaaaatctcgcatgctcgaagtaaccataattgaagaatcataatctgaatgttcttccaagtgaagcgtctcattggcatctcctaatttgagtgatcaggactatcaactatgaaagaaaattcttttgaagttattttgaatttgttagcgcgtattgaaatcatgatgcaatattaacacctatttttgcatattattcattaaactttaactatttattcatctaactaaatatatttatcatttattcactatttaatttatcaaattgaaagtatgccaaaaaatataactgataatatataaaatattaaccaaacttttttaagtttttaaatttgttaaataagttttaatttgttcttgctagattactctgtaaacttttatttggtataaaatcttagcattaaatcaaaagaaaagaaacaaacggaatgatacgttacacttaaatagaaacgagtcaaaaaaaaaaaaaaaaaaaaaacgagtctaagaatgttcgtgacgatatcagtgatgtggtggcaaaagtatgtgtggctggacttgcttgagtcttcaggattattgagacctaatcagacgtggcatgaatcgaaccgtatactacgacgaccagattttcaattagagacagaagcccaaatgtccgaaactacgtacacttcacttattattcactaatttgacctaatcttatcctcacaaatgagaacctcgttgctgatgatgaaagaaaacgaagagcgaagaaacaagaaaatggcaacctccactacgttgcagtcgttgctgatgaaagaagatgaagagcaaagaaacaagagaaggacaacctccactatgtttctgaagaaagacgatgaagagcgaatcaactgggtggatcttccgccggagttgacgacttcgatcctgctccgacttagcgtgactgatatactggataacgctcggaaactgtgcagagcgtggcgacgtatctgtaaagacccttccatgtggcggaaaatcaacttgcgagactgcctcatgtacgagttcgatttcgagagcatgtgccgtcacattgttgatctcagccaaggtggcttgctagagattaacattgaacacttcgtgagcgattctctcctcagttacatcgtcgataggttctctctctctcttagttaaactaagttattatgtcttttttcttttaccagacctcaggatctgctaagaatgaactttagatattcattgattgaaagtttagtttcatgtactactacgtttgcggttggatatgcacagatatgatggctaatttttcatgccttaaatagagttttagagttaatgttttcgattcttttcatgccttaatagtgttttagagtaaatgccttattagtgttttagatatcaaggctaattttcatcctatgacgctgttataaatttataatagtcctttgttctcacaatattgttctagtcttgtttcgtttcacaattcacaacgttattactctatcatcatatacaactttacttgtaattgttgaaaaaccccagtagttaggttattagcatatataagaatgtcattggcttataaaactcatatgatagctttgattcaagcatatcattacagtttgattttttaagccatggactttggatattcatttacttttggtcatttacacgagaatatgtgcatagatatgattagatatgcatatatatgaagactaattttcatgccttgatagtgttttagagtaaatgttttcaaattttcttttcaaagtaattgttgctagctataacgctgttatatatttataatggtcctttgttctcacattgttctagtcttgttttgtttgacactattactctcatcatacttaattaattacatatactttgtcatggttaaagaaaacaagtagttaggttattggcatatataagaatatcattatcttatagaactctcgtcatagacttgcttaaagcatacagtttgattttttttaagccatatgtactcaaaggcattggtctgtgacatgttatgctttgttcttcatattttacatgcttctgagttgattagtagttagtactataagaatttataattgtgtttgttcgttgttttcaataacagattgttgttactcttcttaatgatttaactcttcacgtaattatttgcagatcatgtaatctgaaaagtcttggaatttcaatctatgaaccaatgacgaacaaaggagtaatgaacggaatcgagaaacttccactgcttgaaactctcgtgatcttccactcctcgattaaactggatttaaaagcaataggccatgcatgcccacaactaaagacattgaagctaaactccttaggctcagagctggcccatgacataagccaggtaggctacattccccttctcgaatgtgatgatgatgctctagcaatcgctgaaagcatgcccaaactacgccacctccagcttatgggtaacggactaaccaacactggcttgaatgccattcttgacggttgtcctcacctggaagaacaccttgatgtacgcaagtgtttcaacattaaccttgtcgggaatcttgaaaagcgatgtatgaagaggatcaaagagttgagacggccccatgactcaactgcggattacccgtatagtatcagtgtgtcaatggtggttcagatgatgattacatctcgatatcattgaacacatcgttgcttttgatggtcttgtcaacttatgaactcgttcatgtctcctcttttctctatgatgccagtgactattattggtattagatattgaaattttctgaacaatgcagagagcatgtggtttctgttggttgtgtcaacttatgaactccttcgtatctcctctttttttctctatgttgttggtagtacaaagtccttatttccttctaaacttattaagctttgaacgcgtgattttaagctattaacagattcgggcaagcctctccggattttgctatgaaccttgaggacaaagttacgtttggacggcaggagagtgaagaagacaccattgcgagcatgtgaaaatgtaaaaaaataaaaatagagaagctaaagtaagaaggtgaaaggtttcacaagaagaagtatttaagtggagtcacgtgacttctatttctcttcaattgttgctgagtcaattatacgtaatacgtggcatgaatcttaccgtatactacaacgaccaaattttcaatgagagacgcaagctcaaatgtccgaaactatacacttcacttcttattcactaatttgacctaatcttatcctcaaaaatgacagcctcctcgaaaatgacatcctccactacgttgctgtcgttgttcatgaaagaagatgaagaaggaagaaacaagaaaacgacaacctccactacgttggagtcgttgctgatgaaagagcgaagaaactgggtggatcttccgccggagctgacgacttcgatcctgctgcgtcttagcctgactgatatactggacaacgctcagaaggtgtgtaaagagtggcgacgcatttgtaaagacccttcgatgtggcggaaaatcaacacgcgagactgcctcatgtacaactttgatttcgtgagcatgtgccgtcacattgttgatctcagccagggtggcttgctagagatcaacgttgatgaacacttcttgagcgattctctcctcagctacattaccgataggttctctctctcccttcgcaagcacgctagcaacctttgaacggtttttcatggaaatctccaaatgctatttagagaattatgtggcttttatttgatttcactgtctgtgaattagacacaaatggtcctagtacatatattttgacagaaaagaaatctctaaaatgtgtttgttcatttttctcctgaggattagctagggcaaaaatttgataacttataatcgttgatttcgttcggtttattatgtgttaattaaactcagtttatcatgtttttttccttttaccggatctggcggtctgctatgaatggactttggatattcttttactacgtttgggttagatataaacagatatatatgaaggataattttcatgcttttatagtgtttttagatagtagttgttttagattttcatgccttaatagtgttttagatatgaggctaatttctatgctatgacgctgctatatataaatttataatagtcctttgttcttacactattctagtcttgttttgtttcacaccgttattactctatcatcatcatcatatatatattttacttgtcatggttatagaaaacaagtaattaggttattagcatatataagaatatcattaccttataaaactcttatgatagatcctatcttaaagcatcattacactttgatcttttaagccaaggaatttggatatatatgtatacatttacttttactcgagaatgtatgcatagatatgattagatatgcatactattttaaagcatcagttttattttgaagtcaccgttgatatgatgatgttataatatagtccttattcgatcgggtcttgttttgtttcacatagttactgttatatcatacataattacttgtcctttgtcatggtaataatgaaaaaagtagttaggttattataattataaaaagattagaagattatcaacttatagaattcttatcatagacttgcttaaagcatctttagagtttgatcttttaggtcccaattgaaacaaatggtttgttaattacatgcttctaagttgattagtactatgagaatttctaatattattattattgttttttttaagaacatattgctcttcttcttcttatagtttatgatttaactcatatatttgcagatcaaggaatctgagaagtcttggacttggaatgtgctttccaagggtgacgaaactaggagttgtgaacgcaattgcaaaaattccattgcttgaaaccctcgaggtcactcactcatgtataaaactggatttaaaagctataggccacgcttgcccacagctaaagacattgaagctaaactccttaggccgcctatggccagccagtgacaagtatgacagcaacgtgttagacgatatggggcctctcgaatgtgatgatgatgctttagcaattgctgaaagcatgcccaaactacaccacctccagcttatggctaacagactaaccaacacaggcttgaatgccattctcgacggttgtcctcacctggaacaccttgatgtacgcaagtgtttcaggattagccttgtcgggaatcttgagaagcgatgtttggagatgatcaaagagttgagacgccccggtgactcaaccgcagattacccatataatggtgtgtgagttgtgcttcagctgatgaagacatgtggatactctgagaaaaacagggttgggtttaatcgtcttatcaacttttgaactcgttccatgtgatcatgtctcctcttttctctatgatgccaatgactattattggtattagatattgaatcttcctgaactagtcctgcacattcatttatccattcggttacggttatatccattcggttatcggtttttcggttctaaaatttagtatctattcggttattttgaaagtttggttcggttttggttctttcggttttaaaatttaatatccattttgttattttgctttgaatattttcggatatttcggttatttttgaatatttttagatatttttggatattttcggttatttttcaaatacgtttaccattttgtatatattttcaactatttttagttatttagtatagaaataactaatatttttaaaaatatatttatattccggatattttcggttacccaacatatttcggttacccaaaatatttcggttattatccattcggtttcggttctttcggttatagaatttagtttcccttcggttatttttcaattttcggttcgatttggtttggtttcggtttggtacattcggttcggtttattagccgaggcctatcctaaacaatggagagaacatttgttttttgttgctcttgccaacttttgctgtgggtacaatataattataggccaaggcccaatattaaactaggcttggcccaaactggtttcgtagatatgtgataccataaggatctaattgtaaaattagagactgatgataattcttgacaattcgatacttagaaatggcttcttcgtcttcacccccggcggcgatggaggtcggagaatctacaaactggacggagcttccaccggaactgacttcagcaatcctgcaccgtcttggcgcgattgagatacttgaaaacgctcagaaagtttgcagatcttggcgtcgtgtttgtaaagacccatcgatgtggcgtaaaattgacatgcataacctcggagatttggacgacatggattacaacctcgagatcatgtgccgtcacgctgttgatcgtagccagggaggcttggttgatatcggtatttggtactttggtactgttgatctcctcaattacatcgcccataggttctctcttttcccactcaaaatttcgccaatttttatttccgtcaaaaggagtttttgattccttgtttagagaacttggattgatttgatttcaatatgtttgttctagggttagaacagtttttggttgtggaagttactatttcttgtgagaattggggaaattatttgtagcttatgattgtgttgtgttacattgtatctaaattctatgttggagtagtaagtagtcacttgattataagattgttatgcttctgaggtatgaatagttaggttcaggtttttatgggatgctagaaaaaagatgttttggatctttgtcattcttcttctctatcttagatgttgtttttaactttgttacacacaattatttgcaggtcgagtaatctgagaagccttagacttataaggtgttctcaaattacagacgatggatttgtcgaagcagttgtgaaacttccacttgaagaactcgagttgtcatactgctcattttcagtagagtctctcagagttgtaggccagtgttgtttaaatatgaagactttgaagctgaacaagcatcctcaaaaggagaatgacgatgatgctctagcaatcgctgaaacaatgccgaaacttcgccatctccagctttgtgggaacgggttgtcagacaccggtttaaacgctattcttgacaattgctcaaacctggaacatcttgatttacgccggtgtttcaatgttaaccttgttggggatttgcagaagcggtgttttgagagtgtcaaagttgtgagacaccctaatgactcgattcatgatatcgacattggttcatcagaagacgaagacccttatgacttctctgatatcgatctgatgtcaggtgatgatgattttgagggttactatgacttctcaggtgctagtgacttttctgactatgaccagtttgatttctagatgcatcggtttcgtgcaggtgaatttttttcgaacttgttcatgacttgttttaagttagctcatagtttcaatggattttatgtgtccttgaagtatgttaccgtttgtaatgatgtcttttgctgtttgtctttcaacaatttctaagctcagaaaagtttcaaagatggtgattgtttcatcttgcttttgacgaaagaaattgagtttattctccaaaaaatttgcttaacgcttgttgttctgttagaaactcagacaacaacgagaaatgccaatatcaaaactaagataagtaataaaaaaaatcatcaagtcctccaatagaaacataatcatctctttgatcatttcatgcctcaggtctaagaactgtttcctctcggtaagcaatcatcaaaactccaatagaaacatgaatcagctctttgatcattaatgcctcaagtcgaagaatctctgcggaaactaatgaggttttggaacaaacccgtcaaccgcgaaattccttgttgctgaaggaatagccaagcgcacaccatctagctctggtcttgcaatgacttggcatccgagtcgtgacctgaaacatttgtccgggaacatatgatactttctcattaaagtaaacaattagacttcttgttttgtgtttgctttaagagtaagagaggactttacgtttctgtgagcccaaaagcaagatcaagcatatcattctcttcatctgttggttcttcaagtttgttatagtattcagtatcctgtaaatacaatcttagctagtttccggaaaagcagaggattcgatctattaataatggaagaatatgtttaccatcacaatcacatgacacgttgaacacgctagagaagcctcacaagcccctggagatcaagtaaaagcaatccatgaattttcaattcgaaaaaggatcaatataattaatagaacccatctaaagctatgagagtaagcaattgaaaacgagaagaaaatggaagagaagtgtgcaccttcaaggtctatatcattttcatgagcagcttcgagcactgacattccaattggtactttaacaggaatttcctctccgtccttatcaacaaagattatggttatcctgaaaacaacagaattatgataaactatcagcaaatattgcttcagcgctggatgaatatttcggtagtaacttacttctcagtttcttcatcaccattctcagaggaagttgttgaagaagtacaaaacttatggctcttcaaaaaccaggcttcctgagaagtcctagcttgccttggtaccactggctatcgaaaagatgaaacgagaaagattcaaccatcaatgtggaaacaaaacagaatctatgagtgacaaaaccaagattttctgttcattcatccattatagaccacccaatttctcaccttaagccttttcttaggcctttgagccaaaaccaaatataggactctttccaactggacacattagaatcgtcactaacagatccatctaacaccaaacaagcgcagaaaagctacatttcgttcttctgcgatcactttatgacattactaacgagattctacctagccagataatagagtgaactctaacaaagaatcctattctaagtattaatgagagtttatacatgaagaagtaacaaaattatcgattgtaagagagtataaaactcgagaacaagctcagactaaccaaagactgcaagtagtggccataagaccggtgtagattctttgtcccgtatgttgctaaatatccctctgccaaaacaagaaatagaaagagcagcaaaatattaaggcagcattgtgtaggcagacaatgttttagcaaaacccatgaatgagggactaaaatacgcatacgcagttcgaaatcgaagtgagattagaaactccatcaaaaccaatatagcaaacgcatcaaagagcatcgatttaaagcagataccagatagtacctcttgcgagctgtttaacaatagtagaccccaatcttgagatcctatgaccgatcatcgttcactgccgctaaagcacctagctgaaacctcgaaagaattgaaatttaacctaatttgagtgtggaccgaaaacaaggcaaacccagaatttaaccaaagctaaaaagaaacctttactcaccaatctacctgtcttgagaattgagattaacgatgccaaaaagatccaaacttgggcaagaaatgattttttttttgaaagaattaaacgcagtttatcatagagaataatcgagggatgaaaagttattcactttacgaagatcataaactaagacgactgtaatcgtatggtcgatgatgaagaataaggttaaaagagacggctttgtgtaaagacaacctcagaatctcatatgttcttcatgttttgaagatcttaaacctttttttgttttctcttccctgtttttcttataaaacatttggtttgttatatttcgaatttcgacattgtcttaaaccgaaccggattgtaccggtctgacccaaacaactaatccaacatccatgtacaaatttggtaatgagaaaccaatcaggaacaatttgccactcaacacaattctttgcagaagaataacaagacaaatacaaaagcagtctagaagagaaaatcttataagaaaaagacaccatcaaagttccaacatcgtgattaaaccgtttcagaacaacaatggaacacgacacttattggtaggcacacaactatgatagttcaaaaaattattgtctagtcttccaataaccaagaatctaagtcttcaagcaacttcatcagaactctgatcgtctttctgaaactcctcttccactatcttaagaacctgagcccaaccactaccagcactcacgtcaagataatcataaggaacagctgttttcaaaccaggaagcacactgagacggctctcaacaatcctcaattccaattcatcacattctccatgaatcttctcaagttcttcccatgtatacatcaatggcaaagtagaaccacaccaagtattgaaatctattagcttaactcttctctctttcgtcacataaacatcaaaagtgtaattctctgattcaaattcaaacctaatcttatcatcaaagaactcttctatcaaacccttgagcaaatccttctcattgagaagaacagggtaaaatgtagttacctcacgctgacaaatcccaacaagctcgttagatttcacaaagcatctaaattccatctcaggcttcaacgaagggtaccattttctcaacgcaaggtagaaactttctggccttgaagagactttgtcactacatgaatcataagcattgaagagatcatgggttaacgaatcagaggaacgaaacaagagagcaatctcattgaaacaagtgcagcttagattctgtgatggactaatccaagctgcgtcttttggtgaactccaattcagcttcgggataattgtgccgcctagggtttcgattgattctctgatctcgatttcgagttctggaaaagaaggacgattcaatggttcgtcatctgaagcttcttcggggacttggaaatcatcttcttcttcgaaattgtggactctgttaggcattgcgtcttcgtttgttacggaatgagggagaagaaacggaccagaatcgtcgatgagatagttgatgaatgattctggaagtttgtgaaatttggttttgatggttaaggatttgaatctcggataccaattctgaatctggcatcgatttacttcgtcttccttcatcgcgattaacgaattcgttgtagatgacacaaaatttcttcctccggcgttgatggaggttttaggtttttttttttgcttggagacgatgatctctggccgtgagggttttatttttgctagagaaatctttctttatgggccgtgtaaattaggcctcaaaagcccatattatactacgtggaacattagttattgagagtgagatttttctacaagtgagtgaataagtctttgatgctgtaacaaattatgatattttagctttggaaataaataaataaatttatagtgagaacttaaaataaaagaaagaatggaatttttactatgaatcatgtcatagtagaacagaggatttaaattataagttttgttaacggttaattctaggaagagtgtgtttaaaggttcaaaaattaatttctaactacatgataagaaaaaaatttgttggtactttaaacctaccacactataacattttattatgggattttagaataattcaagtgatacaatctgttctaataaaattattgttttcgatatcaatcttgtattcttgacttggataattaatattcaataaaatataatagcagattagtgccactagtgcaaaatttggccatgtaatgcaattccatgtagaatagacatattggtaaatagtttttgtcactctttgccaattactaacaatattttgtatccgtcatttactaaatcttcaattaaccaaacaaaatcttgattacaacatacatctaatataattgcatttttattttcccaagcatagtcgttgactgattttccaagcaggactgtatccaagtaactgtagatatataatagataaatcttatgttgttttcgcaaaaagcaaactccccaccaaaaagaaaagagatacattttgataagaattcaaatagttccatctaaaccattttaaatacatgttgcagcttcttgagatcgatggttaaagaggtttgtcctttctttcgtataaagcaagaggtgagcatcctcttatgttacttgtagctgcataattgtatgcgagagatattcatcctcatatctggatacttgaatatagattgagcataaaaatcaacaataaaaaagtgttaatgaatacaacatttaaattatacatgtaacccacctatattcgtattgtatgaggagtagtaaggtagcattgtttactttagtacaagaattgtaaatgaaaaagctatattgtttacaaattaacatgatatccttgtatattgatggaaattttgtgatagttgagatcattaatcttagattcaaaattttgaatgttgttgcaaatgaattcatctaaatttcattagattgcatcacataaacaaattttgttattggtttatgtcgaactaaaaatatccaaatcaagactacaagattggtatcaaacacattaatttttatatctaatcaaattcaggcccggctcactcatcggcaagacccggtgccatacaaaaaaaatcctatctttaataggaaattagataaaagaataaaaaaagttatatttcataaactattttgtattttatagctatttggacctcaatattaccctttaaaatagattttgggacctttacatgtagatattttataaaattttagcataattaaatagttaaataatggaaaactataaatttggatattaaatttgttgggcccagtacaaatgcaccagttgcacatgcatataacagccctgatcaaattgtatcacttgtgtcattttaaacttccataagaaaatttaataatgtggtaagttctaagacaaatatttctataaatgaaatatgaatttctatttattatatataaacatatgaacgatacttgggttcacccctagtggtgaacccttttattcaccttctattttcttacccaattagaatgtgccacataattaagaaaaatatatttaattataaaatcaaatctaatcatttgtttataaataaaaaacaatcatttaataacaaatctaaacattacctcttttttttaacctaaactgatatttaattttgtttaattataaaaaaaaatctaaacccagattctcttttataaactcaaaccgtcatataaagttgtttaattgtaaaagaaatctaaaccctaattctattttacaaaacccaaaccgtcatataaattctatttaattgtaaaatctaaaccctaaccgctcttttataaactcaaactgtcatataaactcgtttaattgtaaaagaaatctaaaccctaattctattttaaaaacacaaaccgtcataaagatttttttaattgtaaaatctaaaccctaatttatatttataaacccaaatatatatataactttgtttaattataaagtataaatactacatttaattaaaaatttacaggttttgatttccttaattataatatgacataacataatgataggtttagaataaagggggtgaatacaagggtaacccaagtatttttctaaacatatacacactattctaaaaagtacatgtctacactgtagataccaaaaccatgcatgcgggcgtctcgattttggctaaatcaatcaacgaataagtcaatgataaaattatttttgtaagaatgttttgatcacattgctataccgaaattgataaagtactactaagatatattttaacatgaaaatgaaagagatagttgttgtcagacgtaaggaaggctcaaaaagcttttagattctaaacccatgaacaaaggtaagaacaaaaacaaagcttaactgctacaatagccaaaaagtttgaaaattttgctctatgaaaaagattccaccacaattgatatgcaaatatctaattttctggtgcaaagatgttagtctcgccgactaataagagaaaaaactcctatgtacatcagcagcaaccaccgagctttgtactctgataaagatcttgcggtggagacttccgatctgaatgaaggaagaatcactataaaattatactttttgaacgaaaatgttttgaactactataaggattagtgaaaaaatataggatgaaatttagggctcttacttggatgcatcataggagcattttccgtagcctgcaagcaacaacatcacaaaaattcacacttaatattaccatgaaaaataaaataaaataactttaaaaattgattatgtaattagtaggaaaaatgtttcaaagtataatacaataatagttcgagtaagaaatcgattatctcttacgaaatactatccgaatagaaataattgcatatgtaagttaacctttttacttactagggttaatcttggtgaatgtagctgttccaccgaagtaacaagcaatgcgattgttcccattggtttggtaatatgcattaaacgcaaaagatgcatgcgatacgatcgtgtccggttcgtaacaatcaccatgtctctcaatgactgagcaatctaccctcccaatcccacatgcccaatcaagagctctttgtagctcagcttgtgtcgcacctggtctagccacgcaccatgttgttccctccaagaacgtcgtgttcccttgtggccctactagtgactctggtctgatcgtcatcactggccttgcagctacacattgaatatatatcgaaccaaacgaaacaaaacaaagattataatttgaaaaaacagagagaatgattatttatatttttcaatagttagagaagaagaatacgatgatttaccttgagagaagaagtttagtagaagcaaaaaaagtagaaatatccaaaattgtgttctcattttttgatgattgaatatagaaaacttgtacttaaatgggagaaagaatctagaccatcacataaccataagaacaagccttacaaaacggtgcaccgatctttaaatttgatgaccaattgatagagaggcttgagcaagagatgtaatgtgtgtttacttgttacaatgaccataattaaatgagaaaagaagaatctagatttcttaaggaatcaaaggtgccttcaagagatgtaaaatgttcatgctatcttttttttcttgtcttaccttaaagaacataatcgcatgagatctatttaaagaaagtttaatataggaatattactttccaatctattaaccgatttgtttttttgatttttttggtgtaacacatacgtaaaagttgagaaagagacgtttacaagcaaagaatcatcagcaaaacgagtaaatagaacagttaaaacataataagtttcgtttaacaaaaccatatttgataatatgtagaaaaaaaactaaaataaaaacatgtatataggtttggatcaagtcaagggacccagaagacagtccggtttgcttgccggttcgatttagaagacaatagtttaaccaacacaagctattaatattacaagacacaaaacccaaaagaagacttttaactcaagaaagcttaaaaagaaataaaataaaacaaagcctattggcgttgattgatgattgatttgactcagtgaagcctagtgagttcttcaactctcttacacaactcctccacttgaacattcatggatttcgatatatcctccatcttgtttctactcagatccagaaacgattcgattaagtcaccatccaagaaattcctcgcttccgcggttcttttctcgttattaaacgacctccattgctcgtggcttaatccgccgactcctttaatcacttttctcaaacttgactgcaacttctccaagaaagtatattgttcttgaggaagtgaagctattactccaatcactccattgactgtaccaaagatgacagttgggatctgaccaatctctgaatcaggtagcctcattactagagatccatggcggaatctgttcacaaattccccaaggtgatactctccaactacctctaaccgtcctcgttcttcatcagtagcaccttcactgttctttttcactgttaacagattgaaattgttctcagcaccgaggtaaatatcatcatcgagtatctcaaccgctgacatccaatttgcattgtaatcccgagcccgctcctcaattgcaccttcctcgtgcttttacattcaagaataagccatcagaaacaataccaaatgaacatagtagatcagtttttaaacacacaaatttcgtctagaagttataccttgtatagcaataaggagattgatttcatgagatcaccaacaactataaagtctccacgggtctgcacatagagagctagaatgtgtccgtgatgtccgcattcagactgcagttcacgagtgccatcatccctcagcatccacttgtacaactgaatcttctgattaatagcagcaagaagttttccattaaaggcattgagagaataaacagctcctttggtttctttctcggcgattagctgcaacctcccatcttcgactataaatactaatatccttccctaaatcacaaaataaaaataagtatttcaaagacaaattagaaaagaatatttgaactgagagtgttgatatgttctcagagaaaacagataccttagttggttcattttcctccggtaaaacatatgcggttccaacgcagtaatagacatttttatcttcggtgaatgagcagctcagaattgaacaaccatattcaaaggaatccaaggggtaagttgacataaactcgaaagtctggtcgtccaaaagacggacaaagtgcatttcagattcttcggaatttgactggtttcccaaactgcagataccaaatgtacgtgtctgctcctgatggcaaattcgacgagcatgctctccaagaggaatagtacgtatgtgaagcttctgaatatcatcaatggttccaatcgtaagttcaccttccctggcaattgctaaactgctcataagatagaacagagaatcagatttcagagccacttagcttcatataggaattagaaattcaaagcaaaaaccgacaagaaaaagagaggatgtttagtgtacctgtcgggaaaagcagcagaattgaaagggcacatatgactaacttctttaagattgacattgctatataacagcttcttgttgctgctatagatcacggttggtctatctgatgcagcaaagacatgtgtggcgctttttgatgaaaatgtacgcagagttataggctgagtcccgagtgatacttttttcctgtcttttaattgtccggtagttgtatccatctggaagttcaaaagatggccatctccaagagcacatagcaagtaagatatctgcaacataacgtatgtcaaattcgaccataaatttaactcggttctcagctcatctcaatcaatgtatggtcgttgtaacaaggtccaatggaatcataccccttcgaatgcacaaagaagaacagatcggggaattatttcccctccaagttgctcttttgtaataagagtcaattctggcagcgaaaagatcctcacacttatatctgtccacatcccaaccgcagctagctgactgtaattaggattgtcaccgatagggtttatatcaagacaggaaacctcgtactccaaaagggcatgttgcacttccgtcaatttcccatctccaatttctagataaaccaaatgcccacctccagtcgccaaaagaacctaacaagcacattaaagagtcactctacaaatgtttattctaaagcgtgttgtatgtctagacactccaaagttagattcctcttccatgaaaaatataaagatagcagctaggtacaaaactactaaatcaaatcgagaatgaaatacaaacctggctggcatttgcagttgcaacattaacagtgaatccagctggggcatgccactcgtcccgcaattctctagttgtagaactgactagtctaacagaatttgaggtaacctgatccagaaaaggcagcagttaattcatgttcacaaatagagaggatagaccagacaactaagctataacagctatcaaatttaattgtcttttgaaaaccccaaagcattagaaattcttacctgtacaagttgattgtacacagcatcatggcaaaataacgtctgcacttgagacaagaagccctcaatctctgtttcttccagttcatcctcaagattcatggctaatatgcgagtttcactgataaagctaacaacaagaaatgtatcgaaggcttcatcaattgaagatttcaacgaccacattcctttgataccttgaagttccacagacgcctgtaatagagcggagttttaagatatagaaaccatatgagaaaattgtgcatacaagacaatgagatttcgcgcataaatcaaacctgttcattgattcctattccattgcgaactacgcggagggaaccatccttaaatgctccagaacaagttacaacctgaccttgcccctgtctctcgaggtcaactacacaaaagtcgacaataggccccaagttgatatacctttccaagacttctacatatgagccttttgcatcagggtgtagattcagctttactagctgcaattagaaaaccaaacatggaaacactcagatggtcgatttaacttttcttagaagccagagagaaggaaataaaattatcttttgaatttatgctatgaacgataaaaataaacaaattcttatccacactccacagagaattattactaaaactactgggctcaactagaaaatatggaacaatatcgatttacatactacagataccaaattgaaaaaaacagtatagtgagagaccataaccatcttctagcatacctgtgaatcaccatagcttgagccgacaaagacaacggcattgtcaaggtacgatatagtcgatgcaatagatgtttcacccaaaagctcaatttttaggccagtgacccttcagacacaaatacaaagtaaataagttctaaagagcttttaattatttcgaatatggatggatgtaagagtaagcacacatgcacactcacttttctttctcgtgcgttataacaagcagatgaatcattccagcatggtcaccaagaagatatctagagccatcaacatcaactcttccatatgctttagtgatggactggatacgaaaaatgaaggtcgcatatcaaactaagaaaacaaaaaaaaggagtacccgcagaaatctcaactctcaagcaacttgtttacaaaagcaggtgagattacgttgaaagaacttacaggtcttattggtattgctttgaatgcactagcactgcaatagacaattgtttcttcaccaataataaggacaccacagagcggtggtggtacaggaatcagcaagtcagcaccattgtcgagactgttctgagaccatggaccctcgacaaaatccttatctttaagagagacttcatatgttttgacatgacgagcatctttgttgtcctacacaaccaatgattagttagtcccaccggagaaacctctagattgcatctcgtacaacagactacatcatcaatatagattataaagttaaaaaaaaaaaactgtttaaataactaactctcaaatacttagcttaaaatccatcaactaccaaccgtacaaatattaatcaactccacaagagttctttctaatgtgaactctggaaagacttatgcatgcccagataacaaagttaaatgcatgtacaaaattcttcgtagcacaggcatgttaagatatttgcaatacctgatatagtactgcaatagtgggctttgcacatccaaacagaaacttgatatccagaacctgcaattcctcaagcctgaaatttagacaccacactcagtacatcatcattcagttttaaatatccccagaaaaatcatatcgtagtgattctagaggaatgagtatattgaggattaaacagtttatttacgaaagaatctgatgcctggaaacaaatgcacactagaattaaagagtacctgatattaaaagcttccttgagctgtcccttattatcaaatggaataacctaaaagaaaaaccaaggaaatagaacgcatcatcatacatgtataaacagatagattagtggaagttcagtaacatgatatatttaagtaaacaagcacatctgtcaaagtttttatagaaggtaacattataccttgaacaagccgtcatacagatggagtccaattaatctacaatctggatcaattataccaatctacaaagcaattgtcaaatcagaggtaagctacatgcccaccaaacccttaatgacaacgcatattttttgatgaaggaaagtaaatatataagcactctgaaatgcacagtcaagacgacgatattcaatacctgaccattgtctgttggccggcctatacgatcagaaacatcccccattgctctgaaaaaagtcaaaacatcatacagaatcagctgtaaagtagaaaatggtcatctgatatattgcttccaataataaccagtaagatgcaacaattacgccagcaccatacatgattttttccatgctttggatatacagcaatgtatcaattttgtgaaaggtgagaacctataatcaaactctcataaaaaatgcttaatcagaaataggttatagatcagattttgtaaagcaggaatatgctgtaaacagctatctaaaacaggcaagttggtaccatgcactaatctgtacataggtgacgagtgtaatacatttatttctaacaaaaaaatgataagataacggcgaacatgatcatgaactaaaagaaaaatagcacaactggttggttaacatcaactggatgcatggaaaaaaatttatcttttggaagctataccttgtaataagctcagaggactcaggatcccattgaagaacacagaatttgtatctctcagttgcaatgaacaaaaagtcttgcgcttcgccctacaaaagacggtggacaatactatcaacattttaactcattattaagaccatgacaaaagaacacaataagagatatatactcacatggggtcggaacaactccagagtagcgattcttccatatataggaacgtccaacataggctgcaatataggaacatccagcagattcttatattactaacaaaacaaagcatgacaacaaagtttttgaactttatactctaatgtacatggaacttaatccatataagcttgacagaatagagatgtatgtacctgaagtccttgtggggtaagcaaatggatctcgattcgagtacatttcctgagaacagatcaacactgctgtcaaactaatctactaatggatctgatagatgttacaatttaaggggacaatgctaaatcggataaatgagataactttcaaacaaatttacagtactgatagctaacgataattgaaaatcctccatatcaaaaaaggcacgatcttcaaatgtaatttagttcaggaagtaaaagccataccaaaaaaaacacaattctttgtcacagtttcaaaaaatccacctcatcaaagaacccagaggcattaaaatccttatagtcatctcccaaactgaaattgaactacaattttgtttgcaaagtgggtaaatttatgaaaattaactcgtgatgggaaattcattgaaaaccctaaacccaaatcaacagctgcaattcaaaaggggactaattgacaaacaaaaattgataacaaatagaggtagggggagagtttcgtacgcgacaatgagattgagctcttgaggacttgtgaagttgccaacgcacgagtgagtgacactggtcggtttgtgagccgtaacaacgtagttccatgagctcatcttcctcttctttgtctccagggaatttgagttcgactttctacgcgagggccctcgaggaagcttctagatttctgaatcgagctttcggaattttaacatagagaagttagagagagaatgaaaagccaaaggaggcgaaaatcgaacaaggaagaagaaagacaactttcgacaaagactggtcggtcggttttggtagacaattgaaattagatggatggtccggttcggtatactataagattaaaaacagttttaaattcagctaaaccgaactcatttgattttattaaaccggaatcatccgattcgagtttgtaaaaaataccgaaattgaaaacactaaacaaaaactgtattaaactgttactgaaataagagaatctcccaattcggtttacgtactactcttcagaaatcagaaccaaaaattcagaaatcggattgaaccaaacttaaattgacggtccggttagtcttcggctctacaaattaaaggcccaagtttctgctttaaaagaacgaaatagttaatgggctcaaaccatagaccaggtaagtcatgggcttggttagtccgggtcaacccggtagacccgattcctgaagaaaacctagtggaaggtttaaagttgtaaactttccgaccaaataaacaaaatcgttttccagcttcttccgtcgccactaaaccctgaggctaaacctagacgagtcaaagtgtaaaatcgttaaaccctaagagggagtgagagagagaagaatgaagtacaacaacgagaagaagaaaggaggaagctttaagagaggaggtaaaaagggttcgaatgaaagggatccattttttgaggaagagccgaagaaacggagaaaagtcagttacgatgacgacgatatcgagtctgtggactctgatgcggaagagaacggatttactggcggagatgaagatgggagaagagttgatggggaagtggaggatgaagatgagtttgctgatgagacggcgggagagaagcggaagagattggcggaggagatgctgaatagaaggagggaagcgatgaggagagagcgtgaggaagcggataatgatgatgatgatgatgaagatgacgatgagactattaagaagagtttgatgcagaagcagcaggaggatagtggtaggattcgaagacttattgcatcgaggtaaggaagaaatttagtacctcaatgtattcaaattagatagtttaggtttgagattgttggtaatttagggtttgtgggtagttagtgttttagggagctggtttaattgtgaagaaacttagtgattttgtacatttcttaggtcaatttgatatctttgaagattggttgatagtagtattgattaaagtttttcaatgattcagggttcaggagccactaagtactgatgggtttagtgttattgtcaagcaccgacgatctgttgtgtcggtagctttatcggatgacgattctagaggattttcagcttcaaaagatggtactattatgcattgggatgtatcttctggtaaaactgacaaatacatatggccaagtgatgaaattctcaagtcgcatgggatgaaattgagggagcctcgtaacaaaaatcacagtagagaatctcttgctttagctgttagctctgatggtcgttatttggccactggaggagttgaccgtcatgttcatatttgggatgttcgtacccgagagcatgtccaggtaatgataataaatttggtttttgtttagtgttttttttatttgttcttcatcaagtcttgcgctcaggtattacaattatgtgtctacaggcctttccaggtcaccggaacacagtttcttgtctatgtttcagatacggaacttcagaactctattctggttcatttgatagaactgtgaaggtgtggaacgtagaagataaagcatttataactgaaaatcatggacaccagggtgaaattctagccattgatgcactgaggaaggagcgtgcacttacggttggaagagatagaaccatgctgtatcataaggtaatagttctatcctccatgtaaacactgttggaagatatcatcataaggtttctattattattctgtatttgtaagtcttgttatatgattataggtgcctgagagcacccgtatgatctatcgagctcctgcatcgtctcttgagagctgctgtttcatcagtgataatgagtacctgtctggttcggataatggaactgttgctctttggggcatgttaaaaaagaaaccggtgttcgttttcaagaatgcacatcaagatatacctgatgggattaccaccaatggaatcttaggtgaaacctaatttagatcctccccatttcatctctgttgcagttggatcttgacattgcagtatatagttataaaacacttttgtttcgttgcagctactgatgctctgaaatatctaattcttatttatttgcttaacagaaaacggtgatcatgaaccagtcaacaataactgttcagcaaattcttgggtcaatgcagttgctactagtagaggcagtgatcttgctgcatctggagctggtaatggttttgtgcgtttgtgggctgttgaaactaatgcaattcgacctttgtacgagcttccactggtaaattttcgttcactagttatattccttagtgttgtctgatgaatctgttgtttgtgactgtgattaatgcatttcacttcaccaagtaataatccttgcaatgccttgtttgatcttacagactggatttgtcaactctttggcttttgcaaaatcgggtaaatttctgattgccggtgttggacaggtatgtgatcatctcttatgttctcttccctcttctttttttctatctttgtcctcttgtctgtgtgattgctaatctcaaaactgatcgtgttttgtgaaatcgacatggcaggaaactcgatttggaagatggggatgcttaaaatctgcgcaaaatggtgtcgcaatacatcccttaagactggcataagtatttcattgggataaatgaagcgttgttatggatagttttgagttgctaaaaagccaaagatctaatcgcaagtcatatagggattacatttccttgtagctcttgaagtttttgctcccttttttgtttgttccttgtaccattttttcttaatacgagagataagaacttatcattttgaggctctgaagaatcaaagaggataacagttcccaattttttcattctctcagtaaagctttttgtttcgttttcccaaatgttgaagataagtatatgaaaaggcaaattattaaaccaagatccatagtgaacacagacttgatcgtaatttatccggcgaaaagaagattgcttttccaaacaaaaaagacaagagcctactacttgaatgaattctcttaagtcaagcttagaatccctagagacaatttcttgatgtctcttggtctcgttgctgctccattctgactaatagcttcaactggataagaaaaaccagcagagaattgataagaaagttccaaatatccaaaacatacatagaataccacaaaatgaagacttgaaacaagaaaaatgcaaacagcattgaaagaataactaaacaagaacatatcctgcaaaaaaaacgaaaatgatacataataatccaaagactcgagcctatatgcagagaagttccagaggaaggtcatgcttccaaaagtttccattttaacattgcaaacactaactcatgtacaagtgagtgattctcattcacttatttgctaatatgcatataactcgatctcaaactaaccaataagtatcatactacctgaaatctagctaaccatcagttttgagatattttctacaacaaagtaaacccaagaacacagctttgacatcagagatcaatactaccaaccatcaatcctaaaccctgaatcattccattgttcgaaaaacaaactgttaaatctcatatccaaatcagaaacaagagaaaacgataagcataagacaaaaatctctaacctttattgactcatctcaacttctctttatttcagacactttctacaacaaagtaaacccaagactcagtaaactactaaccatcattcttaaatcctgaatcattccattgttcgaaacacaagcattcaaagctcatctccaaagcaaaagcaagagataagacaaaatctctaaccttttaaacgaaatcatctcaacttctctttacttgaactcttcttagctgcatccataaccttctcaagatacccttcaataggcggtgtaagagtagccatacctcgattcgccggaaacggtgtcaaatcaggctctaacgccgccttcttcagattctccggcaatgcctcaatagcagatttcttcaaattcaaaagcgcagtttcagctgcacgacgctctctatgctctctcatcaacactttactatactccttcgcaagtctctctccatcttcttccgtaagcttatacttaggcaattcctcagcttcaaaaatccctaacgaaatgtaatccaaacctggcgtcccaattcgcatcggctcatcggtgactcccattgaagcagctcctcctttcttctggatctccatatctcgttgcttctctttactaatcaaacctagcttctcacgttgcgcctcacgctcgatctcttggggggtcaagtagcgaacaggacaaggagcgtttaagcattgctcgtagagtttctgcttctcatcggaaattctaccttttcctttaactgcttcctctccttcaacaggtgctccgccgccgccaccacctttcttgatggagagtttgttacgcttcaatggctgacctgtcttcagctttgcttttcctttaggagttccacttgcggagcatctttggataagatggtaactcagtgattcgatgatcgcttttggtttcgtaactcgaatcatgcttctgattcacctgagtttctgattgctttcgtctgaaaatgttgcttgagtacagagattagggttttcgactctcgactgtggaagaagaacactgaactaacgacgtcgttttacatcaagttaaataaatcacgatgtcacaaaactgtaaattcagcttaaaccgagggttttcttgtcttttagaaaactccaatttggtttcttggttcggttttccatttctttgtataccgaatgagaaccgacgttaattttgaattgatttggttcaattcgatttaatttttggttattgtttcggcttaccaccacataaccgaagcttctttctgaaaacaaattcgattttacttttccagaactgagaagaaatttgctgaattcagtctcatgcaacttgttaaatttctcactattaacaacgaatttggctttggaaactgtaacctccaagtaccaaatacaagtaaaatacaaagaacgtggtgaaaagtaaagaagatccaacacagacaaaaagcaatttgtccactaagatctctcgagagccaaaaaaaagttgagaaatttgcagtcagtatgggctgctctgttgttgtctcttctgggccttgaaaggatcttcttcttcccctcaccttcttactataaacccagaatcatcctctgtttcttttgttcctcaaatcatttttttcctctcgattgtgagatcaattattaatattcatctggagaattatcgtctcttttctccattgctatggctctctcaactactccttctcaggttttcatttttaccattctaaacctttttggttcctgagattaagtttcggatttaatgaaagtttggtttttgattttagatgtccgttgcacttccaactagaattgatgggtcgagccgatctatgattaaggtgagcaaaaacgatctagatcactagattaccgatctttgtcgttgagatgattacatggtcctcaaagtttttgtcttttggttttcttattgtgttgtttagttctgatgtagacttgttgtgaatttggtattgaaaggtatagtctttacaagtagaagattacaaaaaactggattttgcaactcttgagcaatgatattgaatctcaattattttgtacctcaggttcaaagtataagcttcactgataagtcatggggtcctcctctgctgagactagattcgaaatctagaagcttaggtgtgaaaaaaaggtccacaatatgcatgtcacttcagcaatcaagcaaatccaaagtcttggttactcctctagaacttgaagatcccaaagagactcccttaaacttgtttaggcctaaggagccttatactgcaactattgtttcggttgagagaattgttggtccacaagcacctggagagacttgccacattgttattgatcatgatggtaatgttccttactgggaaggacaaagctatggagtcattcctcctgtaagtgattttaactctattgctcataacgcattgccttttgctgataaatgatttggtctctcagatttggtaacatatctgattatatgtgctctattcttgactcgtagggtgagaatcccaagaaacctggtgcacctcataacgttcgcctttattcgattgcatcaacacggtatggagattcttttgatggcaaaacagctagtctatgtgtccgtcgagctatttactatgatccggagacaggaaaagaagatccttccaaagctggtgtatgcagtaacttcttgtgcaatgccaaacccggcgataaagttaaaatcaccggtaagtttatgtgttttgctgatatagaacctcttctttttgttgaatttgtatggtctaaaatgttcgatattgttgacaggtccatctggaaaggtaatgcttttacctgaagatgacccgaaagctactcacataatgattgctactggaaccggagttgctccgtacagaggatacctacggcgtatgtttatggagaatgttcccaatttcaagtttgacggacttgcttggctcttccttggtgtggctaactcagacagtcttctctatgatgaagaatttgccgggtaccgcaaggactatccagaaaatttcaggtacgacaaagcgctgagcagagaagagaaaaacaagaaaggagggaaaatgtatgtgcaggacaagattgaagaatacagcgatgaaatcttcaaacttctggacaatggagctcatatttacttttgcggacttaaaggaatgatgcccgggattcaagatacgcttaagagagtcgctgaagagcgaggcgaaagctgggagcagaaacttactcagctcaggaagaacaagcagtggcatgttgaagtgtattgagttaatagtctttctgtggttttcgccatttttgcaactgaataatcgtgtcaattaatggacacagtgtaactcaaccaagaaagtcaatcattagacatgaatctttcctctaatttcaactattatcaagaaacaaaataaggtttcatcggctgtctgtgccgcaaacatgtatttgttataagcatcaccatcaagcatctcttctctctgcttcttccttagcattttcttggcacaggccaatatctcggccttcgtatgaacgtcatcatcagagtctgaaataacaattggtcttcgtatgaacgtcatcatcagagaacaattcatggtctacataaccatcttgaagtgcacctatctgtggaccagttgccttccgcgtcttatccttagcacgtcgtatcgcaagaagcttctttgtccgctgtgtttgtcagctcttccagttcattgactagtttatcatcctcatcttcctttcccacatcaagctcctttttagttactttctttatttcacggattgtgaattgttctctctttctgttaattactaaacgagaaatatcccaaatatgaaacagagttacagagacaaagaggcaagagttacttaattactaaacgagaatatcccaaatatggaacagagttacagagacaaagaggcaagagttacttactattaagttaccacataagtactagattacttccatgtatatgatggatctatctgtcattctaaatcccaaatgaaaatgagacaaagagctacatgttatttactgcgtaattagtggtaaactacttccatggatccttgaagcttcatgcctctgcttcttaaatttcagaatcaacactctccttggtcatcttcttggattcaagaaactcaacaagacccttaagcgtaacatccggatccttgcttaccataagcttctctgtgatctcagctggagttgctttcacctcaaggaacatcttctcaatagggtcaaacaactcgtgttcttcgatttcaagatacaatgcagcaagtttcttgaaaacaataggcgtgcaataatccatgaggatgtgaacatccatccttcctggtctcagcaatgccggatcgagtttctccttatggttcgttgtgaatatgatgatcctctcttctacacagcttgaccataacccgtctacaaagtttagtagcccagacagagttacctaaacaacaaataacaagaatcagaacaccaaaatcagagatgttttatgcaaattagtgaagcttatatatatatacaaactcataaaccttaggatccttcttcttcttcttgttctgattctcaccatactctgtttcatctttattttcctttctacaagtagtatctgctccactgcaatcaagatcttcaatgagaagaatggagcggttctcggttgaggtaagaatctgtctaagcattgcatcatctttaacgctctgaatctgaagatcatagatactatagttcataaaattagcaattgcagcaacaagcgatgattttccggttccaggtggaccgtaaagaagataaccgcgtttccaagctcgtcccacggttttgaagaagtcttttccattggagaaagcgtctaggtcacggatcaatgtgttcttgagctcaggctccattgctaaggtttcaaatgtggtgtggtgttggaagattgctgattcccatctcagacagtctggattgtaattgtagatattgagattttctttatgtgtcaatatcttcaccgatgattttgcaatgtatgtgaagtaatctgacataatcttgtccctaaactccttcttacacgtcaaatgaaagtacctgaaagccaaaattaacattgaaaaatgggaattacaaaatagtgtcagaactcagaacataaacaaaacacagcatagacattagaacacgtaactagacttaggtgaacaaaaccccccaaaatttagggttctatattgagaatagaacgtcaaaaatacgaattgatgacaaataaacgtaagtagactcagtttagaagagtgatcacaagaaaagaaaaaaaaaaatcaaattttggggttagaactctgtttagtagagtgagtgaaaagatcccaaattttagggttttatgttgacaagtaccctttttgttgacaaattttagggttttaccgtttattagggttacatccagaggaaagttatcgtttttgtttactctggtaaggattatcattatcttttgcagagagaagtgtccattcaagacgaatcccttcgaattcatcgatgattttggctttgactgggattccgaatttcggtttagccatcggattcttgaggtcgctcgaactgacgaggagacttctggtggtgattctggagagaagagtcggcaagtaaacttgggctgcacggaaagtctgattcataacgtaatcgctctgttcctcgatgatgaacgtgaaattggagttgagataaaaagaaaagtagtctgtgaatttggagatgataaagtcacggatattgacgggaatgaactcatagagaatggttttgaagaggatcgtgaaggcagatagagatgtgtaaaccgagaaaattgcagagagtgaagggatttttgtgaagagatttgacgccattgctgttagttttcaggtggtgaaatgaagatgatgcttaagcacgtgagtgggtgtcttaaagagaagagaaaaattggggagcaagttttcgagttactattctacaaaagggaagcttagagagtaagttcgtgctttcctcttagggaaagagatatttttttggtaaacctttagtggaatattgggaattttatctttaattttcataatcttttcttgtcagagtttctcttttgggaattttatcactaatgccactaactcaataaaattgttcactcataccctcccacgtttttcattttaattttagttttattttaaatcaaatttatatgaaaagtccaaaaactcttaacctaattcatatattacgtatctctgccactcctttatttgtgaacttaaaataaaacactgcctcttttttttctttttcacgcttctttttattcttttagattttgtctcttctctctcaaaatcaattttccagaaatctttcttcttcttctccatgaatctatctatctatcttcttctttttcatggatttctattctctttcttcgatctcttcttctttctctgcaatctaacaaacccttagatctcttctttcttctcaacgaaccctagatatctccaaactaaatctctgcaaaatcagtttatgcataaccgaagaaaaagagaagacggttcacagaatcggcggcgacgacgcttggagaagacggttcacagaatcggcggcgacgacgcttggagatacggttcacaaaatcggcggcgacgacgatgccattaaatataatagctttagggtttagaaatacaaatcgcttaaacttccactattttgtaccatttgtcccgtataactgagttgtatcaattatactattaatacattttgtaccagttgtccatatttatatctcacttatactatttgtatcagttgtactattatttttcaataataccatttataccgattgtttctatttatatatagttattacatttataccaattgcattatattctcttttacttatatcatttgtactagttattctataatctctcatttgtaccagttataatttcattaagggtaatttcggaatatcacatttatagtggcactcagattataaaatggcacgccagattcgttttctccccacaatggcatatgtgacgcgctctcgagtttttgtggtagtcagtttcaataaaatagataaaaaccaaaaatatattatatttaaaaaatatattttcaagactttatactcaaaaaaatatacatcggtttgaaccccgaatattgcaagattaaattgatgaagattagagaatttagcttgtgtgctataacagaattattgatagtctatgactttatactatgatgtaaaaattttgatctgttttaaactgtaacaattaatcaaatatgaagaattaaatttgaatttactattttaaaatcttaaataatatttttaattttcacaattttttttatcaatgtttgtggaagccagttttaataaaatagacaaaaaccaaaaatgtattatacttaaaaaatatatattttcgctgccggggtttgaacccggaatattgtatgatcaaattaatgatgatcggacattttgcctgtgtgctacagcagaattatcgttagtctatgactttatactaaacatatagattaatgaaaaaattttgatcgggtttaaactgtaacaattaatcaaatatgacaaattaaatttgaatttactatttttaaaccttaaataatatttttaattttcacaattttttttatcactgtttgtggaagccagttttaatgaaatagacaaaaaccacaaatgtattatactttaaaaatatatttccgctgccggagtttgaacctggaatattgtaagatcaaattaatgatgattggacatttagcatgtgtgctacagcggaattatagatattttatgactttatactatacatatagattgatgtaaattttttgatctaaaacatatatttccactgccatggtttaaacccggaatattgtaagatcaaattgatgatgatcggacatttagcatgtgtgctacagcggaattattgatagtctacgactttataatatacatatagattgatgtaaaaattttgatcgggtttaaactgtaacaattaatcaaatacgaagaattaaatttgaatttattatttttaatccttaaataatatttttaattttcataattttttttatcacagtttgtggaagccagttttaataaaacataacggaatattggaagatcaaacagatcatacaagcatttaaccatatgctacagcgaattattttgatattctaatttttttttttgaatagaatgttaaattaaattcaaaagaaagatatagcgttgttacaactagtgcgactttttaaaaaatttacaaaagaaaaaaaaaaaaaaaaaaaaaagattcttgatctagcttgtgttcctcagagcgagccagagttggaatcccctatcgtatttgtggtggccattagctttaagtaccgagagctgattacggatgtgtttatcaatccacgagactaaacgacttgctgaatgtggtggtgtgccatgattacggatattctaatttctactatacatatagaatcatgtaaagtttttgatcggttttaaagtgtaacaattaatcatagtatgaaaaattaaattttaattttctattttaaactcagtccacaattaaatatcattttgctaagtgtcatgattctccatccgactcccttcttcacagttgagtctttgataaaagagcaggcatcaacttgagagttgtacccctgtagggttggttctgtttcatatcgataagtcatgtagacttcaatacctgcaatccagaatacagccaatcttgtaagtgcggatgaggtaacaataaagtgcggaaagtaaagagacaagaaatttgttaacgaggttcgatttttcctactcctcgggaccacgtccagatttcgatttcactagaacaagaaagcaaattacaaccaattcgcaaacacgtaaaacaagcacacccctcttgatttaccgctcccttctataaacgtgaaaccttaaggataatctctacccttaactaaactcctctgagtctagatttaatcaggataacctaaccctgagctaaactccttctgagcctagacttcaattctccaagtctctggaacaaccttcacacaccaccaaacaagcttgatcacacaagcaccaaacctgcgaaactatgtcgcataaaaccgcgaaactatgtcgcacacacccttagaaagctctcaatgatttgtctttatgcctcagctctcctgcctctccaagacgtcctagcacctctttatatagtcaaaacgattgcctaatcaccataggagaagatttcctttttctgtaagaaaaagtaaattttctttttactcttttcctttttctcatcaaactccactttcatcaagtcttccaaatctctttaagtcttttttcctttttgtttcatcctctaaacacgctcttctcaaatcttctagaaaccgacactcacacaaaactgtcgcatcctgaattacttcttgaatcattcagaaattccatcagataaaatcgcgtattacttcttgtatcattcaacaactccatcagcagcaactacatcttcaaatctccccctttttgactatgttgtgaactcatcagttctaactccaacacaacatcaccaaacacatcatcattctccccctgaatgagtcacaacatggtcaaaattacttataaaattctccccgcttcgcaatacgaggttgatagcctagaacaccacttccatgaaaatcatctttcctaacccatactttgttgcgccttaaaccctcatgactgcattctcgaatgaacctgaaacaattcctcttgatatgtccttgaactccataatgataacatttaggaccatgaaatctcacatcataagcattcatcaatcgatttttctccctcaacaatctgaaacatcttggcctaatatgcccaacaactccacaatgatgacaaaccggtcgaaaaactcgtcgaggttcactctgcaatttttgaacttttcttgtaccggatgtagtctctgtatcagttctcgaatcagttctcgtatcagatgcaatctctgccacagttgcagtttccttcacagttcctgatgcagacgtgattttaccaccataaacaaacaccggatctgattttgaaggatttcctttaaatccaagaccacacttatcagtcttgccaatactcaaaatatgacccaacttctttgtgccattattaagcatcctcaaattcttttgagtttcttcaagttgtgacgcttcttcttctttctctgcagcaaatttcagtgttttaacaactttagcctctaacttgagcttctccttagttaatactgaattctcctcaactaccttaacacaatgctcatataaagctttgtaattctcagcaaactcttcatcactaatacttaaatcatcatcatcactttgatcattatcacttccagttgcaggtcctgttgcagacgctgatgtagaccctgttgcagacgctgatgttggccctgatgcagatgctgacgcaatactagactcaaaggtcgtaaaggcaactaaattcttcaattcttcaccatcatctgaatcaatttcagaatcactcatgatgaatttcttctccttttccttcatcaaattcgcacattcagaacacatatgtctaaaacctttgcactcaaaacatcgcttgcctttagatgacttgtacaatacttctttgtttccatcaaccttaaactcgtgaagagctctatttcgttcattccatgaaaaccgcttcttgaatggcaacctcaatatctccatcaatcttgatttcaaactctgtcttacttcctgaatgatcttctgaacgatctccggaacctcaccctgatctactcgaaacaagactaaatctctatcaagaacctgctctgataccacttgtaagtgcggatgaggtaacaataaagtgcagaaagtaaagagacaagaaatttgttaacgaggttcggtttttcctactccccgggaccacgtccagatttcgatttcactagaacaagaaagcaaattacaaccaattcgcaaacgcgtaaaacaagcacacccctcttgatttaccgctcccttctataaacgtgaaaccttaaggataatctctacccttaactaaactcccctgagtctagatttaatcaggataacctaaccctgagctaaactccttctgagcctagacttcaattctccaagtttctggaacaactttcacacaccaccaaacaagcttgatcacacaagcaccaaacctgcgaaactatgtcgcataaaaccgcgaaactatgtcgcacacacccttagaaagctctcaatgatttgtctttatgcctcagctctcctgcctctccaagacgtcctagcacctctttatatagtcaaaacgattgcctaatcaccataggagaagatttcctttttctgtaagaaaaagtaaatttcctttttactcttttcctttttctcatcaaactccactttcatcaagtcttccaaatctctttaagtcctttttcctttttgtttcatcctctaaacacgctcttctcaaatcttctagaaaccgacactcacacaaaactgtcgcatcctgaattacttcttgaatcattcagaaattccatcagataaaatcgcgtattacttcttgtatcattcaacaactccatcagcagcaactacatcttcaaatctcaattagaggcaatgcatagagagataaaacgaatagaaatctattgagaatcaatcaccagtgtctcgtagaacattcgagcagctatttttcttgtctttccttccaagatcttgttcaaacttagatatccagaataacgttctttaagatgctgagccaaggctctgtaatgttcaatgaatgttagatggttagtatagaaacgataggctcttaaaaacgctacatggtttttggaatcttggtaccttgttcttcctgaaaaacccccagaatcttgagtaaccggtgatcttaccggggtattgacaccttcctcaagaaaatgaagttcctgtatggcacaaccaaaaagtatctgctatcaatgttagcaaaagcaccaggaatggtaaacacaagcgaaaaatgtgagaacaaacctctgtattgttggaagttgaaggttgtgttctgtaagatcctgtctcccatgtttcaggatgaatggtgaagccattggttctaaaaggtgaagatcttggaggtggtgatagcatgtactcgaggatgtttagtccaggcaaaacctatggaatagtggaatttgaatgttttgttctataagatcttgtctccaccgtttcaggatgagtggtgaagtcattggttccagaaggtgaacttgttcagtttagatatgaatgttttcatgcacgaatttaagtgcaacaccttggaaatgttcagtttgctgacctgaagatcgctgaaccgtactctcttgattagtagaatcaggaactgtagattgtgtaactggagaggccgagttaatttctgtttcagcttctcgagtaggagatgatacaggtacagatgcaggttctttaggagcagcaaaatatgattttgctacacaatcctttttaaagacactgagtaaaacatttgagaagcctgcagataaatgtagataggcaattaaaaacaaagggcaacagaaagtaaaactgaaagaaagagtcactggaaagttttaccagtaaacaagggctcgttgaaaagttgatccttctttgactggttatcaagtctccgaaaacctagttttgatgaagacaacttctttctcttacgaacagtcttactaggatcctcactcctttttctcaagatactgttccaaattcagtaatcagtatgcaaaacaggtaatgaaataatcaaagtcacaggataaactgcccttatcatagtgattcagtcctttggccttgtttgtggtgtgggaggaggagttgttggcagaagaccacttcaggtgatggatgcacttaacatcaaaacaaaaattaagtattttaagtatataaataagataggttagcataacatttatattttgttcactcaccaaaatctgcactctcttcctcagaccctgcaaaatttggagatcctaagccatgctaaaacgtcgaatgcctgataagagagcacatgtgtgagtgagatgaataggcacgtgtgaagagccaaagagaagcatgagaagaattcagagtataaatagagatagagagcaaacatagagaatcatcctgcgtgatcatattgatgttgcgagtagaattagggcttatgtgctctgttcttaggagataagattggagaactgtaactccaagcttatcgatttagggttttgattctttgtaattggattgatagataagaaatacacggattacgctttctttcttatcaatgccctttagaattcaacacttcttcatcaaaactagggatagtgtgtccttttatccttcacagtttcatctaaagaactagtcatatagtatttttttaatttcttccttcataaccgtatctccgacactgagaatgatcatgctccttgcctttttgatcttttatttttcccattttgggctcaaatatgcagaaagtgtaatcacctctcctaataatattttcttcttcgaacattgcaaaacacatgttgagagagtcttttcttactctgtctcacagtcatttcgtcgaacaccttgtgtgcacagaaaaaacaaaaacaaaaaaaaaaaaccctaaattgttttacattgctctatcataagctacaacatacacaggtctgttaaaagagtacggaagtttccgtaaaagccagagccatcactgcaaacaaacgacgctctctcttttccattatcagtgaaattacagtaactaacgccacagaacagggaagagacaaaacagttaaccaaaggttaaccggaattgaaccaatcatatttaaacaaaaccacaccacataattctgaattagccataaacaatatcatacaactcatcccatagcccatcaggattaaagcccaaattaaaagcccataaagaaaaaagaaaatttcttcgtggcaggaaaaaggaaactagaacctgaccgttgttgaacacgcttgtatatataaccctaaagcttcacaaatcctcttctctctcaatttgctctcatcacaattttcttcttcgctgtgtaaacctcttctgattttattttttttgggattttctctttgcgtttcgaaacatgagtatgagttctcgtcctgaagtggaagttcacgtcaccaacggaaggaaactctctccatcagaaccaaactcagtcatcatacgcctcaaaaccaaatctgtagagatcattattgaaaaccaaacaaccggtcgccaaaaccgccggactcaggtttcaccaccttttctcatcgatatcaatctccgtagctctagtcacgaccacatccgaacgcttctccacgatcgattagtcggctacccctttgagagttacttgtgcgatgacttagccccaaagatctcaacggctgcaatagacttaggttttgggcacaacggctttaccttgaccatggccgctacagttacttaccggaccgtctcagttatgtcaaacgacgagaaatcattgaggatggttctgctagggagaatgaaagcagaggaattcaagagtttgaagatggaaacagagccgtgttccatatgtctcgagagtctagtctccggtccgaaacctagggacgtcacacgcatgacttgttctcatgtcttccacaatggctgtcttttggagtggctcaagcgtaagaacacttgtcccctgtgtcgtactgagatctacgattgaaaacattgaaattagggttttatgtaaggattagtattaaggtttccaatagaagttagaaattctagttttttgtcacatgctgtaactagttgaagacattgaatgtaatttgttgttttaagggttttactcaattagagaagttttgtgtcacaaatcttgtcggttttaagttcatttgcaaactcttaaatccttaacaatataaccagaacccttcacatcaagctgttgctctgaaatcaaatcatgattcctacgtgtcttcttcaatgtgatttgtttcacctctcacatgaagtccttctgcagtgtctttattatctccttctgcaatttcaacatatttgttaccatcatatatattcctcgaatcttttaaaggatatctctacttcagcatttcttagtgatcttgaaacgtatatgttaaaatagttgaagatgagaaactttctgcaaatttgagcccaaaatggcaagaacaaggaacgttaagatctttcaagctttataacaacaaattgaactccaacaagatgttaaaagagttgatacatgtcgagtgtgtcatcttccaaatttagtgtctgaggcaaagttattaaatcaaactaagaaatgcataaccacttccacggatccttgaagcttcatgcttctgcttctttaaattttagaatcaacagtatatctccttagtcaaccttttggtgtcaagaaactcaacaacacccttaagcgtaatacatccggattcttgcttaccataagctgctctgtgatctcagctagagttgctttcacctcaagtaacatcttctcaataagctcaaacatgtcatgttcttcgaatatctaggtacaaagcatcgagtttcttgaagacaacaggcgtacaataatccatgagtatgtgaacatccatctttcctggtctcagaaatgccggatcgagtttctccttatggttggttgtgaatattatgatccgttcctccacagagtttgaccataacccgtctacaaagtatagtagaccggacaaacttacctaaacaacaacaaataaaaacaagaatcagagatagtttgtggatattagtgaatcttatatatactcaaatattattcataacctgaggatcattcttcttcttcttgttctgtttctcgccatttcctccttcatctttattttcctttctaaagtccattccaactcctttttagtatgatattgtcctctttgggtctacatgttcaagccctcaagaatttgttattgggttacttcccaaaatgcctcatactagttggagttggacttgacttatatattagaaactctttttcttaacttccgatgtgggacctttggtttatacccaacaatcaaaatacgaattagttacgaattataaagtataaaaacgtaattaaactcagatgaatgaaaatccccaaactcagctttcctcttacggaaataaacgaattttcatgtaactaccacattgctcgatgtttattttgatcgcgtacaagggaaaaaataaaaatttgaaaaatgggggatttgaagtatttttccaatcccttattttactcgtctaataaataagaaatgtttcgctttatcccttaaatgtttacataaatctattgatatttagtgatttgagtatcagcattcagcattattgataactaaagtgggaaaaatgctcataccaaattacaaatgtggtaaaataaagaatttgtgttcttgctctaccgaattaaagaaaataaaaattattattctttaaacaagagaattttgctgcataagaccaaggaaattgtgtccgcgtgtaagaattgttgatcttacgtggtttgtctccagtcgattttaaggttttgccttgatcctagtgtttcttgctctctccgattagttggtgaggtgtgttggtagttgtatttggtttttggtcgcgttggattcttgctttcctccctgtcggtttgctattggtttgtcgtcggtgtgaggtttctccggacttattggtgcttttggtatttacaggttctatagggatgctttgtgaaagtctctcatgcctttgttcaattctagtgcttagattgttttttctccattaattttgtatcttctttcgatttctgtctctatatttggttttaatcagttttgctatattttggagtttagtttccctcttttgggcaaatgtttcagggttattgtgagaaaaaacaaagaaacagtgattattttgacggagatcgagagagagttaggagaaatattaaaaacaatcggagaaagccgaaaagaacgacgagatattgttttctttttcctaaattattctttaagaaaaagggcgtgacggggacgatatcactgagcaatcaaaggggtgatttataaatctaagtgacggcgatttagttgtttgataagttctttgattgctgatttggaagattttcttttaaagttaatccacatggcaaaaatattattattagaagaagataaaatattcattaatttttatagattttctgatatttttagctaaaacaattctaaatttatataatatttacgagtttaaaaaaagcatttacatacataacttaattatcaaggaaaaatattaatagttagagatatcaatgttacaaagttatcagaacgcacaaaaatatacagaaagaaggtcaatatgataaatcaaattcagaaaacgtaataacaaaaaatatccaattaaaataactaaattaatatgaggttaggtagcaaacgtctaaattacaacacaagtaaatttttagccattatggattaatgactattgataaaaaaaaaagtaaaaaaaataagtagaatagaatgaaagtagtgcttggtacattattatgattttttatttagtgaatgttttcagaaaaatttatttaagagtaagattaatggagaatttaacacaacaatttttttttgacttttttttcaattagtttgctagttttttaatttaattaatgtagaatgacacatatcattatttttatgataatatgtcactcatatgagtgtttgacaattttcatatatataatttcaactaataataatttagattaaaaaaaaacaaggaattcaatgccaagaatatcatataaaatatataggaaaagtattaaatttggttgacttttcattttagtcacaaacttttattaatcaacccgatttagactcgtcataaaatattttgatgaaacgcattaacgaggttaactatgtgttacttattatcagttatctccataatcaatctgctgataaatcaacacaatttattttaaaaattttagtcaacaaaaatactgatttaaagtatctaaaggaaaagttaatgtcttttcaaccaaattatttgttaaaaaatacatattttctaaaataatatgttttgctaataaataaaaagcaatttaaaccgaccgaatgatatttacttttgtactaatttggtttctattttcatcataaaccaaattttaataaaaaaaaattttttaaaaaaaacctatgaaacaataacgccggattggaaatagtgtttttttttgggatttttttaaattaacaatttgctctaatttctttatttaaaaaacgcagaaaaaaataataagataaaaagaaaagtgagcacgtagttgtcatttgcagatattatcatttgccaattttcttgtaaattcacctctttccttcgtctatctatcctcccttccgcaacattgtaagaacaccaaatcccctctcatttccaattttttgtatatcttcttgtttcatatttagatcatccaatctctaagaatgttaaaggtcaaattttaaaatttttttgtcggtttttttttcctctccggtgtcggaatccgacaacgtaaggatgattcacataggtttttaatttttgatatgaaaagagattcttctcgtgattggcccatttgttttgttttcaacaatgttcacgttttgatcgcaaatttaatttgatttccatgataaaaattggaactttcttatgttgtgatcatttacaacaatttgtgcgtgatgggttgttctcaatgtaggattttgtttgatgatcgttgggttttgaaagaagagcaatgagcaattatgcagccggactcggtaagcctggctcaggtaatgacagattctttcttttgtgtgtgtgtgtggtcgattctatagatttagcgaaatttcttgactttttcatgttataatggcgtcacaaggtttctgattatgttgtgactcaatccacattgtgtgtttaacaggtaaaaggagaatcagagatcttttaaatcaacctgataaccgagtctgcgctgattgtggcgcttctgatcctaaatgggcgtaagtcatcgcttctaagcctctttttcttcttcttatcttttggtagttttgctgataaacaacatgtcatttagtatatagctaatcttatgctaatacaatatgtttggttctgtatgttctctattcatttaggggttaatctcatagagttgaatgtctcacatttctttaccataaccgaaagttacttattcgcattatgcgatttgagcttcatctacatgttcttgtgtctttagttatgtatctttgtgtttgttcttatattgaataatcagttagtagcttgttttcagatcagcaaatatcggagtattcatttgcttaaaatgttgcggtgtgcacaggagcctcggcactcatatttcaaaggtgatatatcttctttgctctattacatattggttgtccatttgttgtctcttttcttcattactcaagacaaaattagatctctttcgttgtgtactcattgtttggtttctccaggttttgtctgtgacactagatgaatggtcagatgaggaagtcgattccatgattgaaattggaggaaatgcgtctgctaattcaatttatgaagcttttttacctgacacgtgctctaagcctggacctgatgttaatcatgaccagcgtatgagattcattaggtcagattctaaaacaaaatactctgtgacaggacaaatctattgctgttgtttgtatagtgacttactcaaaatctttatttagggcaaaatatgaactgcaagagtttctgaaaccaagcttgcggattacatccgggaaaggctcaacaaagagttcagcttttcttacatcaagtctttctagaaagatcatggatagttttcgcacaaattcatcatcgcagacgatggtaaagcttcaaacttgcataagttaacgttttctttcttatacctttcttcttgcatgttttgaaatcggtaaatttgacagtttcaggaaggaatggtagagtttattggattgttgaaggtgactattaagaagggaactaacttagcaatcagagacatgatgtcaagtgatccatatgttgtgttgaatctagggaagcaagtaagtgatttgctttgcatctttttattagctttacttcttgttgatgctgtgaatcttgagtaaaattgtcttgtttattcagaaacttcagacaactgttatgaatagtaatttgaacccggtatggaatcaagaactcatgctgtctgttcctgagagctatggccctgtgaaattggtaagagcaaattcattttctattgacgatttcagtcattgccaaagcttatatatatatcttacggtttcttatgtggttgcagcaagtgtatgattatgatacattttctgctgatgacataatgggagaagcagatattgatatacaacctttgataacatctgcaatggcttttggggatccagaaatgtttggggatatgcagattgggaaatggctaaaatcgcatgataacccattaatagatgacagtatcattaacattgttgatgggaaagtgaaacaggaggttcagatcaagcttcagaatgtagagtctggagaattagagctagaaatggaatggctgccacttgaccaataagtgtcatataggtctcataacctttataaatgtactgattgatttaattctttgttttttttttttctctccatttgttggaaattttcaaaaatctctttgcatttttttcctcatttcagaggtaaatgtattttgatgtttgtataaaccaatggattactatatgatgttttgattgatggaaaaagggtgaaatatccacttatgtaacatacactttcacttgtgatcatcaatttacttgagagtcgtttcttcaaagtttcaaactttccacaacagaaactctacttaagatgatcaaggcattgtcaaatgaaatgctttggaaggaagaaactgcctctccttcgttaaaccaagctcagtatcttgcagtttcctctcatcagacatatcaatgcttggacaaaggtacgaaccattttctacatttgtgggacattacaggcatttcttagcaacaacgaatgttcatcatactcagaacctaaaagattaacatgttcaagccatccttagaacccaacagctcaacactttcgctacatctattactagaggccaacaattggactatttacaagtttcgcagaactgcactaaacagagtcgagtcactttgcaggcgtattaaacaaaagaagcacagataataaaaacgaagcgatgataaagaagaagttcgacttgtcattagaaagaaagagataacaggaacggaaacatagtagaacacttattcatcagggattatacaaggccccaaaacacaaaccaccaaagttttacatgaaacgaaacattgaacttcttaagcataacagagacgagatttagaaaccaccacgaagacgcaggaccaagtgaagagtagactccttctggatgttgtagtcggccaaagtacgtccatcctcaagctgctttccagcgaagatgagacgctgctggtccggaggaataccttccttgtcctggatcttggccttgacgttgtcaatggtgtcggagctttccacttcaagggtgatggtctttccggtcaaagtcttgacgaagatctgcatacctccacgcagacgcaacaccaagtgaagggtcgactccttctggatgttgtaatccgccaaagtacgaccatcctccaattgttttccggcaaagatcaacctctgctggtccggagggattccttccttatcctggatcttggccttcacgttgtcaatggtgtcagagctctctacctccaaagtgatagtctttccggtgagagtcttcacgaagatctgcatacctccacgcagacgcaagaccaagtgaagtgtggactccttctgaatgttgtagtcagccaaagttcttccatcttcaagttgctttccggcgaagatcaatctctgctggtccggtgggataccctctttgtcctggatcttggctttcacgttatcaatggtgtcagaactctccacctccaaagtgatggtctttccggtgagagtcttcacgaagatctgcatacctccacgcagacgcaagaccaagtggagtgtggactccttctgaatgttgtagtcggccaaagttctgccatcttcaagttgttttccggcgaagatcaatctctgctggtccggaggaataccctctttgtcttggatcttggctttcacgttatcaatggtgtcagaactctccacctccaaagtgatagttttcccagtcaacgtcttaacgaaaatctgcataccaccacggagcctgagaacaagatgaagggtggactccttctggatattgtagtcagcaagagttctgccatcctccaactgctttccggcgaagatcagcctctgctggtccggaggaataccctctttgtcttggatcttggccttgacgttgtcgatggtgtcagaactctccacctcaagagtaatcgtctttcccgttagggttttaacgaaaatctgcataccaccacggagcctgaggaccaagtggagggtggattccttctggatattgtaatcagccaacgtacggccatcctctagctgcttgccggcgaaaataagcctctgctgatccggaggaatgccctccttatcctggatcttggccttaacgttgtcgatggtgtcggagctttccacctcgagggtgattgtctttccggtgagagtcttaacaaagatctgcatctgttaatcagaaaaactcagattaatcgacaaattcgatcgcacaaactagaaactaacaccagatctagatagaaatcacaaatcgaagagtaattattcgacaaaactcaaattatttgaacaaatcggatgatatctatgaaaccctaatcgagaattaagatgatatctaacgatcaaacccagaaaatcgtcttcgatctaagattaacagaatctaaaccaaagaacatatacgaaattgggatcgaacgaaaacaaaatcgaagattttgagagaataaggaacacagaaatttaccttgatcacggtagagagaattgagagaaagtttttaagattttgagaaattgaaatctgaattgtgaagaagaagagctctttgggtattgttttatagaagaagaagaagaaaagacgaggacgactaggtcacgagaaagctaaggcggtgaagcaatagctaataataaaatgacacgtgtattgagcgttgtttacacgcaaagttgtttttggctaattgccttatttttaggttgaggaaaagtatttgtgctttgagttgataaacacgactcgtgtgtgccggctgcaaccactttgacgccgtttattactgactcgtcgacaaccacaatttctaacggtcgtcataagatccagccgttgagatttaacgatcgttacgatttatatttttttagcattatcgttttattttttaaatatacggtggagctgaaaattggcaataattgaaccgtgggtcccactgcattgaagcgtatttcgtattttctagaattcttcgtgctttatttcttttcctttttgtttttttttgccatttatctaatgcaagtgggcttataaaatcagtgaatttcttggaaaagtaacttctttatcgtataacatattgtgaaattatccatttcttttaattttttagtgttattggatatttttgtatgattattgatttgcataggataatgacttttgtatcaagttggtgaacaagtctcgttaaaaaaggcaagtggtttggtgactcgatttattcttgttatttaattcatatatcaatggatcttatttggggcctggtccatatttaacactcgtgttcagtccaatgaccaataatattttttcattaataacaatgtaacaagaatgatacacaaaacattctttgaataagttcgctatgaagaagggaacttatccggtcctagatcatcagttcatacaaacctccatagagttcaacatcttaaacaagaatatcctgatctgaagaatgtggaggctttagtcccttggatacttgggaggctgtggaagaacagaaacgagctggtgcttaaagggagggaatttggaaccaatgaggtattagtaaggacacaagaagatgcagatgagtggattagaaggaaagaggctcagaatgtaaggaaagcaccaaccacaacaccgtcgggacagacgagaaacatgggaagctccaccacaatcttgggttaagtgcaactttgatggggcatggccaacagaaggattaaaatgtggcttagggtgggtgcttcgcgatcatacagggaaggtgttatggttaggtgcaagagctgtggtaaaagtaagaagcgtgctggaagtagaagtggaggctcttagatgggctgtgctgtcattatcccgattcaattataggaagatcatttttgaggtggattctcagcaacttgtgtctttggttacatgaaagttatgcttgtcaagtctcaatccaattatccaagacataaagtatctacttagcaagtttgaggattttatgcttgtgcatacaagccgagaaggaaatggagtggcagatagaatagctaaggaatctctttcttttgagaattatgatctaaagttgtattctattgtaccaatttgggttaaaagctctgttgagctagactgtgtatccataaatgggtgaatggaaagtttgttgttgagccaaaaaaaaaaaaaaaaaaatcatcagttcatcatattggtagtcttgtttgataagttctgctttttttaccttccagttttgccatttgatgttgcaatgagatttcttttgctaatgttttaaaataacaaagttgttgctgctagtgtttccaagttgtgtttgctgaaattagggtttgtaacttataagagaagcttgatcgctgctttcgactaaagggaattcaataacaacaagtttacttgaagaaaaatattaaaacctagaagaaaagagttacacctacaaataggataaaatccacataaatttctgttactaaatgtatcatagttttgtttcttctatgtatctacatatactcaaaaatttcaaagcattgtgacttaagggccagaagaaaacttgaagaaagattaaaacctattagcaaagagttaaagatccacataactttctgttgctgaatgtatcatagtttttggtttcttctgtgtcatatatacagactttctacagaactttttgagcacaaagcattgtgactttagagccacgagtaaaagacgaggcaaaatgtgtatcacgtccactaaccatataaactgtttcggctggaagaacacggttccactcgaatgactgatcttcgttcaatactctctctttctttctgtccacaaagaaatatccttcgtgaggcattcttatatgacccctccgaccactttcaaccaactcggttctcagtattttcacttgatccgtcgagttcacatccacctcaataaatctcttcagacctttacactcacttgaagctgccaccacatatactttaatcttcttcttcgggtcagtgatctctttgactgagtttgacgctggagattgctccatttgaggcacttgaaccgtcacagacgaatcttgaatcttactggtctcttggataacacgtctgggaacaatcacaattgtatccaagggtttaacactgttacactcgtatgactgatcttcgttcaatacttgattattgtgcgtaaagatgtacccttcttgagccagtttcataagacctctcagtgttttcacctcatccgtaactttcacttgcaccagaatattcgttgggacttcattcataccaggatatggcgacacatatactagcatctgccggactcttttttttccgttagtgatctttttgactaagtttgactgtggaaattgcttcgttggaggcacttgatcgttgttgttcttactcgcaaacttcacagacgaatcttgaatgttaacggtctctttgactgagtttgacggtggagattcctctgtttgatgcgcatcttgaatcttactgatgtcttgggttgtctcaggccgataactgtaaatctttctgatctcttcctctgtcaaaggccaatcttgctccgcaaagtactcttcaactgaaatccacggtgctggaggagattgctctgtttgcgggatttgatcgtcgttgttgtgaatagggttcacgtcaggagagacttcgagttggatttgagaatcgtggaagatctggcattggtcgaggttaagatcttctcgaagaataaaaatgccgtcgacgataagggtttgtttcgaaactgggacacgttgagacttctcgatcttctgtttgaccactaacaatgtatctgtgcgttccacttcaatctcgaacgatgaaccacccagaatctcgaccacaaacttcatgactctatcaatggtgtttcaagatcaatggagactaatgaagaagagagtcaagaaacagagagagcgagagagaaagtgattgttttgtaaagatagttcacgatagaatttggttttaatatcattcattcacatatcaaatgaaccgcatttgggcttgacccatttttattgggttacgtggctcttaagtcaatgaaagcctcacataaaatcatcagtatctatgctacagtatattcttacttatattatccaacggtaatgttataaaaagattgattaaaactatctagatccgacccattaaaccgtaaatctacaaatccgacccattaaagattcttgccggagacgaaaggtattccgattgaggagatgggtcaagtgtggaggtcacactggtattggtcaaggtttgtagaggatgggagtatgggaatgcgcttgagatggggaagagcagtaattaagccggaacgaagcatgtttgatttatcattgtttttttaatgagagttttaagaaaaagaaaaaaaaagatttgtaaatgtcgtagaggaaaaactgtactagcctagatatatatattagtgtttatataagggtaaattgcaggccacacccgttgaccatgttttatttccatggattgttaaagtcaaatgtggttttcaccatttgtcttttcgcctgcaaaatgacgtttctgcccttgcgcttctctcttagtaactgttgaaatgtacggtttagtttagcaggtttagttacgtacactgttccgattcagttgaagattttttgtttcacgttgacgcgattcggttccgttacaagtgagattattttcattattccgaagtgacatcaacatttaatgccccaaaaaagtttagatgtgactattgtcacaattaatgcaaaatcatcattacatcaaataatattaaaaaaattattgataataattaataaaaaattaagaacgtacattgctgttgaagaagtgttgatcttgtttttgtaccaagtttggagccaaaacaagcattgctcgtgtaagtaatgaagttcttttaagaagttttttgttatgtcatattaggatcttgattgtgttttaactccatttttttatcagaaaatttgcaaaatctatatttgtttgtttaaaatagtcaaatgataattggtatttaggtttataaatgtgtagtatcgacattccatttgttttttatatgtatagtatttttcagttgcatttaatgtgtgtctcctgaatttatgatgcaggtgggttatggatattcccgtatttactatggtcggtgagtggaaatgcaaagaaggagaatggaaatttgaacctgaggaaggcatctttggtcgttgtgtacgcgttcaggaaaccatgacgtacacggactttgtccgtacactccgagaggctttcagtttgaagtccaccgagatcaatcccataattagctactggatgccgggagaaatgtcagtgctgatagatactaaacgccctcctgtatacattgacagtcagatgggtctcgaaacgtttttttttgtttgtggtgggtatctttctctcaacttgttcgtctctttcaataatacagtgaaggcgttcgggaatactgtctctaggtctcatggtgaagtttctgaaagtgaccgtgtgtttgatagtgctacaaatgttgatgaaaataatgaggatgcagaggagcaagccgatgttgaagacgatacaacagaagaggatgaagtggaggagggcaacgaagatgatgatgggtgtgatgattatcttggtgtggatggatctattgggggaagtaccatgtatcctaccacagacggtagtgaaggtattggcgaaaaatacgattacaacaagtggaacgatgtaatagtagaagaatatgtataaggaaatcttgaggaagacgtcaatctcactcaacagactgctcaacatccaggggaattcagtcgtttattggaaacgtgtacgtacacgggtgttagtgtacctgacggagatacaagagaattcagtcgtctcttggaaacgtgtacgtacactgatcttagtgtacctggcgaagaaacaatttttccattgggttacggtacacgctgcgaagggcaaaaggattccaatcttatttgtatagacgaagttaccggggatgaagtgatcgacggtattggagcttcctcaactgggacacagaatgataatggggtagttaccgcagctgaggcttaccaagtgtataatgaatttcctaagttacatggtggcgagttggcgaatctcggtaacgatgctgctcctgtgttcgatgacttactcaattttcgagctgatgagacacaggttgaaatcagcaccacaggcgaaactttgtttgttggaagtgtttttaagaatagaaaagtcctgcaacaaacaatgtctcttcaagcgataaagcaatgcttttgcttcaagcaacctaagtcatgtcctaaaacattaaagatggtgtgcgttgatgagacttgtccatggcaattgactgcttgcatcgtgaaggattcagaaagtttcaaaatcacttcgtatgctacgacacatacgtgtaacatcgactctcggaagaactacattaaacatgctaattataagctcctcggggaagttgtgaggagcagatacagttctacgtagggtgggccgcgagctgtcgatttaccacagctgctcctaaatgatctgaatgtgcggatttcatattctaccgcttggagagcaaaagaggttgcagtggaaaatgtaaggggggatgagatagcaaattacaggtttttgccgacctatctgtatcttctccaattagctaatccgggtacaataacacacctacactatacaccagaagatgatggtaagcagcgcttcaagtatgtctttgtctctcttggggcttctatcaaaggtctgatatatatgaggaaggtagttgtagtagatggaacgcagctagtcgaaccttacaaaggatgtctccttattgcatgtgcccaagatgggaacttccaaatattcccaatagcttttggtgttgttgatggtgagaccgatgcttcttgggcatggttttttgaaaagttagctgagattgttccagacagtgacgatttaatgattgtctcggacagacattcatctatatacaaaggcctaagtgttgtttacccgagagcgcatcatggagcatgtgttgttcaccttgagcgaaacctctccacctattatggtaagtttggtgtgtctgctttatttttcagcgctgccaaagcttatagggtcagggatttcgagaaatattttgaactgttaagggaaaagagtgctaaatgcgcaaaatacctagaggacataggatttaagcattggacaagagctcactgtagaggagaacgctacaatatcatgtctagcaatagctctgagtccatgaatcatgtgttaacaaaagcaaaaacttatccgattatttacatgatcgagttcattcgggatgtcctaatgcgatggttcgcatcgaggaggaagaaagttgctaggtgcaaatcttctgtgacacctgaggttgatgagagatttctacaagagttgcctgcgtcaggtaaatacgctgtgaagatgtctggaccgtggagctatcaagtgacaagtaaatccggtgagcattttcatgtcgttctggaccagtgtacgtgtacgtgtcttaggtacaccaagctaagaatcccttgtgaacacgctctagcagctgcaatcaagcatggaattgatccgaagtcttgtgtcggatggtggtatggccttcaaacgttttctgattctttccaagaaccaattctacctatcgcggatccgaaagatgttgtcatcccacaacatatagtggatttgatactcattcctctatacagtagacggccaccaggaagaccactgtccaaaaggatcccatctagaggtgaaaaccgggtatgtactaacatcgttcattcatctacttgtattttgagtattaccatgcggagatttttaacttcctgtctttgtcacttcagaaaaagagacagaaaagacttttaccaaatcagtgctcacgctgtcgacaagcaggtcataacaagaagatgtgcaaaaatccaatctagttctggtgacaagtttctgagcctgccaatatagtgtacgcttctgtgttttctcggtgtacgtaagtttatatataatccacctgtaactatgtacgttgtgtacgtacgtttaaactctacgtttgtataactatgtacgtttttgtctgtgtacgtgttaaagttcatgtaataagggtacatagaggtggttgctcaatattttgagtaatttcaaataagttttttgaaaatctaacttattccccctcttaaatgaacggagttggagacatggttgggtatactgtggttgtgttggtatttaatggaaaggacgtaactgttgatgtttattgtcaaatcaacgtaataattaccctatatgacggttaccaagctattaccaaaaatttgaatcaagtgtagttggaaccgcattaataactgtagccgttccagatttcctctatttaagtctcctcccttccttaattttatccacaatcctcattttaaacccatttcttgtgccggcagttatatcattcacaaataaaaatttagtctttcgattcgcttgttcttgctatccgtgagatggaggggtttcatatggtctcagaattgtgtcctctgatcactgggtggcgaatttatgtctttgacttgagagtcttcaagaaggttatatcgcccaacgtcttcgaactcggccttatcctggcagattacgcggtaatttccgtcaaatcattatgtgtttttctcgttcattcgcttaacttgtatattaaactgtctactatcatgttctgtatgtaaagaataaccgtattgaggccaccgttgatcgtcgccttgctccgttttacgaagaccgattcgttgaaaatgagtggaagacgatcacctctttcttggtccgtaagtcaactgactcagtcagagcaacaaagcatgaatacgacatactgtttatggatcggaccgtcgtcgttcaggccccaccgagatcaccaccagttccagatttcgatttcactcccttcgactacattttggagaaatctgcttacaagaacgttttagtcggtgaggaagaataactccgatgcttcatttattacatttttgaaaatttttgtttattatctttgtttctccatcatctagatgtcgttggagcgttggttgatgttggcgcattgactacagactattacggtctcaaactgagtttcaagataaaagatagatagtaagtgttcttttcatttgttttatttacaatgtcactctaaacgctaactgtccatatttctaacgtagcaatgaagtcttggagtgcgaagcccgcaatcaacaggcggagtacttggatggttactttcagagtttgggtaagggaaattttattgtcgcactcagcttttggcgtctaaccgaactgtctaacccgaagcttgagagccatggtgctatttcaaaggtggttgccaatccggacagaccagaagttgcggatatctcgatggtggttttttagctagagggaatgaaccatttgtaagaccccgtcccggacgtctcgtcgtccggcgacgtagtactcaagttcgcgcctctctccggccgaacctcttaattttttgcgattcaacatagaattgcctttacgaggctaaattctataatcgctctcttattacacagcggaagtctttctaaccttggtttaattctaaccaactcttgtaccggtttcatcgtctttgtcccttagacttagatctatcctttactcggtcaagacatgcatatgttcgctaaccattctaagccaaacaatcgcatattcctttatcctactttcacggtcaattaccaaacgtctatcttaactaataagctagatctttacataccttggccaatatgcgtatttgattccttagcccgtttgtcgccttactctattcgttcaacgactcgtcatcggtcgtgaattgatgaaccaatccctatcgttacttagccatacaaccaaccaaccccactggtctaagtacaacgatagagattggggattgtacgattcccttggttcacgatggtcgaatcaagctcttggcttattggtccatccgtcctccaaacgtactccccttcggttccatggtggacgattgagcccttggcttatcgaaccatccatgtttccgatccggtcatttactacgaccgcccacggtttactaaccgtttatccgtccggtttatggtggtcgataaagctttcggcttattgatccatccatacgattcgaactatatccttatcacacccaagggtccgtggattcatccactggatcatcgtaggctagcccatgaaatctttcttccgtcggccttaggtttgctcgcgggtccaacatccgttttgtccatcggttcccaccgtagactttcccgttggttatccgtcgagtcaccctttggtcttaccgatctctgatcggtttcaccatggctgaggagatagatacatgaaggcggccgcgatgttgatcctatatggtgaatcacgttccttacccattcttggtgctttctccctttaccggtaagattgcatccatgggcgacccttgggtgtgctcggatgcacttatccttgtgcttcctcgaacacttttctcgatccatcccatccgatgatcggtctgtccgtcccgttctgtcagacgatcggcctgtcccatctgacccgtccgacgatcagtcagtccgatccgtctggccgatccgatccgtctggccgatccgatccgtctggccgatccgatccgtctgacgatcggtctggccgatccgatccaacgatcggtctaccagatccgatttgtctctaagacgaacggtctaccctctccatcatctacactccatcgaaccgttggaccgggaggtagcatgcgcatcagttcggtcgaattatactcgccgagccgcaccccctttccgaccaacaactctacgatgtgttgggactcctttaagaatgttttatggtgttttggatgttgtgagatgatgtgagattatttcaaaggccttgggcgtcctcccttatatagggggcgaatggatgcttcccgaagcatcacatccgttccttgcacccctccgaaaggtcacatccgttccttgcacccttccaaaaggtcacatccgttccttccaaaaggtcacaaccgttcgttggtacccgctcgaccttacaccttttggccgagacaccttttcacccgtgagctaccacagtccaccagctcgagtgtcagctgaccagaccacccagctgggtcagtacacgatcagctcaccgagctcagtcgagctgtcggtcagctcatctagctgagctagctagtcttccacctggttaagctcacctagcttagctagctagttcatcctagcttgtccagctcacctagctggttcagcttgaactttctcgttcatccgactaagtattttagtccgtttcttgaccatggtctagttttctcctaaaacaacttggcctctttatgaacgcgggacgcggtcgttacatgtctaccccccttaaactgaattcgtcctcgaattcggctggtgtaagatctgggttactccctaactcgggacacaggcgttacaccattattctccgttttaatataatataagactacatttcaattaagttttctttcccagttgttgttgttgtttccataagaaccaaactacatttcagtcgttgttgtttcctgtttccgtttaaatgttaatctaatttgttgttttatgtacatgccttgttttatagttcaaatcctctcgcaatgtacgtatagtttctggtgtacgctatcgtgtacgtgtattagttttggtgccttcaacatcaaaaactattagatttatacttatgttgtgtacgcaatttcccaatgtacgataaaccaagtttaatgtactatatagtgtacgtacacgaagacatctagtaatacttaaaggggtaattcattcaaaagccagaaacataaaaaagacaggcagtttatataaagggaaattcataagataaataaactggaacgaatcaaaaaacataattttttcaacgaagcatacacatgtgttgcaaaatatgtgtgcatccgtcatacacagaatatagcaatctccctggcgtaccagtagaaaaaacaaaccctgcagccatgatggaacgtgcattgccctacgcaactcagcgggtggacaaacctccaagacctttcccagcggcgagcattttcagtgtgaagctggctgatgtgatacatcaccatctctgcaaccgcgtggccagcttcaagggtgggtgtcatttcccagaacttttcgctgatcgggaggaaatccaagtgattaccagtacacgtaaggaacaaaccggttgcgaagcaagcaaagggatcagataaagcgaccgttgtcatgactgaaaggccctgagctactgtcacgaagttgctcgcttggcgaacaccttcaaggtaaaccgccgggatggatccacgttctacaagcagctcgaagtatggccggaaggtagactccggttggagtaacgacggccacgtcatgaattcatcgattgcaagggtgttgatgtcacaactgttgactaagttccttagcgtctctatgggagtctggctgacggggaggtagttgacaagtatgcttatggggtttggcaattggattcctaggtacaactcggttggaggggttagcggaggtaggaaaggcattgtttttcaaacgaggaggtttagacggattcgtgtattcaactaagtgtgtttgacatgagttttaaagaggggaataatcatcaatgtaagtgggtgggtgacgtggatgtatatttagtgcatcatattagtaacttttaatttaaacaaactactgtgtacctctcataatcgcgccgtgtatgtctataaaatactcattacgttttcttacagaaggttgagttaacgtctgtttgtattgcatataagtggaacaatatggcttcatgtatagtgctatattaggggtcaacgcatttactaacaatcttttcaaataaacattaacttacttattttatctgccaaatcaattgagtacgttgctcgggaaccgtgtatgtctaatagagatattaatgagagtgtgatggaggtcacttctagtgtgtatttgacagcgagtaattaatatggagcgaaatcttctagatatgtgttatacgacgtcaaatcaaattttctttcgtcttcatttacaaactataccgtcgctcactatgtaatctttatagttggaattaaactataccacatgtacattatcatataccgtgtacgtagatattttattattttattattattttgtgttaatgatgtctcatattagagtagtttgagctagtatgtttgaatcaattacaaagtgataattattaaaaacaaacttccattactgataatcaacgtaaaaagctcacatattgttgcatgaaaaacttataaatatgacaggatcgtggcgaatgtgagctctacaggatctggctaatccgtttagcacacaaccagatgtaacattggttgcaaagattattgaagagtctcgatctcatgtaacacatctctgcgcattcaggagtgcttaagtcaccacattccgggtacgaaaaactgttagcgtatgtgtattttaaagtattaccatatttctttatatcttctagcacctcctcacaaatgtcacgtgcctcctccgattccaaagcataatggttgcttccgaagagccgaaggtagacaccacccatgtgagcattaccagcacatatgtaaagaattgcgcatgcaagggttgcagcggcgttccttggggagattcgctctaagtgtaggatagctccctgaatgtcagactcatgtgtaacgagacgcagtccttcatggtaaatagccgtggggttaccagcttgtaagcaccgtttgaagaagggtctatagcgaccttcggagttgatgtcatttggatcgtggcctaccgcgtagaagtcatcgggatcgtcgcacatgctgaaaatgtttgcatccttgaggacatccggacggtagacaatgtctcttccacgaggaccggatttcaacataggtccgaggtaccaccaacatttgtcagccattttcttggctatcttcgcaagcaaatcatcatgaatatttgggtttgttatatttaggagtaaggtgttttaacaaaatgaaattccaacacttaaataagcatcattgaagatatggttgggtaagttatggttgtatttattgcaaaggtattaagtgatgatgtgtattcatattgtcaaatcaacgtaatagtattccatatataatttgttattgttgttatgagcaaccactttttaataacagcttaaaactagacgtgtacgttttagtgtgcgttttagtgtacgtccacatttacatttctacatttgcccaacaaacagtgtacgttgtagtgtacgtccacatttacatttctacatttacccaacaaacagtgtacgctgtagtgtactatcagtgtacgtccattcataaatatcaccatttatgagacaaaccaaagacctcatatgtttgaatgtgttattttttagtgtacgttagagttgatatctcatgctagtgtacgtacatatctagttttccgagacaaacaaaaaacctttaagtattatttggtagatgcacgtgtacgtagttgtggacgcttagattttaatatccaaatttacatttacttcgggaactaaatatcatatgcgaatttggctgaaaaatattcaactttagattttaactatagcatttgactaacacgcctggcacacgatcagaggtaacagcggttgcaaacgttttggaaagctcctgataccatgtaacaatataaggcgcaaggaggcatactaattccatggctggtaggataagagaacgtaggaccatatgtattgttgtatgcagggtcaaacttctttatttccttgaagaaactcatcacccaaattcgagtggcaaccgagtccaatggataatggttgcgggtgaagagctgtagaaacaagtcgcccatataatcatacccagcacatatgaatacaatggcgcatgtaactgttgcatttgctcgtactggagcatgacgctgtaagagcctgatggctccattgatgtttcgttcatgcgttagaacacgaataccttcgtaatacactgccgtgggattattagctgcaaaacaccgtaaaaaaaatggtcgatgtcggccttcatcagcggatccggagggattgtggccccctcaagcttggaagtcatcgggcgagttacacaaggtgagaatattggcatctttgaggacatccggacggtagacaatgtctcttccacgagtgccggatcgtaccagtggaccaaggtcggaccagcattggttagccaggttcttagctatcttcgagagtaaatcgtcgggaagagtcgggttaaccatgtttgaaatgagatagtcagagatcgtcagtaatttcttcactttaataaccactactgtgaatttggttggggcaattacggttgaaatgaatgtcatacttgtgttagtaagcgttggctgtcaaatcaatttatcacttgagttatgttataaagttaatatgcagtgtacgagacatatagatatgtacgtacacatttacattatgtaattagaagtgaacgatgtgtacgacaatatgatagaggacactaaattaacttctgacaatctccaaattaaatgtagttgcaatcatatatctaagataggtttgttcataataattggttgcaaagaaccagaatattgttcttggacgattaaagcaagtgcacagtaccggcctcccgcttgccgtgctcgtagatgtcaaccgagtatttctgacggtagaaaaccatatctgcttctcgaatggttgtcaattccgaaaaagggtgtccaaacgcaagcaactccaagaacttcatcgtgtatgacccgcaatctcctgtagttgggttttgagcaacggtaggacaacgcacatactcaaaaggttcaactgagtacggagaaatcaatacatcctggcacatcgctctgactaagtacggtatcatttcgcaaataggagtcattctcgccttcacagccgactcccgcgtgtgcgatattaaagcgtcatacacagttattagccgttcattaaggttgattcccaaagcaacccaatgttcactcttccagttcatcggagcatacacaacatcgacatccttcagccacttcatattgggttcacggtttatgtgaactccattagcaatgtcggacagtaatttaccctatttgaacccgttcttattaatacacttcttgaagtcgcccacccgcttggtaagtagatgtgtcagcatcatgtccaatacaatacatctgtttgttatcatctgttccccgttcttgtgccacatcaacattgccatcttttctaaatgctgaaatgttcaaaaaatatatcagtgtacgtacacttccacgaaaaatttaatcatctatgtacaatttataacaaggaatgtacgaatataaatgaaacgtaccaaactttcgacccattcaccaggtgttagaaggttcgcaaaaaactcgttgggcactttgcgaaacccgaaaagagtgtgaatcctgtaaatccagaaaaatatttgataacaaccttaagacttggaaaaatgatgattgagatattaaataatccattttaatataatgtacttacacagagggtcctttaatgatattgctgaattcctctacttttgaagggtcaaccatgtccagggggttgtatgagacattttcagccctgataacaacctctatctgttgatttggtacatcgggcaccaagactgtttttgccttaaaaccatgaggatggacatcatcctgttcatagacaagttgattcttcactttttttgggacctttggggacgattttttttcttcttttgcttcgacagcaacagcattgtctgattcatcctgttaacaaatatgattgtcaacaacagtttcatacgtttttctatttttaaaataggtacatacattatttttaggaatatcggtcttgtctgcttcatctgaccctgggttaggatcctcagttcctacagacccctcgacaatacccggctcttccatgactacctgtccaagttaacgtacacaagtctatataatgtacacatataatcctatgcatgctatttcgaaaataggaattaaaacacacaaattgttacctccacatcagtagctgcagccaaatcaccaacggctttggtatccaactcccgtatgacctgcataatataaattttatacatttgaacagtaaatagtacattttatttgttgcaagagttagcttacattgttaactacttgaaatggtgacgggggatcactgtgggtcttctcaggtatttcaacttccatctctgtcactaatttggattctcctgccgcctcaacctgtagaatttatcatcggaaagaaactttttagtaatgtatgaaacaatatatatgtacacaaaacatagtgacaaaaatgtatgtacacttgtgccaggtacgtgagctgtatctccatcagaaggctcataagtttcttctgactcgctaccattagcttcagtcgatgcactggcatctcttgcttctttatgaaacaaaaataatttgcaaagtcttatgggcgtacacatatggaaaaagaacaagtgactaacacatacctgtgcagatgttgaaggtaaacctgatggattgtctaccatctctatgtcagcatcagctatttcatcggcccctgtatgggtaccaactaagccaggttcagcaacatcctttggtccattatcctgaaacataggctaccatagagttaagcgttagataagtggagaaattaatgtaatatatatgcatatagtcatggaaatctgtatataacgattaccagaagatctacctctgaaactcttgcatacacattagatggaacttcttccatctcggtgtcaacagtagcttcttccacaggcctctcttcctgtgtaacatagacagtcccagacattgaacctaagaagacagtcttaccaacaacaacatttcctctatcctgaaacatagtttaactaacttcttaagcgaatatgtacgtacaccatttaaacagattgttaagagtattagtagacgacataccagatgggattgtgtggatccagcataaggaactattaaaaatccagtgtctaatatctcttcttcagcggccgaagaatccaatccatcatttgcagtaaaatcactttcattattagcgccatactgtatcgaagcagacagtacagttatacatatggattataaaatatttagcaatgtacgtacatgacttacctgttcatcaatgaatccttgcatatcttccttattggaatcaggtagctcagtagtgtcaacagcaaaagaaacatttttcttcggctttgaaggttttcttcttccgccgacagcagtggtatgtactccagggatatccaaatcttcctctttggaattacagccaacagaaagtgcaggagtgtccacatcatgagaaacacgagtcagccttgaagactttctcgtttcagtgcttccttttgtagacatccttctcgatggcttcttcgcagtaaccggtgccttatccatagaagtaggtggttcccgcgaatcatgggaaggtatggtttgttctggccttttgccttttggatcaaggacagcacgtatctggtcacggacaaagtctttcatatcttcatgcatttgatacatttggtcttccagctccttgaaagacctcctcatttcaacaataaacctctcaggcacaggctctccaaaacaatcctcagcattctcttctttatcacagtccatttcagatatctgttttttcatagcaggttctttagggctcgggcccggtgcatttcgtttcctcttaacatctacaatagaccagttgctgctattaattggttttcttctgggtgcaataccaaaaaaatttgtaaacaacctttatacttatacttacctgtctcttctagttgtggtgggcgcaactgctttggtactctagcatagcctccaacccattcatcctcctgccactggtgcccatctatcaacagtgcctcaatgtaatcaacccttggatcatcaacttcatcatcccatgaaagagatggaggacaaacattatcagctggtttcacaatatagttgacctcaacctacacaaataagtatgttaaccatagataatgtacatttacttattatgtacgtacatacacaatttaacacacctcatcagcagcctcacactccaaaatgcgagatgtccggattgctcgcagagaggcaagacgatggatagacctctcagcaaatgtcctgttaggtacatcatcaggtcctagcttagcaattgatgggattgtttcgaaagctaaaagatggagagctaatgagaagccatggagtgcataagaccctacaagtaaaccccttattagttattgagcatcgtaaggagtttggaaatttgctatcctccccaaagtacgggtaaaggacacccttccccatgggtatttgcagaagaactccaggttcttagtcatctcgacagtcttcgaagtaggcctgttggggttactgtgggccgctaccacaccgtcaaccaaaataaaaagagatagtgccagttgcttccacccctccatgctttcctcctcctacagccagctcaccaaatcagcaattgttggaaccgtgtcccaaaacctctcatcaaacagagtcttccaaacactctcacactcaggtttcacactgataacatcatcaacgtctttcttcttgggatacttcccacattccagcccagttaagatactaaattctcttaatccaaatctgattggatgaccgccgaatacaatccacatctcattcaccttctttgtcactaacttacggcatattagtctaaggacaagcttagcattgaaagatgccttgtttttgggtattttaaaaagttccccaaatggagaatcgagaagaaactgcatctctggtttcccctttagtacatttgctatgtcagaaatgtactccggtttagagtacgcgttcatcttcgtctcggaagggtaccggtctaaagcaaagagtcttggtggtaactcttcaactgtaagatcttcagtcggagcaacacttggactacctgcaattaaaagtcatatactgttaagcaaaccgaagtagtgtacgtacacagacattttccagattataactcaaaatcatatttttggcggaaacagagatttccaattctacttctcaatttttcatcctaaagatatgctaaattccgacaaattctaaccccttaatcaaacaagctttacaattctgatacacccaaagacaacaaacggtaaattagagattctaacccagttcctccgttgcctttgtcgcagagcgttttctccgcggggaaactcttaatacccgcttctccttccctggaccatgctgcttcctcgggacttcgtcgttagctttattcccagccatagctaaagatgctatctcgccggaggttcaaatttcgccggaataaacagtaactttctcttggcttcgccgagaaaaacagtaactttcacttccccggatgtgggagttcagtggctcaattcaactatccaacaattcgaagttatgtcgaattttgaagcaatggatactgaatttcgtttcgctttctgattctctctcaaatctctccgttactctcttctctttttcgttttctcgggtttcttcgtttcagtttttttttttgtctttttcaaaactgaaccgcatcaactaaaccgaaaccaactgctgtagggtttggtttacgccgtcaacttaaccgatacgaactgctgcacggtttggtttgtgccattattaagttttcccagggtaatttggtccgaaattgaatgaaaagacaaaacgtgaaaaccagttctcactttgacaaacggtgagagcaaatcttttttcgtccacttctgtgaaaatttctttttatataattcaatatcacatggtgaaattatatatgcatatgattcttctttaattgtctgtttattgttatactcttacttaagccaagtgttttctctttgattcttttggtaaccttgtacataaaattgtatgaatgaatgaattattgggatagatggactggtttaatttggttaactccagttaactagatttcggtttaagattaatgtgaatagtatataagatgtgaatgtaactaattttagtttaagctttgtaacaatattttgagttgataataaacgtttgttacatctctctcttctccgattatagccccgatcatcggagttcaatatggtatagagctatatcgttgattgataatacaatgagactaagtgagaatgaaaaagtttgtagctgtatataaacattgatcatctttataatagggttatgcataatattgtgagtagaaggcaatataaaatcttcaagtacattgagaactaggtcgatcatcggattaggccattaggggtttgcttctgagagatggttaacaatttggtttaattaagtaaaccggtcggatttggttcgaatttaaacaaaaccgagattttgaataaaaagccctagtcttatcacttttttctacttgttgaaatgcgatttcattcattagggattcggtttcgttgaaatgcgattttagcactggaaaagcataaaccctgaaggatttcaccgacaatggaataagggtaagaccatgtacatagtaggatttttatgagtatcagaaacccaaaaaacattaaattaatgggtaaaacaactgatttgggcctaagtcgtatcactggagagatacttctgatactagtttttgatgatttggcggcttgtgattagtcggcaacgcgtttttgtgggaaaggagagaaaaaaaaaatcatttgctcttctcttctctcctcttcagtgcatcttgatacgattctttttcaatgaaaacgagaatcatcttccaaattcagatcccttggaaccttaatcgcaaattctctcacactcctttatatctacgtcggaggcgcttctcttttaactgttctcttcaatcggactgtctccggtatcgttgtagtggccgatgctagcaggtattttcgattttgcaaatattttttttcaatgatatcattacggatctcatcactgaaaacagatttattatcagtattataaaaattctcaaacaataaataaacattaaaattaatagtaaaaaatgttatgatactttatgaataccaactatgtgcatggtctaagtttctttgttttgtattatgtatggattgattaaagctgtattataaaacaaacaatgatccaactttaaataaatatttaaaaattaaaattctactaccaacacgagttacaatctagtatgcttattagtttattatccctttttataaaatctcaactaaacaaataacttcatgaaataatgggaaataatgagctatttattaagaaaatagaaaccaaaaccttaggtaaaatgtaaataatctataattatctaaactaacttaaaaaaaatagtaaacacattgaagataataatgaaaaatttccaaagataataatgaaaagtttccaaagatctcgtcaagcctcatcttcgcaacgacgacggtggatattgctcggtttgatcatcgttgtggttgctctcaaccttcatgctcaggccgataactataaatctgtctcagctcttctgctgtcaaaggccaatcttgtctctcaaagtactcttccgctgaaaccaatggtagtgctggagattgctcggtttgcggcttttgatcgcagtcgttgtgattagggttatcatcgtcagatgagacttcgagttggatatcagaagtggggacgatctggcattgttcgacagtaagatcctctcgaagaataacaatgccgtcgacgataagggtttgtttggaaacaggaatatgttgagacctctcgatcttttgtttgaccactaacagtgtatccctgtaatcaacctcaagttcgaatgatgaaccattcagattctcgacgagaaacttcataactttatcaatagaaacggatgaagaaaaagagagataattaaagtgattgttttgtagagaatttgtttagtatttatatcatttaatgaacgtattaaatagaactcacttgggcttagcccatattaaccttctcggttacgtgttccctaagtcaatagcctcctcgaagaatctaaatcttactaaaattatccaacgtaatgtttttaaaaaaggataaaaattcgaatgtatctgttctctttctccagtttccaattcgcatatcaattctacaaacttagcttaattcatcttcattattcaataagaacaattttcatttcaaaattctttgtaggtaattacatgtcttagaatatatgaagaaagttgtgaaaccaaaagcaaactttgcacaaagcaagaaacttcaagaaagactataaaccctaaaagaaaaaactaataaaaccaaaagtcttgaatttgacctaatagagccacggatcgggaacgatctcaacaatatcagtgtgagcaacactgttccactcgaatgactgatcttcgttcaatactctccctttgtgtacgaagaaataatcaccatcttgaggccgatctaaatgatcccttagttcattctgaaccaactcttgtctcagcattttcaccctatacgtcttgtacgtaataaaatgaagattcttcgcagctttaatcttgccggaatatggcatcacccgtaatgttagtattatcttccccacaggcgaatcttgaatgttagtgttctctttaaccgagtctgacggtggagtttgctcgttgtttctcaccggcgaatcttgatgacctttgatgatatcttttgctgcgtctgacggtggagattgatcgttgtttctcaccggagaatcttgaactgggcaaaaaggtcgaatattcaaaacaacttcagttgtcaaaggcaaatcctcaccgtaaatgagatctccgattataggaggttgctcctccgtttgaagaacttgatcgttgttgtcattagggtctggaaggacgaagagtacgacatgagagttttggagaatcttgcattgaccgatatcaagatggtcttcaagagcattgccgaagaaaagggtttgattgggaacagggatacgttgatacttctcgatcttctttttgatctccaacactgtgtcccagtaacctaattcaatgcaaaactttctgccattctgagtttcgaagtacacatccataattctgtcaatggtgtttcaagatcaatggagagattgatgaagaagaaagtgaagagcgagaaaagtatcgtcactgaatatgggacattttatagtcaatgaaagcctcgtcactgaatcttcaccgtcgttagttccttttaccaatatgatccaacggttgtgtaaagtaagcaattcttctttgttctttgtttaggttggttttccctctttgtgatttaaatgtaacttgttattcaagtttccgattttattgtgttattgacttattgttggccttgttagatagagaagaaaataatctactgtagtgattaaaatcactacttccttattatatctgatgtgagtgaatcgatttgaaaaaaggtaaatgatgaacgcaccataatcttaggactctgctttttttttcctttttctttcttttttactcaagtcaagttatcatctctttctgaagttttagaagtggtaaaaattatagtattttaccattgatgttgtagaaagatgattttaaatttttttcttactgaagatgtaaaaatatcataatctccacagaaatattgggtgatttttgtggagaaaattccatctcttcccctcatttaacaaaactcatagacaagacgaagggctcaccttatggtttgccacggaccaccttagctctcctcgataaaggcctctgctttctctctgttttctcctatgtattggttcatattttagtctaatttttatattagttttcagctaaagaaccacattcattggaaaaaaataaaattcgtcaaaaatcataatttaataaaaaaaatagaactttagaaaagtttttaggtttgtactatatcactaattcaaattatactaagggtatatatgtaaatttcatataaatttttgtaacaaaaccctaatttcaagatgataaaagttatatcgccgccacaacatcatgattcaattactaaggatatatctgtatatttcatatggatttgcatagaaaaaccctaatttcaagatcataaaagtttgtacgcagccacaacaccaaatcagattctacttgaggtttacataagaatctaggttataagagtatgaaacacccatattcttatgaaatttagagtcaatttcatttaaaagaaaaagcaatggatcattttacaaggtaataaggaagaagatgggtcatgggccatatagtattgtaataggcttaaaccaagtttagctgtgttagattagggtacttaagtcattaaccctcatagtcgaatcttggtgactgttgttgatgcctcccaattttatacgcttcacagacggaccttgagtgttggcgatatctttgaatgagtttaacagtggagatttctccggttgaggcacttgatcattgttgttgcttacaagctccatactcgttgaaacagggtattcttgaaagtaatcgatctctttggatgagtttaacggtggagacttctccggttgaggcacttgatcaatgttgttgcttacaagctccatgctcgttgaaacagggtattcttgaaagtaatcgatctctttggatgagtttaacggtggagacttctccggtggaggcacttgatcactgttgttgcttacaagctccatgctcgttgaaacagggtagtcttgaatgtaatcgatctcttcgtatgagttaaacggtgtagatttctccggttgaggcacttgatcactgttgttgcttacaagctccatgctcgttgaaatagggtattcttgaaagtaatcgatctctttggatgagttaaacggtgtagatttctccggttgaagcacgtgatcgtcgttgttgatcccaaacttgacgctcgtcgaaacaggggaatctagaaagttatcgatatctatgaatgagtttaaaggtgaagatatatcggtttgaagcacttgagcgttgttgggattagggttagggttaggttcaacgaagatctggatatgagagtggttgaggatcacacattgtttgatatcaagatgatcttgaagaacaactccttggaagattagggtttgtttagaaacagggatacattgatacttctcgatcttctctttgatctccaacattgtatcccaataacccaattcaatctcgaacttgtcgccactctgagtctcgaagaacacatccataatcgtattaatggagtttcaagatcaatggagagaatgatgaagaaaagagagtggagacagagaaagtgattgttttgtaaataaagttttactctggtttcatattttcactcatttaggattggcccatatataccttcttgctttacgtgtttcttcttaagtcaatgaaataaaatagacaaagctctcatattagttgttaaatataaatatgcaagttagttgactaattatttactttttagttataaatttgtttttaatttgtgtgatatatgtatgtattaaaactaataccaaaatatgtaaatagtctatagtagaatttgggtaataattttattttttttgaacacgcatttgggtaatattttaaatggtagaaaatcactctgaaagcaacacgtcacgatgcttatctaatttgttcatctttattttagtgtattcaaaattagcttaatttttttttctacttcatctacctcacaatgaatgaaatgaaatatatgaataatattttgatatttttcatcttatttgggaaaaattaagtattttatataataaaaaaatatttatataaacgtgtaaccaattatgagcttttagctgtgaaacaaaaaataaactttgagtgatggagttgacttcaagaaacactgaaagctataagaatagaggagagagcatcgttattaatggtctcttaaaacaactcttatgttaagagacatgtcttataactaacaaaagtatcttaaataagacacttttgaggtagatgaagataccaataatgatggtcgttaaactttcaaataagataaaatgaaaaaaatgttgttttatatgcgaactttaaaaaaatggccatttaatacataaactttttgtatggtcaaataaaatatgataaaaatgttgaccggttatttcacacaaatgttatagttgaccagggcaaaatctccatgacgttatcttgcattaacggacgcgataactctgttagcacatgttaattagttttctttaatgcctaaaacgacgccgtttcaataaaatcgaaacatcaaaatttccaaatcgatttttgaaatccctaaattctaaaaatcaaatccctagttcctagctactttgaaattatcttgagaattgatcggaaaagctaaaggttatgattactatggaacatgattttctaatccttcctacttctttccatcttcttaatcatcttctcgctatctctgcttcctccttctttgtgtttcctttttttttttttgcaaacaatttttggtttccatctgcatcacatggcaacaacatgttcttctttggaaatctcaatcccgttcttccaaggttttttcctcactctcataattgtatttcatcatgttggaacactgattaattttaggtgaatttccattgttttttatttgttttgttttgttgtctcttgtgtataaaatgttaggaacacacacacatgagaaccaatttgaatatgaataaccacattcgactattgacagcagttgttcgttttaatttgtgaaggaggaggagcaagatcgatgatgaacatggaggaacgtcaaaaagaaggccatttaaggatttggtctttagaatttaggaattagggatttgattttaattttagaatttagggatttcaaaatcgatttggaaattttgatgtttcgatttaaatgaaacggcgtcgttttgggtattaacggaaactaattaacatgtgctaacagagttatcgcatccgttactacaagataacgttatggggattttggcctggtcaactataacatttgtgtgaaataaccggtcaacatttttatcatattttgtttgatcatacaaaaaatttatgtattaaatggccattattttaaagttcgcatataaaacaacattttttccaagataaaatccacataacttttttgttgtattttggttctacgtatggaaaagtacaattttgctacatagttttttcttaatcctaaattgtgacttaagccacatggttacagagcccatgcatgtgtaagatgttcgaaaaatcatagttgtatcgttccactacgaatgactttaagctcatttacaaaacctcaattaaacaacaattgcatgaaacaatgattattgtctaagctaaaacctagataaactctaaaaataattttataaaaaccattgatcattaattaaaaaaaaaagaaaaccaaaacctagataaactctaatatagtcttatataattatctaaacttataacaaaaatattttgttataacaaatatattgtagatactaatgaaagatatttggagattatccaaatatttcgatgcttcaaccttcacaagcttcaaaggggaatattgagtgttaacgacgctggagattgcttggttcgaagcactgatcattgttgttattattgttctcaacctttatgctcgtcgcgactttcatattgcttctcaccataattggcgaatcttgaacgttaacgatctctttggctgagtttaacggtggagattcctcggtttgaagcatttgatcgttgtcgtgattagggttacggtaaggatctacgaatactttgagaagagagtggttaaggatcacacattgttcgatatcaagatgatcttgaagaacattgccttggaagaaaagggtttgtctgtaaacaaggatacgttgatacttctcgatcttctgtttgatttctaacactgtatcccagtaacccaattcaatctcgaacttgtagctgaagacaaaatcaatccttttaagttttcattgatagtttgcttaactttacaagaggagattgttcttgcttaaatacaaagactgagacttagctaaaccctaaggagacaagacatgtgtcatcatcaagttgagttctcacaatcaagggctagaaactgattctccagcttgagggtaaatgtctttaccgtactgccagctccgtttatgtcattacttgggaagcttccagactcttgaacatttgaagctgagtgaccgttgcctccatatttgtgtcttgggcttatgtactgcgaagcccattttcatttgtttctttgctgcattagatgaaacggcagtgtattgacatttgccagagaaaccttctactctgtttggaggctttatctgaatactgttgatagtagccatcctgagtctcgaagaacacatccataattgtatcaatggtgtttcaagatcaaatggagagtctgatgaactgcataatctagttttatatcaattcacgtatcaaatggactttatttgggcttggcccaaataaaccttatagattacgtgtttcttaagtcaatgaaagcctcgttaatttaagcattatacatgtttttttttttttttttttgacatcttattataaacttctgatcttatttatacatcttgttatatgccagattatccagaaatttttaaaatgttatttagattacccggttggaaagttaatttggagaatgatctgatccctttttttgttgtcaagaggtaagtcaataacacacaagtttctctttttcagctcgttattattttttggtaaaatactaaaattacttgtcatagatcttcttaagcatatttgtagaaagctctgagacgaaaatacaatttagaagaaagcaagaaacttaaaaaaaaaaagactgtaagctacaagaaatgaggagattgcaaagacttgagcttcgaaattatagggtattaagagccaccggaaacacttccgttgaaaatctcaattgtgtcgccttgatcaacacggtgccaccggaatgacctgttttcatccattacattctgtttatagataaagaaatagccttcttgaggcagacttaactgaaacctctgttgaatcttagccaactctttcctcagctctccaacattatcccctgcgttcacgtccaccggaatcttcctagtcccggatttcggcaacaccattactctcagcttcttcgggttgttgttgttgttgttgttgctcattgggatcatcactgttgattcatgatgaccgttactggtctgttctgttgaatttgactgtgggaattgctcggttttgaacacttgaatgttgttacggctttggtcgggagaagagatggaaagttggatacgagagtggttaaggatcacacattgttcgatatcaagatgatcttgaagaacattgccttggaataaaagggtttgtttggaaactgggatacgttgatacttctcgatcttttgtttgatctccaacactgtatcccaataacctaattcaatctcgaatgtggaaccactccgagtctcgaagaacacatccataatcgtatcaatggtacgtgtttcaagatcaatggagactgctaacgaagacggtgaaatgagagaagatgctatcaactttggattttagtaactaacgtttccgcattatgtggtaagtgttaactaaacgacctatttccatgggtttttgatatttacaatcgtgagaatagtaaaaatacaaaatatctgtggaaaatctagactcaaattataattgtttagatctctcttttagtcaattgacttaactaaagaataatgtaatgtattagctatcttactttctattttgtttttgggaatggtttttcagaagattcactaaatctgaaaaagtctaaaaccaaaaccagcccataatgtttgggcctggccctattgagccttcttggattttaaaatacataggcattcggttatccattcggttatccattcggtttcggttatatccattcggttatcggtttttcggttctaaagtttagtatccattcggttattttgaaagcttggttcggtttcggtgtttttggttttaaaatttagtattcattcggttattttgctttaaatatttcggatatttcggttatttttggatattttcggatatattttagatattttcaagtatttttactattttatatatattctcaagtattttaattattaagtctagaaataactaatatttttgaaaatatatttatatttaggatatttttggttacccaaaatatttaggtttatatccattctgtttcggttatttcggttatagaatttagtatccattcgattagtttccaatttttgattctattcggttatttttatttcgattttagttcgatacattcggtttaatttatttgcccagacatagttgcatcttgcatgtccactgcgagcaccgttggaaatggaatacaataaagaattaaaacctcatatatatttaaataatctataatagcttgaataggttgtattatacgattctcttgtaaataatcaaaaatacgatgaagaaaaaacacaaaagttaccaatacaacgtgttcactttacgtaatctgattcctttcttctccaaacacttcaagaactatttacttttcttctttcatacataactcctacactccaaaactttcatgctcaaaatctccatagttttttttgccaggaaatcatcaaagcacaatgacaccagaccgaacaactatcccgatccgcaccagtcccgtaccccgagcccaacccatgaagcgtcaccattccgctagctactacgctcaccgtgtcagagaaagcctctcaacccggatatcgaaattcatctgcgcaatgtttctcttggttttgttctttgtaggcgtcattgctttcatactttggctcagtttacgccctcatagacctcggttccatatccaagacttcgtggtacaaggtctagaccagcctaccggagtcgaaaacgcaagaattgctttcaatgtaaccatacttaaccctaaccaacatatgggtgtttactttgattccatggaaggttccatttactacaaagatcaacgggtcggattgatcccattgctaaacccgtttttccagcaaccgactaacacaacaattgtgaccgggacgcttacaggagcttccttaacggtaaacagtaaccgctggaccgagtttagtaatgatcgggctcaaggaaccgtgggtttcaggctcgatatagtttcgactattcggtttaaactccataggtggatcagtaagcatcataggatgcacgctaattgcaacatcgtggttggaagagacgggttgatcttgcccaagtttaaccataaacggtgtccagtctacttcacttagaaagattgattggtttgttatttgctattctctttatattttactttccttttgaatgattttgctttctttacgttttgtaacttggatttgggagtttggtttttctcattaaatgtatgatctttgagttaaacatatcaaagaaatcatttggtaaaagtaaaaacgcaaagcaattggcagatagttcaatctattacctcagtcttcttgagtctggcaaacagaataagttatggtttcctcttgctcgaaatctgagcttcaacaatttgccttctccattgatgaattgggacctgaataagaattttttgtaagatgaaacaatgtttatcggaagcaaaagcagagtccggctctgtttttttatactggcttatgataaaaaatcaaagcaaacttgggatcttggaatcagatggaagtgaagactcaatcgaagagaaagagagatgcttacagcaggaaaaccgccgtaatcccctggttccgtaatgtttttagtaacacaactattagcagcaagtcgaacctatagtcggaaaccaaaaacggatttagatgaagcactgcacaatttcattactccaattatgtttctatttttttaccttggatacaatggagacatggtctcgaacagctactcgtcctcctagtgctacaaagtcaccaatcctacaaaaaataattgtcgaaaagacgagaagcttatagtttcaatcaacggaacataatagttatttggttgctgggattagaagcatttactctgctgatccagctatgcctacttggccacagaacaagcaacatttgccaataatcacattgtgacctatctgcaatatttaagtaaacagaatagcatctcagttgtcatttacttgtgatctatgggggagttgcaagatagaatcgaagagacacctgaactaagttgtctatcttagtatcatccccgatcacggtatctctccagctgcataaatagtaaaggatatggagctagaaaagagctttacagggaactagttcttgaaatattctgttacctgccccgatcaatgcatgtgtttgctccgatttccacacgattccctatcttcacatttaaagtctagggagagcaagaaacagaacaaaggataaaagtgatgcacaattgttatccagattcaagagagcaatctaggtgtgcttacttgaggcttcttcaccatgtttccgttgtcatccacgtaaaacccaaatcctgaacagttaaaaaccaatctcaattcaatgccaattctcagaagataaagaagaaaacatggacttggtccataccatcttgaccaatgcagactccattatggatgacacataaatcaccaatactacaattgctgactgaaacattatacctgtagacaagtatagattctttcaagattctcttcaaaaacatgtataagacattaagcaaaaccgttacccgatctttgtagaagggccaattttgactgatgatccaattacagtgttggatcctatatgaacctctgctcccaatatagcttcttggtgaaccactgctccaaactcaaccagagccgaggaatcaattagggccgaacgatggtacattcctcctccgtttcgccatcttagaaaacctttctcaacattacctccactacttgtctctaatcttgacagttacaacaaaacacaagaagtatcagcaacaatcatttacatagaatagtcaccacctttacacatataacatctttccaccatctaaatatcacaatccggactctttaatagcgtaaaatgtttcatgcaacaattgtcatcaatattcgttcatcacaatgctgttaaatcatatacagatcatgaacatctttcccaagcatcataataccacacatgtcagaccttatacacgaaactgatacgaatctaggaatttcactgcatattctcagaggcattccaacaaacaccttgcgtacacgataacttgataagataaatgcaaacaaaagtcaaaactttaaaggtacaaattcttaacaagactaaccgttatgtggagaaacattaacagtgacggattcagttgattgatgagagcaaacccttaaatttcggctactagagaaaaacctagaccgcttgttcaaaaagacaccatgagtggacactgagaacaatgttcgcaaactatttgccatagtcaacaaaatttatagagattcagaagaaactgaacaaatttagcgacacgaccaaaaaaaaaaaaactttgaacttgcttttttttttttccctccaaagctttaaactctttcttttaacaaaacaaattagaactaaaaaatcaacatttccatgtaatattttatactcaacaaacaatcttgaaaccgcttcatatcacttttgtaaacaatgttactcaggattggctattatgagttctaaataaaatctgatgacaaaaaaaaactattttgatgaatttataaattttatgattccccgaaacctttgaccaaatatgttttttaatcatattattatgtcaatgattacaacagcacattttaatttcattatctagacaggcctgcctaacctatggaatattgaagtttgaacataataatttgatttaaacaatcttaattatcaatgactaactgtagtaattagactttgaatcccactaattccaatgaagattatattaagaaactcaaagaagaagaagagcaaagaaaacaaaaacatgtcttcttgtttcaaatcctctgtttctctgttctcagttttcttgtttatgatcttgaagacagttacttcagatccaacttatctctaccacatatgtccaaacacaacaacgtactcaagaaacagcagttacttaaccaatctccgaactgttctttcatctctctcctctccaaacgcagcttatgcatcgctttttgataacgcagccgctggtgaagagaacgatagcaacagagtctatggtgtttttctctgccgtggagatgtctcagccgaaatctgccgtgactgtgtcgcgtttgcagccaacgaaacgctccaaaggtgtccaagagagaaagtggcagtgatttggtacgatgagtgtatggtaagatactctaatcaaagcatcgtagggcaaatgagaattagacctggtgttttcttgacgaacaagcaaaacatcacagagaatcaagtgagcagattcaacgagtctttgcctgctctgctcatagatgttgcggtgaaagccgctttgagctcgagaaagttcgctacggagaaagccaatttcacggtttttcagacaatctatagccttgtgcagtgcactccggatttgactaatcaagattgtgagagctgtttgagacaagtcattaattacttgccgagatgttgtgatcgaagcgttggcgggagagtaatcgctccgagttgtagcttcagatatgagctttatccattttacaatgaaactatagctgcggctccgatggctcctcctccttcgtcaacggtgactgcaccaccactgaatattccttcagaaaaaggttaaaaatcttgaaactcatagaacataatctagtaaaaaggttgttttgtttcatatgtttttgaaattgtgtttaggtaaaggcaagaacttgacagttatagttaccgcgatcgctgtaccggtttctgtctgtgtgttacttcttggtgctatgtgttggttactagcaagaagaaggaataataagctcagtgctgaaacagaggatttaggtaaaaccaaaacagaattgagcgagttttgccattttctagtctaatttgttgaaactttcttgagaattttcctttcttaatgtagatgaagatggtattacgtcaacagaaacactgcaattccagtttagcgcaatcgaagcagcgacaaataagttctcagaaagtaacaagcttggtcatggtggatttggtgaagtttataaggtaactaagtcttgtgacttgtgatcatatagtcatactttaacaaaacaaaaaaggtttaatgcttctgtgtaaaactcattcagggtcagcttataactggagaaacagtagcaataaagagactatctcaaggatcgacacaaggagctgaagaattcaagaacgaagttgatgtggtcgcaaagctacaacacaggaatctagctaagctcttgggatattgcttagatggagaagagaaaatacttgtctatgagtttgttcctaacaaaagcctcgactacttccttttcggtataacaaatcatcactcattcctctaaagaaaatatcggttttcggattaatcagattgttttctttttgtttgtagataatgagaagagaagagttttggattggcaaagaaggtacaagatcattgaagggatagctcgaggaatactatatttacatcgagattctcggctaacgatcattcaccgtgaccttaaagctagtaacatactcttagatgcagacatgcatccgaagatctcagatttcggtatggcgaggatctttggtgttgatcaaactcaagccaatactaaaagaatcgttggtacatagtaagttgtttcttcctcttgtgatcttgacacttcaatgagttattcaatttcccattatgattaaacaagttctctctttagtggttatatgtctcctgagtatgcgatccacgggaaatactcggtgaaatcggatgtctatagcttcggagtcttggttcttgaactcataaccggcaagaaaaacagtagcttctatgaagaagatggtcttggagatttagtgacctacgtaagtactgttttataaccaatcaaaaactctttttaaatactgttttctgaaacattataaatatctgcaggtgtggaagctatgggtggagaattcaccactggagctagtagatgaagcaatgagagggaattttcagacaaatgaagtgatcagatgcattcacattgctttgttatgtgttcaagaagattcttcagagagaccttcaatggatgacattcttgtgatgatgaacagcttcactgttactttaccgattccaaagcgatctgggtttcttcttcgaaccatgaaagactctagagatccacgctcaggaggttctgcttctgatcactctgcaacaagcaagtctttgcctttgtctgttgacgattcttccatcactatagtttatcctcgttgacttcaacaattagttccagtaatgttatgttgtaacttgtaactatgtgaaacaaagcaaaaacttatttagttatgtcctaaaagacaattacataaccgaaaaagctctaaaaatgccaatcagggagatttgagatttcctcacacaacattgccaagacagcaagcttggtaaagtacccgattcatatgaaccatcgagcttggtacagaaaaatataagtcaaaaccacaatcagaaattacaaacctctaaaacaaatgttgttgttgttatacagatgaaagagagactcgaaccaccagtgttaaccgtaacttaggcgagagtcgaggagttttgcggaagtttgtctgcgaggtattccaatctcacatgcattaactctagcagcaaaccgaagagagcatagagactctccagttgaagatggatcaggtgatatgttcacaaacattaaggtctttgagtcccctcctaaacatggctgtttaaaaatgattctccttaattagaaagagctagatagacagattatttgcataatgattcagaagtaaaaatgttatctaacctggagcagatatgttaactttgagtttctgaaaggtacatgatcctctttctttgccaatgcaaatataacatcactcaatgcagacaagcttttgtttatagcctgttgaaggaaacaacaaagattagagggaaagtccaaaaaatttatgggaataacttagaagaccgtattttaaaagcaaaaacctgtgtctcctttaaccggtctccggttgccccgctccttgaaagtcgctcacttccagcaagatcaattaggttaagaacaccttgtacttgctgttcagtgctctgaaataggagagagtgttggtgttttcataagtgagaaataaatctacaacacaaaacataaacctgaaagacaaaagatattaacctcattcacaccagaaatcctaagagtaaacacgaaatgacttcttgatgattgttcattcatatgcgtcttcccaacagacctacaaataagaggtttacgatgtaactatacagaaacgacagtgtaacaatattctcaaaagccatgctctttgaagaaaaaagttcccaaaacttatagacaaacctgctctgagcagcttgttgcaaaagtgaggaaatttgtccaatgctgcatacatctactattgtcaggtcgctaacatgagtgtttccattaacatcatgtgtgattgtatattgtcttccagatgtgctactgtctgcccgcacagattctatagcaatcgttcggcttgtagacaacaagtctctgatggactcattatatatctccaacattgagacctacaattaaaattcgatcaaaacaatgctaacagtgaaagcattcaacaaaagtcagaacattcttggagaaatatttacctgcatcttgtatttccagccttgtgtactaagactttggctggttttgaatatttgttcgagtgatcgagggatcagtcctttctgttctggtgtttcaggcctgcccatcatggtataggttttgccagaacctgtctgaccgtaggcaaaaatacaaacctgtgtccacaaagatttgagaaagatgcaatgacagaagaatcagtcaaagtgatgtctgtctcatttaaacaagagttggtgcagtaacaaaggaatcagtcaaagtgtagtctgcttcacataaacaggagttcttaataaattcaactacataaggacaataaccatgagtcaaatactacttctatctaactagaatttgcatcttaggtatctatctacaagaaagtcaaaacaaggaagatattgaaccttgtagccatccaatgcgctctgcacaagttgagatatttcaaagaatacttcctcctgagaagctccgtggtcgaagaccttgtcgaaagtgaaaggatgtttgttacctgagacccccaagtagcacaaggcaataaaaatgtattaaactctagtacagacatatcctaattgagcaaagtaataaggtgggttgctgaatttaccactttggaccacatcaatgcctctaccaagagattcagttgatgtaggataggcaataacactggcctcttggcgtcctccatcatctggtagcaaggggcgcactcggcagaacacgcgtatgtttcctttgagttcctggaataaaagctttgcttagcggccataaagaaagtcatactataactgaaaagtgtttccaaaacgacattttcttacaagaatggtgttatgaagctttttccttaataactctccttcaaaaagttgacgctccgtgtctgcaaggcgatcttgcagttcatgcatacattgtttctgctcctcaaattctgtcattgtatgagacatagataaatccaccatctgtagaaagcaaataaacgtatgtcagtgtaaagaaacaattggcaaactaaagagtatctgaaagttggcagatcaccaatcaaaattccaaaggtacttgatcgcataataccttaagcttttccttagcaaaagctaattcctgctccaacattttaatacgctctttttgcaacgaacatgtttcctgcagcataagattgacattgtcagaatattgaaaatataaggcaaggatgtgaaacgtcgactttgactaacctctaaagatcctgatttggctataagaatgtccaactcatgagatgactttccaacactctccttatacatcagtatctcaccagccagcttttgtgactgtacaacatggcgatcacgatcatcacggacttgttgcagctcgctttgaaggttattaacttccatcagcaatgaatccttttgttttaccgcttcatcttgtgaaaccttgatcacaaaaggggaagataaacgaagtaagatgcaatgaaaaatcaatcacaaattaagaaatacaagaatcacgtttgtagaccagggatatttacccggctcgatgctaattgatcttgtagtgatttactgtgacctcttagtgtagtaagattctccagtatacttgacttttctttttcagcacgagtgtgagcctctctagctacttcaagatcagtctggagtttggtgttatattgttgcaaacttgtgttgtactcttgcagcctcttgtacatatcttctagagacgtcacctagaaagaaagaaaacattccagttaacacaacaactaaaagattgagccaagagctaagaggagttaacagagaatgaaacaagtaaacaacacattagcgaaaagcaaatcttaagtaccttctgcttcgcagccattttttcctctttaactttgtcaagctcttctctgagagaaacctgaagcttctcagctacaactctacaatctttttctcttctgtgattttcaattgcatcctagtagtcataaccaattaagagtcaccaaacttgataaacgattctttaggagataagtttgcacaatgataaacgattctttgagcgataaatccttaccagtttactcaacttctccttggacagcttttcctgaagtgattctatgttctccttcatctctgttatagttgctcgtagctcttcctctttggtctttgcatccaactctagaaataatgagaaatcaagtccatattcagtgtacacaaaacgatgtgagaaccaaacatgtaactagaaaactaaaattcacctttatcactgtatcttttctctgcagattgaagagaagaagaaagattttccttgtcttgaacatgagtttcatccacttgttggtaccatctaacacagaccttaagcttcttgataatatccgtcatttgctcaatcttaccctattagtaccacaatgcaaatacatattaaagtgatttttttcttagaatctcctataatcaaccaattggttattcggttcacaaaccttggtatcaaattttccagctttagctctctcgttaagcaaagccaacacttcatcttttgtaaactcaactttaccacactcctctgtgcttcccacatcgctgttcgcatcttgtctgttcactgtcgaaagcacttgtcttcttccagtaccttgcgtctccttccttcgcttgtcaaaaggaatacttgagagcgcttcctttttcttaaacatagttcaaaaaccaacaaaattaagtaaagccacagacttttatgaatcaatttctcaagagaacccacaagatcttctcaattgaacaaaaccctaaatcaaacaattaaactgaaaaatatcgttatgacttttacaatctccgcttctctcttagaagaaggaaaataaaagaaagaagaaggcttacgacgtttggactaggtaaaggagcgcgattctggttgcgaagtggcatcttcgatggattgcttcaccttaggctcgtcaataggatccaaatctcaatcccgagatcggcggcggatttcttaagaacccgggagaaatcagacctggttttttctgaatctgagatgggaaattagggttcttgcttttttcctaatgggggagattttaagaattgaggaaggaggaaggaagaaggaggagcctgttgtttgaatatttgaaaacagatcggcggactcttgtcaaaattgtaacgttactcttctcctcgattataatattaactttcaggcccatcagcattaaacaataatcttttttttccttagatacttactctcaggccaattgacttaactttcaggcccatcaacattgtaacgttactcttgtccattaatatttaaattattattatataaagtataggctccatttgagccaattgacttaaaactcggtccattaacactagtgatattccatattttgcgtgactttttgttggctaaataaattatgggaaagaaaaaaaagtaagatattaatcaaattggtttctattttatggttaaatctttttataaaattatttttcttttattttgtataaaatgaagggttttaaaagtttcaaattcttgtttttagtttgattcgcagttaatattcgattttgggataattttggagagttattacttactttaactaggattcaacccgtggtttacagcgggcctcggttttatatgttttttttttttttttgtcatcatcatcttattgatttataaatcagcagtgtagtcacaatgtaaagcatagcttattacattaggaacccaaaaatgattaaggaataaagattggttttggagaggagctttagcaagaatatcagctggaacattgtgatgtcttcttatccaattgaaatggattgattcaaacttccttgaccaccaatgaacgtctcgtatccagttgtgaacgccaaaatgtaccttggatccgttgattaggtcaaacagcatcttgttatctccttcaaagcaaacccgtttgtaaccatgactccaacagtgctgcattgaaatgattagcgcttgaatttcactctccagagcattgtccacctttcttcctatagcctgacccgccagtagataacttccattactatcccgaacaacccaacctgctttactttctacatctccattaacgaatgagccatcaaagttgcatttgatccatcctctttcaggtcgtcaatcttatatggtttttaattaagtatttgattatatttatattataaatttataaaatatttcttttattttaaatttttataaataatgattgagatttttattggttagttgttatttagtgattaaaataatgtgttttaatgtgtgtatgtaatttaaatataagtaaagtagtaacaaaaatgtaaaatagtaaaaacggtgtaattttttttgtgattataagtttttttattattattatttttgtgattataattctttttggaatgaaatatgctcatatttagataccaaaatgaagtagtgataccaatattgttgaacggttaagattgtctactttggatgctaaacatgattaggtatttgaattcgtgaataagtgactattattcctaacccacccgaaattaaaaatgtggatcatataaactttaatagattgaattgaccaaattattcttaatggctatgtacaaaatccaaaattgaaattgaggccaaaattatctatttttcaatttgtacttttttttaacaataagggatttcatttatttgtcaagttggattggatttaagttacaatttgcttagatattatcgaaaccggttttcaattaactttgactaggtttaaccgaattggtcaatttccacgtcattcagccacgtgacaatcgcattctgggaacactcgatctcaatcctatgtggcaaaactgagaatcaagaaaccacgtgtcaacatattagtagttaaaaccatatccgagtaatctaagtaacaacgtgaatcagataaggtattctttgtcacataaccaaacaccaaaaattataactcaacacttcactaatcaattattcaaagcagataaaaaaaaaatggctcaagcagtgacttcgatggctggcttacgtggagcatctcaggctgtccttgaaggaagtttacagatcaacggctcaaaccgtttgaacatctcaagagtctcggttgggtctcagagaaccggacttgtgatcagggctcagcagaacgtgtcagtaccagaaagtagtcgccggtcagtgattggactcgtggcggctggtttagccggtggttcattcgttaaagctgttttcgccgaagctattccgatcaaagttggtggtcctccacttccttccggtggcctacgtaagtaaaactaatttaattaaatttcacataatgactaatactatttttttggttaaggagataacaaaacgaaattattgtgttatagcttgcatggttataatttaggtttttatcaaacgtatctttaatcacttttgtaagataaaagttttagtaattagattatagagaccggttctgtttgattgattatggttctgcttttgtttttgtttttttgtgtgtgagcagctggaacagataactcagaccaagcaagagacttttcattggcattgaaagatagattttacatacaaccattgtcaccaacagaagctgcagctagagccaaagattctgctaaagagatcatcaacgttaagtcatttatcgacaaaaaagcttggccctatgttcagaacgatctccgtttaagagcatcgtacctccgttacgatctcaacaccgttatctccgctaagcctaaggaagagaagcaaagccttaaagatctcaccgcaaagcttttccaaaccattgacaacgtaagttttttctttctttagggttttgttttctagcggtttcttggtaaagaagttagagtgtgcattgattttttttatgcacaagattcttcctaagtttgggttaatctgagattgttgttttgttgattttcttatgtggaagttggactatgcggcgagatcaaagagtagcccagatgctgagaagtattactcagaaactgtctcgagtttgaacaatgttcttgccaagctcggttaatgaagaaagacttgcgttgtaatctgttgatgtcgatgttattataattactgctatccaagtactttgtctttctccttctcttcttgtctgatcaaatcggttatctctaatttcagtttcaagttttaaccaatatattggctggctctttagcaaaacattatatattcgtcctcgagctgaccactttgtaagttcatgttctgattctgagcattcccgtcctcatcattcccattatcagttttacaccaacttcgtgatcaaattaacctttgttccatcataaattagatgacataccacaacttttcaaagagttttgattggaaattttaactaaaattaatatcaaattttcttttatacagaaattaatggattgataacaacaacaaccatgcatttgtcacagtttcatgcagatagtagtccctcaacatatttgtatgtgaaagttactttgtcatcttaggaatcagaatgagggcttgagattctgtctttttgaggtcttgatgtcaggaatgtaaaagaaaatcgatgttaagacacatgatattcaagtaagatatgcaattaatttagcttcattttctaattgatatagaataggtaacatagagatttttcttaaagtttagttcaattaatatttatcatacacttctagtctatattacgtacacactactgattatcctttacatacatacatacatcatatacatacatcaaatgtataaattaatcatactatagtgaacaatatattttaacatagatcgtgaagataataaaaaatatacgtgtgattaggtcaaaggccgaggacacttaaaccattaacacttttataagtttttattcttcttcttgttaatcgcttcactttttctaagtgttcttcccactccacgcgcgagataatctaaactttagattttaattaggtataatgatataacaaatttcatgatatgacaaggaggaggttagaccatggtcgtttaattgtcatgtcctataagtcaacaaagaagtttttgtatgtgcttaaggtttaaacgtcatatggttgaccgaaactttaattagcttttaaagattctatcaaacggaagtcacatccaaatttactttgatctctataaattaaagaacacttaccagttaccaaacctaaaatacactatatttctaaatctaatcaaatcttaaactctacaactacagtttgatgacatgatttaaaaaaattatgatgagatcgatagtactatatggactttttcaaactaaactaagtcttactttaacaggaaaaacttataattaagtagttagacatgtttagtttagggattatgtatccctcgaagccaaattgacttagaccgcaaagctgattattttataaaaagaaaggaaaaaagtagatatacatataataatcatataatatgagattagataggttaaccaaatatttcaattaactaatagtggaattgtggttaaggagtcaaatcagatgacatgagcatatattgtatgtatattaaaagaagatttgggaacatttccaaagtaaaaatgaagacaacccctaaaacccaagagaattcgattgggtggtatgacttaatccacacaaaacgtatttacctattactaattgtacttatatgtcaacagttgacttattgttatttatttattcatgtgaatttcctcttattcatttatttcgaatcaccttttatgtcctttttgttatatttttttttttgcaacatttattattaacaccagaccaaaccgtttcagatttttttttcttttttgataaactctatcggctgatccgctcagtcccggtaaacacgcactaaaatacttcagagtggacttctctccaaaaaactaccacactgtttcaaaattccttgcaagattttgtcaaataatattttttttttttaaatcgaaatcggtatttctgtagtctaatgttattaatttgtgcacatttttaaacgtaaaattagaagaaaaccaaataaatagagattacctaaccattttaaaaagaaaacctttcaccaaaatccaaatatcctttttgctttatctaattccttcaaacatgaatattttcaaatcattccaaaaaagtagatattcgtgtttttattaaacaataaaacttgttcaacgtggacatttagtttagcctatcaagagcaaatatataattctgatttacgaaagagatatttgcattgtgttacaatattcttaccttttaaatcaattcagaattttttttttctttaattttgtcaaacatgttttacaaaagcatattaacgtaaaatactttttgattattttttattttatttatatcctgtcaacttcctgttcctgtatttagtatttgcaaatgatttttaataaatagattactctataatttaacgtaaacacgaacacaagagtgtgtccaatgagatgcgttattttcataatcatcaataggtatagagacgtattatggttaagagggtagctagatatattatttagtaattgtagttttccgtttaaattataattttgatggactcatgcctacatataaatacactatgtaataaacatcatgtctcatgcaacttcgacattaaattccaaagtaaactacacaattaagaacatgacggaagagtttgagatcgcaggaatctccaccggagcttggtggagctcgccaacaaacaccgccgcagtattctctggctactcgctgccatgttccactgagattagccctgatgtcacaaatttcggatggcaaaacttcgataacaagattaacgatcataatgatggttgtatgaacatgtaagtccacatgcatacatacattaacatacaaagtaataatattgaactttcttaaatttatattctttcttttatatttcttgtaggcataatagtttcttcgaaggactattaatcgatcctaacgatcaattactaccggatccatggtccaaaagtacaattcctaacgctaaatctgagctccttgaaaacttcccattcttagataacatgttcttggtcgattcagaagctgaatctttgttggatcatgaaatcagaaaccataagtcgtctaaggagcaaattacacaagactacaagaatcttacttcaaaggcacgtaacaaacataaaaacctaactatttttgttgtgactaatacttagaggtaattaacattacaaaagatgtgatgattctttcagaggagtgaagaattagaagagaacagcgatgagtattcaccgcgattactaaaaagaccgagactcgagacactatctccattgccaagcttcaaagttcgtaaagaaaaactcggagatagaatcactgcgcttcagcaactggtttctccatttggcaaggtaaattaaaacaacattactctaagtattttacgcatgtttaatctttgatttcttcttatttaagctcaaaagatttgtcttctaaactctttgcagacagatacagcttctgttctcaacgaagctgtagagtacataaagtttcttcaagaacaagtcactgtaagttcagattcttgatttttcatttgcagtcaaaatcaaatcaattaattaacaattcgtttgattctttaatttaaaaattaggtattgagtaatccagaacagaacaccataggatctgttcaacaacagcaggtacttaaaaattagttatatgttataacaactctcttttcttgtccttttgcttgtgacatcaagaatcttttcaaaactaatcatcaccaattaatgattcgtataattaatagtgttcaaacaagaaatctatcaatactcaaggagaagtagaagaagacgaatgtagtccaagaagatatgtagatctttcgagccgtggactatgtctaatgccgatctcagcttcatatcccgtggctgcagctgcggcttcggctgcagagatgaacgtacatctggtttctggcatcttccattctttgtaaacttataaactaaatacgtagatacataaacaaacaaagtaatcttccgcaaacaggggatcttgtaaagttttatgtccctttttaatttatacagaaatgtaaatgtcctgtaatacttcaaaatcatatattgtttgtttgcgtacgtttactatttttctctaaatgaacctactatttgaagcaaaataaatttgttaattataaacgtaaatgtcaaactaaaccgaaggttttgcatttggattataaaatacaatataaaaacctgcaaataatttttttttttttttttgaataaacctgaagtttagtgtatgttgcacaacggtttaaattgaggccaaccagaaaatgtttaattcctttgtaaatgaaaatttctcatctaaatacgaattagataatcgtattgccggccttaaaaatatgtggattccaaagtaaatgtatatataacccattagtttaactagaaaaaggttttatataattagcctcttttcgatctcttattgctttttttttccttctttttgtattagatttctttctcgaagttttaacactcgagcagaccatttagcaaaaaaagctaagagtagaaatgttttttttctcatgtaagcacgtcggttcccgaatgactcttcctagcggataatttttttctaataacttaataaaaatagtatttgactggaaaagaggggcatctcaaaccttccacctacaaaccctttaccaacctttctaaacaatattagcggcccttagatgatgaaagaatttgaggttccaagctcaacttttccagcttgaactcagagccaaccctgcatgaacattacgtgtaaaccaattgatgagtcccaaataattgactttttcagttggaagattcttagcaaactgcaaagtaatgttgtgtactttattattttagcttgtatgatcaagagatttggaaataggagaaggtgaggtttaacaagaaacactttataccaaaaatagctactttgtgtccattggtacaacttctaagaccatctccaatgtaaatatctattactagagattctaagaccatctccaatgtaaatatctattactagagagaaactctcctaacgttaactatagtcttagcatacctcattatctagtttcattttctccaaaatttaaatacatacacacacacacatactgataacaataaagttaagagtttattgctacttctgaaagaacgattaaaaaacttatgtcttgtttgtgtccaccacaaatgaaagaaaaagtgtattgactatggtattggattatttattctcttttgtgggttgtgtaagcgtttattttgaaatggtacataaatatggtaaaaggagcgagacaacacacagattttgatctctgttctacgagattcttcacatcttggatcttacttgctgaacaagttctcttctcaagattttaccagcagcggattttggaacaaggctgatgaagctcactcgtcgtaatcttttgtaaggagcgacctgatgaaatggttttgagccttagaaaacaagatgatatcggtccgattgattcaaacgacttgggtcataagttattaacctgtttggctatgaacttttgaatatcttgctctgttattgagctatttggtgatcgaacaacaaacgcaattggaacttcacctgcttcttcatcagggaacctacaacatacacaaattttaatgtgttcggacgtggaatcaactcggtatttatctgaatatatgactcacgggataacgacagcatctagtatatcaggatgtgatacaagaagaccttctagttcagctggagcaacctagatatatcaatcaaaccattcattatcaatctccaccttttgattggcaagtgagaagaagaaggagagaattgggtaagtgaaagtgaaacctggaagcctttgtatttgataagttctttgattcgatcaacaacataaaggttaccatcttcgttgaaatatccaagatctccggtatgcacccaactttttttgtctattgtttctttagtagcctgagggttattgaggtaccctgaaagagaaccagtttacatgactttcaaatgcacatatatgatatacataggaacggatcattttcaaacctttcatcatgtttggtcctcgaacccagatttctccttgttgatttggaggctgagattttccagtttctacactcactatctgagcttcaacacctggagcaagcattccagctgaaccagagttccgtttcccgagtctcgggtcttccacagacacaattccacacgtttcagtcattccatatccctgaagcaatcatttaaacattcatccatgactacgagcctacaaagagaactgaaactacgcgaaaccttacacattacgagcaaacatagaaggaccaaaccctaagaacaagatctgaaaccaagttttttgtttacctgcataagcaaaacattaggaatgtttcttccacattcctccatcaaatctttaccaagaggagcagctcctgaaccaatatacttaagtgaagaaagatcaaactttttcacaatactctgcttggaaagagcaaggaacacaggaggaacaacccaaagatgagtaactctaaacttctcaatattcttaagcaccaactcaagctcaaatctcgccatagaaaccaaagcatttcctctctgaagctgagaataagtaatcactgccaaaccaaaaacatgaaacataggaagaaaacacaagaagacgccatgatactctcccataagatcttgatccatagtaaccattaacgaagctgcaatgaaattcccatgagtcaattcaacacctttgcttgttcctgtagttcctgatgaatacaacaatgcagctgtatctgattgcttaatctcaacgaacgggtactcagaaactggctctgagagttccatcacgttatcgaaactaagaatcttcgaattcgatcccggaggaatctctacggtgtctttagatccaagtagaacaacgggaagatcaaagcctttgatcttatcaaacagttgattaacggatatgataatcttcggattcgaatctttgatctgtttcgaaacctcattcacagtgtaaagaggattcgcggtggtgaaaacgccgccgatcgcggttacggcgaggaaacagagagggaactggtaagagttaggagcgaaaatcaacacgacgtcgtttttgcgaatacctaaacggtggaatccgtgagcgagtctagcgacggcggatttgagctgagagaaggttaaggaatcgccggtatcggaatcggcgatagcgagttttgatgggtaagatgaggagttacggaagaggaaagagactaacgatgtgtttggatctttgggaagaacgagtgttggacgaagtgatcggtaaattccgtctctgccgtagccggatttctccatattttccgatctcggaggataaggtgagagaagtatgtgtgtgaggaagaagaagaagactatttctggtttctgattacttcacgtaaaacgttacatttgtctttaatgttagtactattagtatttaattttttcttagtcaataattaatcatagtcgcataaatttatgaatgtcaaacttaagtaactctatgattgctttaatgggaatagtcaattagaataataattaacaatgacgagaccttttttttttgtcatccgaaaattaattaggactcaaacgagccaatcctgaggaatgttgtttacagatgtaatatgaagcggttgggtacgaacttttcgtgccaaaaaatccgctttaacattagtactacgagagattaaagatagaaaaaagtttgtgaactcatccttgtcgctctgtaactcctccaaatacgatgagaaagccggccattcggttggggaagacaccatctccaccagatctgaacagtctgtaagaaaaactacatcttggttgtcggcaccaatcatacacttcatcgcccagaggagagcttccacctcggcatgtaaaggagataaacttcttctgagattggcagctcccaaagttgatgtctctccagttgatgatgtcaatcagtacaatgacgagaccatttctataacttttatagagaataaaataattaatttatgcggagaactccacagttaaacgtgtttgagtcgaagtagttttaagataggtgaccttccgagaaatgattatcagaaccatgtaaatgaggataaaacatgatgaaatatcgtatagtgatttgtaggatcgttaacaagtctttaaaacctcttagatttggcggaccgatcgtcggacagggatgagtccatagacctgagaaagaacgtggagcacactagtaaggacggactaaacgttacaatagtagtgagatcgtttacaaattaatagttaagattaaatggtacaaaaatctatttttggtcatgtaagtgtgttagttgttacgattatgaatagtatggtagctaaaagtagaaattgtgattttagtaaaataggtagtgactagtgagtagggacaattaaacaaataacatgttttacaagaatagtacttgtagaacaaatgaacataaagagaaagttcaaatgaacataaaaaggtatcgacaaaaaaggaaaaaaaggggaggatgtgtttaagatgcatggttataatggttataatgcatgcttcgacaatcttggtaaagaagaagtgattgtgagaagaatgatgcaacacaatatccttacctcccttccattttatgctttgttagattgtattaaaagttacaactatgaagacatcaccaacaaacatatgagattgaattcggtgtggtttctaagacatatctacttcctcacaagtcaccagcaaagacgaagaggaacatatgattgacaaattatattccattaacattattatgataaatcgagtaataagatgacaaaaaaaagtttagcaaatgtaattcactattgatagattataatgttattattattgggttttactgttcattatattttgtaatacaaaattattacacacaaaaataaattttacaaaagtaaaacaaaaaataatacacagttcacacagtaacgaataagaacgactccaatgaaaagacgaaaaccccggatgtgataatttttcatatttcttcttcaaacagctaagaagcccgacccgtatccgaatccgtttcggttctgtattgttgttgttcttctacaccaggaacaaccataccagtgtgatgctgatacatttgaaccggaccgggtgttttcattccataataacccgtccggttcattccatcaactgccatcataaccggcctaaccgttccaccatatacttgacccggaccagccatctgatgagtctgaggttggtggtatcccattggtacatgatggtattgttgaagatactgacccggcatttgaaccggttgtaccatatgattacccggttgaaccatatgatttccttgctggaccatatgattacccggaaccgaaccaggaacgtaataaaccggtgattggtgaatggtatgaccctggtaatgaacctgttggcctgggccaggggcatattgccattgcgagttaaccgggagattactctgttgcattacttgttccggttgaggattggatttcggagtcgaaaccggttctggactttccggtttaataaaaactggtggtggaagttccggtgtagatattcgcatcacaggagccgaagacgtcgaaccatacggcgaaggaacatcgcgacgaggcgaaccaggatccgaaagcgtcgagacttctcgttggatcttagctctcggatcacgatcacgaagctcatgcggcggagcagtttcatcgaaattatccaatccaaagagataatcaggaacttcagaaacaatcgacgagacttcagatctaactcgctcaaagactctaccggacccaccgttagataccgcggttgcggcggcggaagaaccgaggttaagagcgtcgaggaaccattgctcccgattaacagagctatcgaggagagagctgatactgctagctcgactatcgttatcttcttctccggcgacgtttttggtgaagagaaaaagacgaagacgagaggcgcgtgggttttgattctgtgcgacgcggtcgtattcgtccatcatgttctctacatcttcgtccgttgatacggaaatcaacgcgtcaagatcttcgtttggtagctggtacttcacgcttatgttgcttttaccttatccaaatattccaacgcaacaatcatcattattattccccaatcaaaatattttctttttataaattgaatgaatactttcccgcaaaattccaaaatctcatggccaacaaaatatctgcccaatttccaacaataagtttgaaaaatattttaataaacagcaaaaatgtttttttagaccaataattcatagttgacaaagaaaacaaaaaaatatcatatgatttagattcaattttgtatttgggtaatatgacagtgatcgccataacttcttctaaacccaatttttatttctaacgaactcactctgtttcataaaataagttgtattagattcgtttcataatataagttgtattgaaccatttttttgttttataatataaattgttttcaaatttttatgtaaattatatattattttaaatactttataattatttatattataaaatctttttttatgattggttggaactttaaaaaagtaaatattactaatttgtgtatttttaactaaaacaatttatattgcgaaatggagataatattaattaatcattggatcaaatgttccgagtcgataattttcatgatcgtgcaaaattaaatgattgaagaaaaaatatcatatgccagaccttttgtggccacagaccaataaaaatctgcccaatttccataaaaatcagttaagctgcaaaaaaatcttaaaaattaaccaaataattcgctcatcatatctaaaaatttccttgtggcgattttcttagacgaggcccacaaaggcccgataagagatcatatcaaaatcatccaactaaaatccctaatcggttttcaatgatcatcatgacacgattcgaaaatcggaagggaatgattttaacttaccggagagtttagcaagtttactaaggagagaggcgaaagtagtgtgacgatgaacagcgaccatgcgattatcgccgccgacgtaacagagctgattatccggcggacgtggcaagatccttcctccaaaagtacacatgaaccgtacgcgtggctgactatcgtactccgatctcggcgatgacgccagtgagtcgttgtcaagctccggcggagggatcgacgccattattttcgcctctttctctctctctatctctcctctttgtcgccgaggattttggtaatttggggatttttgttttttttgattcgatttcattcaacgaccatataaattattaaggtgaatgttcgggaagaggatatgttagagatacgtggctgtcatgtaccgcattctcacagcattattttttctcatgtaatataattagtttgttgcacaaaaaataaagtaatataattagttaaccgtttgaatattttaatataatttataaatgtgagagtattaccgaattgattattatcaccactcattactcgttagtgtcataaacgacatttattaaccgatttgcacaaatgataattttgaataaatgagatacagatatatatatatatatatatatatatatatatatatatataaatactaatttctatcgaattttatttatatgaaagaaaaaaagtaattttaaaaatattaccacaaaaatatatcaacaaaataaaacaattccttgattttctgtaatctttcgatcaaaataaaacaaaataaaacaatgatctttagattctctataatctcatatgttgcattgtgtttctttgtctttgccttaaaactctcatggacttcaaatcgatgaattttagattttttttttatggtattggagaataccttttgttgtaatgttttaatttttgagttctttaactcttatgcttgtaattgttctttgtttcaatgaataaaagcaaagattgaaaaaaaaaaagaaaaaaaaattccaataatcaataagagtagtcaataagagtgtaagaatgactgaaacaaactctagaaaacgatagttgattacaatgggagatttgtaagcacgagtcttgcaaacaaaacaataataaaagcgactttgataatctatgttttactcagaaatctaattacttatttactattacaaagttgtaacagaatcgttcgattgaagtactttagttagtgtagaaaatatcttatgaaatttggatttggtttggttttttatcttgtgaacaaatcttggttttttatatatattttatgttatctaatgcaacaattaatatctttgaacaaaaaataaaaaaataattaataacggtcgacaaaaaaataaaaaaaatataaatctaatataataattttatcataataaaactttcaaaaaacaaacatttaccatacgcattccttatgtaatgtaactatattttcatgagaaacattttttttttttcttttcgtctcaacttcgttaaagttttcatcaaaaattttgtgtccaaaaagactaatgtatacaactattatattttcttacgatcaatctgttggccaaaataatagcggtctatgagaactactggccgttattccattttatatgacagatgcatcgtagccgtcaaatagctatcagccagaagttagatgctcctaatcattcaccatatgcatttgacttgactccacaaaaaccattgtgatttaacgattttaagatacatataatttagacaagaaaaaaaaaaaagataacatataattaaaaattgtatctaatatatattttcaatcttcaactaggttcttgacgtcggcacaaaaaaaagagtaaagaaggaaaacaaaattcctgactttattttatttaattaatctagcaacagaattaaaaataaaatataatcaggagttcttacttcttagcatgtgacattgagctgagttggttattacgacaggcgatcgaattttattagtactaatcattatttccactaaaactaatttgaagtccatgttattgtattgttaaacaaaaataatgtctctgtagtttgattgatatttaatgacgttttagttcgactaaacaatagcgaaaagaagaaattgaccaatgaaaagaggataagtttccaatggtgttgcagttagtaaggttttttgtttacttgttgggtatgacgagaaaatctatatcaaacattatattatctatctatcttactctttcaacgtaatctatcatatattgtactatgatatacataaacgaataatgacacaacttataatttcaaattattacatttttccaaaagaaaacataaataagacatatctaaagtcttcactgttttttgctgtattcttggagttggaacaacatttcttggaacaatatgctcacacttgaagattattactaccacgtttttccaatttgttttcgttttggttttcgaagttttatgttttggttataaaaaactatagttgaattctctatgtttcttggctccgtaggattacccatcctttaaggatactcattgtggtatacgaaccttttgagcttggaacaatcacgattttctcataccgcgaatcaaaaagcaatacacgaaaatgtaatatgatcggttacatgttttccacaataaatggttatgtatttccgaaacttcccattgttaagtactactgaagtaaatccgcttatgaaggattatgcagtgaatctattcctcctctacgatttgacattatccctggtacccaggtttttatatgaaaacacgggacaacacagactaggaacatggtacacgcttggcctcgtagcaatgtactatgggatttggtcggaagatacacaccgctggtgaaatggctcaaaattgagaatagaaaaagactcacagttgcgattttgtcgcgttttttcctcattccggaattctacttcactgccaagtatggtgatcaaggatggatgattatgctcatttctattttgggattgactaatggacatctcagtgtttgcattctcatcatatagctccttaataaagattgtggatatgattgtttattttcgtttgcgtttagaatttaatttgcaaatagctttactaatactaaacaattttttttgttttttttctctaatataaaaactattttaatataaacgtaaatgtaactgaattcgagaaaaatgaaaatgaaacactagctatttgtgttaaaagtttgaaaagggttacatttcgtgtgacttttgctgtaaacaacactatgaaggaactcgtgcattaacactatatatattctaatatttcaagacaatcaatctcttatttgttctcattttgtattaaaggaactcgtgttttgtttttgtaaagggtccggaacaaaatgcgttagggatttactggtagcgtttctgttaggaggagtatttgcgggagttgccttggattggtaagaaaaatgtctttttagtcatgaaataaactcttgaccacgaaaaaagaacaacattatgagcatcaatgattcacattgaagattcattttttgagttttttttgttgttgttaactttcttgttattaatgtctaatttgatcatgtttaactctatttcttcacccgcaaatttatagttattgtgttgtggtaagcggtagcagtacgaggtcgaactaaattaaggaccaaaagttacatgttgggatccagaccatgggaaaatccaattggaaaactattcatacatggttaaaaaaagaaaagaagaacatattatgaagaacataattaaattatactatagtctatacataaggtggaaaattttatgcggagtcgacccgagacaacgcgaggttgggatctcgatcagtctgaaacttatattgatcaatctaagtctttttctctttcttggtttctcaacaattatattgtcgagcgatctatccacacgtaaattatatcctacacttcaaggttggctcgagcatctcacgaaggggatcgatctatagggcagattgatatgttcaagtgttttttgaagatattttggttcaaacaagtcatcatctcgactgattgatcaccagccagattaatccattgagggccttttgcacttttcgaactccgtgtttgatgcaacggtcccatcatatatagttcttaaaataacctaagtttggagggaaaaaaacacaaaaataaaagaagcaaaacaaatgttagaaacgacttattaaagcataacacatcaacaattcccatcccaatatttttgtggaagctttgtttcagaccgctatgtaatttgttcatgatagttaattcgttttctccattttgctaaagactataaatacatgtgttttgtctcttaactccatctagttgatgatatacagctctctctttctgttacgtatcttaaatctgaattttgttcttttacattttcagatcaattcaattcacgtcacatgttggatatgggcttcgccccaccaacatgtttaaaagcccaacacatcgaaattagcaacaaggaaggaaggaagaaaagatcggcccgttaaagataaaagagcccagcatcaaacgaagcccacctcgaggaagttgttgatcaagagaaagtcccacatcgagaagaaaactgtactatagactgtccttgcagtactataaatactgacaaaggaatgtcagaaaaggacacctgaaatatgcagagaagagcaataaaaacttctacttcggattcaaaagcataagtctagttttgacttgtgaagtttgtatttacgtaagtttaagctcggctgtagaaacaccttgtaaacggccgaacttggggaatattaataaagatcttccttaaggctcgtcatttcctttttggtttggaggttcggttttatacaccaacatcacagtatcttccctttttaaaaaaaaatatttatctcacagtaacatgtatatcttcttctaactgtttttttttatgtctccataatggcttacgtctcacaacaacttgttttctttaatatagatagagaagacagattcattttacaaaataaatataacaaaacgtatatcaacataattaaatgatttcctgtacgtagtacaagattaataccagtatattagaaactttaagcctctaagaaaaagtaaaattttaatcaaaatttaggattaagaaattctttaaaatgtcgaaactgttcaactatttattcgtaaacgcgcatattaaatacccaagaaaaaccattatttttcgtttagtgtgtaccagtggcaaagtagtagcctagctatattattttttatttttttttgaaaataatgttaaattatattccaaaaaaaaacgtttttacaacaagtgcagattggttttgagaattagagctgagaatagttttgaacaaaagaaagaaacagagctaagagattaacttcttgactgaaaccaaacttggagacttccatcataacgcttgtcccccttgaaacagatagaggacagctgatttctaatttgtttatctatccaaccaacgagttgagatgctgtgttcggaggctcgccgtgacgcctaccattccgctccctccacacaatgtagattgtggcttggaaaacatagcggcggagaaaccattccacacggtgatgctgagagtttgtaatggcttcaattatcgattgccagtgtgaagtgtactgcgttttgaaaattcctctcgctaaatctacccaaattgcagaagtgaaactgcaagtaaagaagaggtggtcccgtgtttctagagtcccttggcaaaaaatgcagtctgttgcagtgccatttgcccaattgatcatacgatcgcctgttgggagtctaccatgtgctgcaagccaggagcagaaagagtattttggggtggcatgactgaaccaaatcaccttatgccatggaaccctagctgacgtagaacgagtatgatgccaagtatctctagtagagaaagtagtcctgaaaacatcagattttcctctccaaaggaccttgtcttcagtttccgttctagtatcccaagacttagcctagctatattaacagtaatgaattttattaggaaaagttttctttttcatacaaaactgtttccagataaccagaaatagaaaataattaaaagccttcaaattttagggggtgttattggtttattgatttgtaaatctatatagaatttgaaaatctctattaattatgaaatcaagatatatggatttttaaataacatgtatttacccatggatttgaatccttctatttttctctttcaaatccattcaattacatttaaaacataatttgggttctcaaatccaaaaataaatgactatgcgaataacaaaggattttaactagtatttataaatcatcgaatcaataacacatgattttagttagaattttaaaatcaatgattgaataacaaataattttgtttggatttccaattccttataaatctataaaccaataacccctccttagattcttatgtttgttttgtttattgtaaataaccaattgtcaataaattcaagagattttttcggaaaaacgaaaagctaaataaacaaaatatgatgaatttttctaaaactatatagactattttgttttgttttatggttgacgatttaggtcttctggattggtgttagtatttaggtttactgtacagtttaagggtggtttagactattttattaatttttaaaaacctatactattttctgagttttcaaataaaatttaaattaatatcataatttttccaatgtaattaatggtttatgtcttttatgttaaatgttaaaaaccatctaatgaacgataccattgaccaaactatgtatactaattttctttgtattactagtgttgctgtaatggtgttgttctcttaatatggaagaatatgcatttaatgatcaaaaacaaaacaatgtgacaatttaacacttgtgattttttttaataaaccatttaaaaattatgacttgtgagctaactagcttgtaagtcgtattttaacattgtagcacttaacacgattgagtcttattctaacattctaaacgtcaaaccttgaagctttgaactagaattaagaaatcaacaaacacgtttattgttcatcaagatcataaatccacaaacacgttgacacttcaagatcataatactaagtttccaaacacgttgatatataaaaacaaacatcgtaattatttgcgaagagtaacaatggtggctaggttcgagaatcaagctcctgaaaatcttcacgtaagtatccacaaaactcaaaacttatatcagaaaatctttcataatcgtttttcctcaagttcttgttgatttatgtctaaacaaaaacaacaggggaagtatcaagcaatggttgtttgctgtattcttggaatcggatctcttgtttcttggaacagcctgctcagtgtcggagattactactaccaagtttttccggtttggttcacacaattctcagattagaaattgtgtttttttgaaatatgatgttttggttttatagtaaatatttacagttgaaaacttgaatgtcttgcatcttcataggattaccatccttcaagagtactcacattcgtataccaaccattttcgattggaacaatcgtgattttcgcttacaatgaatcgaaaatcaatactcgaaaacgtaacctgattggttacattgtatttacaacatccatattcttgctcatcattgtaagttcaagtctaatctctcatattttgttttattgttattttttatgaaactggattctgattctaaaactcgaaacagttggatttggcaacaaaaggacacggtgggatcggaccttatattgttttatgcgcaatcgttggttcatttggcttcgcggatgcttctgtacgaggaggaatgatcggagacttatcgttgatgtgccctgaactcattcaggtttataaattataaagatataagatatcggtttaggttgactaccttgtagtatatataacttcttgcttctttgtagtcattcgtagcgggtttggctgtagctggagctctaacatcagcatttaggctgataactaaagcagcttttgagaaaacacatgacggtctaagaaaaggagcaagtgagtttaacgttttcttaagatctcaaatctgacaactataaagctaattagtgttgaaaacttcatgttttgcttacattttatttattcatgcagtgatctttttagctatctccacattggtagagtttctatgtgttctgctatacgcatatgtgttcccgaaacttccaattgttaaatactaccgaagtaaagctgcttctgaaggatccaaaactgtttatgctgatcttgctgctgctggtatccaaaaccaatcagttttggtaagtttaaatccctcaagatctgtccctttgtggttattttaaaatattcttttaaaaaccttcaccattttctatttcttcagattctattcatttttaaagactccttcattcttaagtcttaaacattgtttgcttcttgattatattcttctatatatccagactgctgatgatgtttccaaggataaacggctaaacaacaaagagctgttgcttgaaaatgtagattatgtagtgaatttatttctcatctatgttttgacactatccattttgcccgggttcttatacgagaacacgggacaacacgggctaggctcgtggtatgcgcttgtcctaatagcaatgtacaattggtgggatttagttgggaggtacataccgatggtgaaatggctaaatgttgagaacagaaaaggactaaccgtcgcggttttaacccggtttctcctcgttccggctttctacttcactgcaaaatatggtgatcaaggatggatgattttgctcgtttccattttgggattaactaatggacatctcactgtttgcattcttgccaaagctcctagaggatacacggtaatctatctactccatgtttgatagtttctttgagattgcgtttgtatttaggttaattggactaaatgaccatgaacattgaccactagttaaactaggtttaggtaaatgattatatatatctttatttttaacaaacacagtgttataatttgaaaaaggtatatcaatgttgtgaaatgtaaggaaatgtttttaattaacattagataccaaaacaattataaacattttaactctgcctacatatacagttattttgattttgtataaattttggctttgtttttatgaagggcccggagaagaatgcgttaggaaatttgctggtgctatttatattatggggagcatttgtaggatgtgctttgggttggttatggcttattggtaagaaaaatgccttctgagttctcatcagcaatagtttcacagtcacaacattatttttgggggaagaaggggatcatattacatttttattggtataggattcttatcttcttcataaaatctagtgttatgttattccctatttgagaagtaattttcaaagtatgtaaaagtgcgcttacaatcaacaccattaaaacactacaagtctttcctgtgctgacacctcagctttttcagttaaccacagcttgacacctcattaaaatcaacagccaatcagaacatttcgattaatacacctcatttacgttgaccaataaaaacttactatttttccatgtcattccatcaatttaacaaaattaaaattaagacatgggcatagcccaactaaactattttcaaaactaaaatctacattatataaaaacatgggcctaaacttcataatttagaaaacttaggcctcggaaaataaaccgcagcgaatgtaccgaaccaaaaccgatgaaaaaaactaaaccgaacgaaacaaaaaatttgaaaataaccgaatggatattaaattctataaccgaaaccgaatggatacaaaccaaaatattttggataaccaaaaatatccaaaatataattatatttttaaaaatattagttatttctaaacctaataattaaaaatagatatataatagtaaaaatactcgaaagtaaccaaaaatatatgaaaatataaaaaataactaaactatccaaataatatttaaagaaaaataaccgaatagatattgatttttaaaaccgaaagaaccggaactgaaccgaatccaaactgaaaccgaacaaaaattttaaaataaccgaatggatactaaactttataaccgaaaaaaacaataaccgaatggatacgaaccgatactgaatggataatcgaatgcccatgactaagaaaacttatctaaaggcttgactggttgaaacgcagtgcctacatttgtgacaacatgagtttacggaataagatggttgcagttttaagcattataaaactttttgaacgactggtttagcggttaaaagttggtgcattttcggaagctttatgattggttaacggatttacgtttatggtagaaaaattacgggtttatgtttttggcaagctaattaggggtttacgtttttggcgggaaaatttcgggtttacatttttttggcgacaaaattacggatttacgttttttggcgggaaaattaaaggtttaggttttttggcggaaaaattacgggtttctttttttggcgggaaaattacgaaattacctttttggcaaaaaaaataagagtttatgtttttggcacaaaattacgagtttatgataatgttattatcatgatgatatctatcatgactatggtatgttgatatgatgatgaagaagatagtatgatgatgatggtgatggtagtataatattatgagagggtaatgatgatgatgatattgtgttgataatgaataaattgatgggttgatgaagccatttggaaaaagattgattatattcaatcggtttagagattttggtacacttaagatgtcatttttgttctttaaactctaattaaatttaactctatggtatggttattcgattctccaataatctaagtttcaatttttaagttttgaaaaacaaacaaacatagcttttagctttttattcttcttcaacatatgaatcaagtatgcatgtggaacattaaaatcaaagatgataactccatataacatattcttataaatctacaatgactttaaccttaccagaattaacacctgatgatttttaactcttttcacttttgttttgtaatgactcttctaaaaagatgttcgtaatgcaaaaaaattagcttccaaaacttataaaagctatatagatcttacttaaaaaaaattaacaaatgcattgagctcttaatcactttctaatgaattcttttgttctacatatatcatgaatcatgacaaataacattaatacctacatacaacttaacaaaattacatttaaaagaaaaaagcctgcgacttggcgccggtttcgccctagaatgaataaaagtactttataagctagcttacactaacacaacttgtttaagatcaaattagtgaatatgcattatataagaatctatatgtgagttttggtctaaattcacaaagtatgagaaagactctattcagtataaagggttctaagttcaaatgaaaagcaaggaagagataagagtttttgggtcgcttagagggttcactttatgcgccaagtttgagaaacaaaaggagatctcttaagctctctctcatgacatcacattgtcgatttcgtacaagcaacaagagcagacaaccagaatggtttcttcaatcaagccgcctaagagattgcagcaattcaggcccgtaattgcagctggagcacctgacttgtgtaagattcaagcatgagcgtgtcgggcaactctagatccttctttttgtctctttaaaggagttggttgtgttgtgttgctttgtaaggtgtgagagaagtttgtaacaaagagagaaagttgtagaaccctaaaggctcaagataagagcaagttcttagtggatttccgagaagatctcggcgagacgtagggattcaagtttgaatcctgaactcgttaattcctgtgtgttcttactttcaagttccgcattttacaaatgagtgaacaacagagtgagttgagaggtctgagattagacaaagtacaactcgagaacgttataatcctcacagtttggtattagagcttccaggttactacctaggagcaagaagatctgctcaagatgtcttcgggcagagcagaggtggagaagttcgacggagatggggattacatcctgtggaaagaaaagttactggctcatatggagatgttgggacttctggagggtctcggggaagaagaggaagcagaggttgaagattctaccactgagattagtgatggaggaaaccaagacccagaaactgcaacttctaaactggaagacaagatcctcaaagaaaaaagaggaaaagccagatctaccatcatcttgagcctgtgaaacaatgttctgagaaaggtcatcaaacagaagacagcagcatgtatgataaaggtcctggatcagttatttatggcaaaatctcttccaaatcgcatttacttgaagcagaggctgtatggctacaagatgagtgagaatatgacgatggaggagaatgttaatgatttcttcaagttaatatcggacttggaaaacgtaaaggttgtagtcccagatgaagatcaagccatagtcttgctcatgtctttaccaagacagtttggtcaactgaaggagacattgaagtactgcaagactacacttcatctcgaagaaatcacaagtgccataaggtctaagatcttggagttgggagatagtggtaagcttctcaagaataactcagatgggttgtttgttcaagaaaaaggcagatcagaaaccagggggaaaggaccaaacaagaacaagagcagatctaagtcaaagggagcaggaaaaacgtgttggatttgtggcaaggagggtcatttcaagaagcaatgttatgtatggaaggagaggaataagcaaggttccacatctgaaagaggagaggcttctactgtaactgctcaagtcactgatgcagctgcactagtagtttcaagagctttacttggctttgctgaagtcaccccagatacatggattctagacacagggtgctccttccatatggcctgcagaaaggattggatcatagacttcaaggagactgcaagcgggaaagtaaggatgggcaatgatacttattgtgaagtgaaaggaattggggatgtcagaatcaagaatgaggatggatctactatcttgctcactgaggtcaggtacataccagaaatgttaaagaacctcatcttacttggaactcttgaagataaaggctgctggtttgaatcaaagaaaggtattttgactatttttaagaatgatcttactgtactaactggaaagaaagagagtactttgtattttctccagggaacgacacttgcaggtgaagccaatgtcatagacaaagaaaaggatgaaacaagtttatggcacagcaggcttggtcacattggtgcaaaagggctgcaggttttggtcagtaaaggtcatctggataagaacatgattaaagatttgcagttttgtgaagattgtgtgtatggaaaaacacacagggttagctttggagctgcaaagcatgtcacaaaggataaactcgactatgtgcattctgatctatggggatcaccgaatgtaccattctccattggtaagtgtcagtatttcatcactttcattgatgattttacgaggagaacttggatctatttcattagaaccaaagatgaagctttcagcaagtttgtagaatggaaaacacagattgaaaaccaacaggacaagaagctcaagattctcagaacagataatgggctggagttctgcaaccaggagtttgattcattctgcagaaaagaaggagttagaaggcacatgacatgtgcttacacaccacagcagaatggtgttgctgaaaggatgaataggaccatcatgaacaaggttaaatgcatgttaagtgaatcagggttggggaagcagttctgggcagaagcatcgtctactgccgtgttcctcatcaacaaaagcccaagctcttcaatagagtttgatattcctgaagagaagtggactggtcatccaccagattacaagatactctagaagtttggatcagtcgcttatattcattcagatcaaggaaagctgaatcctagagcaaagaaggggatttttctcggatatccagatggtgtaaagggattcaaagtgtggctgctagaagacaggaaatgtgtagtctctcgagacattgtttttcaagaaaatcagatgtacaaggaactgcagaagaatgatatgtctgaggaagaaaaacagctcactgaagtagaaaggactctcatagagctaaagaatttgtttgcagatgatgaaaatcagagtgaaggaggagaaaagtcaaaccaagaacaagcttcaacaacaagatctgcaagtaaagacaaacaagtagaggaaagtgattctgatgatgattgtctagagaactatctactggccagggatagaactcgaagacagatcagagctccacataggttcgttgaggaagatgacagccttgttgggtttgcattaacaatgacagaagatggagaagtttatgaaccagaaacctatgaagaagccatgagaagtccagaatgtgagaaatggaagcaagctaccatagaagaaatggactccatgaaaaagaatgacacatgggatgtcattgataagcctgaaggaaagagagttataggctgtaagtggatattcaagagaaaagcaggaatttccggagtagaaccaccaagatacaaagctaggcttgtcgccaaaggattttcacaaagagaaggcatacactatcaagagattttctcacgtgtagtcaagcacgtgtcaatcaggtatcttttatccattgtggttcaatttgacatagaattagaacagcttgatgttaagactgcgtttttacatgggaatctggatgagtatatattgatgagtcagcctgaaggatatgaagatgaggacaacacataaaaagtctgtttgttgaagaaatctctgtatgggctgaagtagtctccaagacagtggaaccagagatttgactcattcatgatcaactcaggttatcaaagaagcaagtatgatccatgtgtctacacacaacatcttaatgatggatcatacatctatctactgttgtatgtagatgatatgctaattgcatcacaaaacaaggaccaaatccagaagttaaaagagtcactcaacagagaatttgagatgaaggatttagggccagcaagaaagatactgggaatggaaatcacaagagacagagaacaaggcactttggaactgtctcagagtgagtatgtggctagagtgttgagagcttttgggatggatcaaagtaaggtctctcagacgccacttggtgcacacttcaagttaagagccgtaaatgagaaaactcttgcaagagatgctgagtatatgaagtcggttccctaccctaatgcaattggaagtatcatgtactctatgataggatcaaggccagacttggcatatcatgtgggggttgtaagccggtttatgagtaaaccctcaaaagaacactggcaagctgttaagtgggtcatgaggtacatgaagggaacacaagatacctgtctaaggttcaagaaagatgacaaatttgaaatcataggctactgcgattcagattatgcaactgatttagacagaaggagatcgattacaggatttgtattcacagctggtgggaatacaataagctggaagtcgggtttacagagactggtggctctgtcaacaacagaagctgaatatatggcccttgcagacgcagttaaagaagccatttggctaagagggttagctgcagagatggggtttgaacaagatgcagtagaagttatgtgtgattcacacaatgccattgctttgtccaagaactcagtccaccatgagaggacaaagaatatagacgtgaggtatcacttcataagggagaagatagcagacggagagattcaggttgttaaggtttcaacaacatggaatcctgcagacatcttcacaaaaacagttccagtgagtaagcttcaagaagcgctgaagcgactcagggtctcaagtaactagggagaccacagatccgagattggaagtcaagtaacagtaagaagatgagttcagtgaactttataccaaggaggagttttgtgcgttttggtctaaattcacaaagtatgagaaagactctattcggtatagagggttctaagttcaaatgaaaagcaaggaagatataagagtttctgggtcgcttagagggttcactttatgcgccaagtttgagaaacaaaaggagatctctttagctctctctcatgacatcacattgtcgagttcgtccaagcaacaagagcagacaaccagaatggtttattcaatcaagccgcctaagagattgcagcaattcaggcccgtaattgcagctggagcacctgacttgtgtaagattcaagcacgagcgtgtcgggcaactctagatccttctttttgtctctttaaaggagttggttgtgttgtgttgctttgtaaggtgtgagagaagtttgtaacagagagagaaagttgtagaaccctaaaggctcaagataagagcaagttcttagtggatttccgagaagatctcggcgagacgtagggattcaagtttgaatcctgaactcgttaattcatgtgtgttcttactttcaagttccgctttttacaaatgagtgaacaacagagtgagttgagaggtctgagattagacaaagtacaactcgagaacgttctaagcctcacattatattaattaaacatatgtgtttatctcttcaaaatgtatagtaacctttaaaccgaaaaagtctacactcttgccattgcgaataaaagaggttactaatcataccccatttcttgattttttgaggcaaaaagtcaaaaacaagtaaacatatgtaaaattcaaaaggttatacaaacatctaactcatctcagattagaggagcaaaccaaggaagacaaaaatctaacccatctcaagaggagcaaaccaaggaagacaaaaatctaacccatctcagatacggtaggacgttggccagtgtggtccgacaattttgagtaccctaggcaaaaaatttaaagaattaattgtaagaaaaggactaaaaaactagaatcttataagatccagcactttcgcaagtgtttacagaaacaggcacttttcctcttgtaaaatgacgatgttacccttgttaataatttgttaatgagacatgatttttttagtgccaaagacagtgacgatgatgagcttcggtcggcgactatgcgtctatgactgtttttagacggtggtgagaatcgtgggtgaccgagtggtggctaaatataaagataattttagatttttctcatattttttcatacttttgtcttgcaaatctggtagagatttgatacacagaaactacttccatatactttatcaaaatctccaattctaaaagtctttggaagaaaaaatacagattttaaccttctcaatttcgaattgttaaactattacaaagtaatcaaaagggttttcaagcttttgtgttgggttagtgttaattggtccatattatattatcttctccgattgagtagacaaatatgatttcttcttcttcaattgatgtggcttctccaagccataacatctacagttttcatgaatttctcatcgatctggaagctatgaattgctacgacatcttcaagtttgcttcagatttgttaatgctcaaatgttacatgaagacgacacgagattcacaatttgatggaaataaaggaggaagaaaatgaatcttcacaattcctttaattttccttttgggttcattatgtactagttttcttagggtttagtttttgtaaacgcagtcgaagatgaaagaagccggttcactatgtatacatctaaatctcaaaaaatttgtttaatttttttttattgggttgtctatatagtatcatcttagggtttagtgttcttgaatcaatggaagattgtataataaagatttttgggatgttagattttccattttataagaaacgaggattgaggagaagctgtgaaaatgaaggaagaaggaagaaagaaggagaaagaaaagctgatgttgcaggggtatgcaaggatataatcgtaaaagccttaaaatcaaagattttgataaaattgttcctattttaacaataatcccaaatttaaaacataccttttcgtatatcataaaagaaaaactacatataatattaatataaataaaatcacatagtctagctctaacaagtaaagaaaaaaggtgaacacaaacagcaaaaaaaattactaattcatattgtgaagcaattaccaatgtgaagaactataagaaaaaaataatcaaaaaggtatgtatcaatagtacgtactataaaaatatgaaacttactaagtttgcttcgaccattttttcatacaaatcaaatccaaaacatcattttttatgaaaatgttttttaaagttttaaaaaataatattttaagcaaaagagagtttatgatttgaaaataaatatatttccactttactaaaccagaattttataatcaaagataataattagtttaaatctaaaaataataatactgtaaacctagtttggggtacaattctaacccacttgcatttaaatggcttgagaagtatgacgtggaaatgtgtttgtaggaagtctacgaagctgtagctagctaatagaatgaatgcattagactaacaatagtactattaagtggaaaataacaattaagacatcgttttgttattttgactagtatcatctaatctagtactagtaaattttgatatttgactaacacgccagatttaatgttgcatggtttaaacaaataattgttaatttatgtagcaattaagtatagtaagatttgcttagattgactcaactcttaacataaataacttaaatgacacacgtttgtttcaaaaactgtagtaatccatatctttggtaaaaaaacgaaataaccttaatgattaattgtaatcaaattaaaacaaaaaataaaaaataaaacaaatcttttatattttaaagcacaagtcactccaccaataaaattttgacaaatcagcaaaaccaaattatttttcaacagaattataaaatcaaaaaagaaaaccaaaacctatattacataattaaaacaaaaacgaaaatccagttaacgtgagaacaaactttttttaaaataataattttgaacaaaatttagataaagaagaatcttcttcacatatttcgtttttgatgttaaaaatactaaagaaaaacaatttaattttattgcatattataaattgacttgttttagcttaccaataatattttgacatgtatcaattcacaaataattgatttgatggtaggaatagaagaagaaaaaaacggttatgaaaacccttggagaatttatcatgactaataaaattcattaaaattcaaatatgacaatattatgtaaaaatctgccgacattaataaaagtctgtcgtgacgttatgaaaatttctttttaaaaaaaaaaaaaatccagtcaaacccgatttaacatacaatcagaccggaaataatttaattgagggctagctaataaatctcatataacaaaaaatttcgaaattttaaaaataaatctgccaaaaaaagtctgttattactaaaaaggttattctagtcataaacaaatcggccataacattgacatgagtaaatctgttatgctttgacactgaaaaacaaaactgtcatcactaaaaacaaatctgttatcactatgtgactgtgtagtaattttattttttaacaaaaatctgttgtaaaacaccagatttgttaacaagttaattaaatctgtgattacacaaaacaactctgtcatgcctatataacatttttcgaggttaacaaatctgttataacacaacagatttttgggtgcaaatagaaaatctgttgccaccataaagaaaaatctgtggtccggaaaacaaatcagtgacagatttggtttcaacattcttacttttgaaatttaaataaaatctgtggagactgtatgaaacaaatcagtcacgattaaaaaatctgcgaaaaaaaaaaaatctggcgtaacataacacagtaaagtctgtggtacaaaacaagtctgttgtaaaaaatctgtggttgaccaacaaatctgtgatcgataacaaatccgtcgcaacaagagccacagatttaccaaaaacgacgatggcattttcgtaaataaatgtggttttattgccttgctggaattaaatagtaatggcatttctgtaatattgtttttctctgcaaaggaaaacaaggataatttaggtataattattactcaaataactcatatttttagcattccttttgggtcattatgtataaaatatgggttactctagtaaatttccctatagtatatcaattggcacagcttattagttgatgtatatatcgtagaagatgacttcatgcatgcattggccacttttccaataactttctcagggaaagtcatacattcggattacactataatctagtcgaccatatatagaagaagtaactaaagctttcaaacttttaattctttaatctttttcttttgagtcctcatctcaaacttttttttttttttttttgtattaaattgacctaaagggacgttcacatagtggaaataaaagaaaaggtgacaacaaagatcagaccttagggtatgccaaccttttgagtcttattttatcttctcaaatttgctgtcaaaccttaaaactctataatgattttactcaatcatctccatgttgtgagaatcttgttctgattctacatgaaagctttgctcgtaataatttcaacaaattcgttgactctacaaccaaaaccctcatgtgctaactttcaagtaagtatatgtagttttttgctcgaaataacaaaaaaaaataagaacaaaacatcatcttgtgtttgatccaattcttgaatcttgaaacattcttttgagctctctataactatttaaaaaatggcggatggatacgagaaccatgctcctgaaaaccttcaggtaagtatccaaaaaacccaaaatctttcattgtgttttgatcaaattcttgttcagttgtttgtttatgtatgtattaaaaaacaggggaaatatcaagcaatggttgtttgttgtattcttggaattggatctctcttttcttggaatagtatgctcactatcgcagattactactatcaagttttcccggttcggtttcggttttggttcgagtttcaattctgctatttcgttttagttatcaatttaaatttaaattttgaaaaatttgtgtttcatgtaggattatcatccttcaagggtattcacacttatataccaaccaattgcccttggaacaatcatgattctcgcataccgcgaatcgaaaatcagtactaggaaacgtatccttaccggttacatcctattcacgatatccacattcttgctgatagtcgtaagtatcagtttaagtcttactctcagaattaatctttcttatggaactgcatggatttttattatggactcaagactctaaaaaactttaaaacagttggatttgacaacaaaaggacacggtggaatcggacattatattgtcttatgcacaattgttgcttcttttggccttgcggatgcgaccgttaaaggaggattggtcggtgatttatctttgatgtgccctgaacttatccaggtacatcaagtttagcatattcaaggtctctggtatacaaaaatcagtttagataagtcagcttatataaaactccttccttgtagtcatatatggccggttcgggtatggctggtgctctaacctcagtgcttaggctaataactaaagcagcatttgagaaatcaaacaatagtttacgaaaaggagcaagtgagtttagcatcttaatcccaaatccaacattttcaaagtgtttaaagttccatttcttgctttgtttgtgttttccctgttacagtgatattcttagcaatctcaaccttcatagaactactctgcgtgattttatatgcatatgtgttcccaaaactccccatcgttaagtattaccgaagaaaagccgcttctgaaggatctaaaactgttgttgctgatcttgctgctgctggtatccaaaatttatcagatttggtaacatcaaactcctcaagaattctttcctttcttggtttctttaaaaaaaatcatcaagaatatgtttcttgattcattctttttttctacaactttcccactctttaaacattatttagcttcatgatttttctacgcagagtgatgatgattccaagaatcaaatgctaagaaagaaagagttgttgcttcaaaacatagaccatgcagtgaatctattcctcatctacgttttgacattatccatttttcctggattcttatacgaaaacacgggacaacacggactaggtgattggtatgcacttatcctagtagcgacatacaatttttgggatttgttcgggaggtacgcaccgctggtgaaatggctgaagcttgagaatagaaaggccctaacgattgcggtcttgacccgttatttcctcgttccggcattctatttcactgcaaaatatggtgataaaggatggatgattatgctcgtttctattttgggattaactactggacatctcactgtttgcattatgactatagcccctaacgggtacaaggtaatctatctactctccctatgctgttaaccaaattaatttgaatatatctagaaacttagattagttcatatttagaaaacaaaacacattatctttacaatttttttgtgttataccctttgcttttacgatttgaaaatataacacaagttttttttgacatataaatacaaacactataataaacaaacgacctctaccttcatatttaatctgattttgtattttgtgaagggtccggagaagaatgcattagggaatttgctggtggtttttattttaggaggagcagttgtaggaatttctttgggttggttatggcttattggcaagaaatatgctttctgagttctcatcattttgtgcaattaattccgatgaatctgactctttatggcaaaaaatgagaagcttggtgcctcgctcgaacctaactgtttattcatgaaaaaagaagaagaagagaatactaacacgtaaaactttcgaaagcttgaagtgatgaattcttatttcgatgcttcaccaaattataaaatttcactttttcaactccacaatttgctgtatctattttagttaatattttagacccatttgatcattttattaactattttctaaaatcttatatggtgttatttaaccatagatttttatagaaactaaatcctaacagtctacttttgtttgatcactgattataattttatgcattaaagtttagcattgttccatcagatatttgtaaaacaaaattaatagcaaaataaagtcattcatttaagctagtaacggacggttttcttcgagagaaaaccagtccggagtagaagagcttacatgggaaaacatagaacctcgtgctcttttcttcttagcaagacaatcagcagagacattgtttaagtatgtaataaaagataaagaaaaacgagaaaaactaggctttgaagcattaaaatcttttcactccgaagaaaaagcggactactcatcaggagtgttcaaaagttgtgtcgactccttactatctgtctataaaataatgtcgaaaatggataaaaatataagaaatcgtattgcccataagagagcctcaacagatatttgtaaattatatttaagagttttaaaatttggtcttattaaccaagtgttcatggccaagtgctttcgtcatgttggtccagactagagaacacttcttttaatcatgaaaacttaactcattgtttcctttatgtaaacattttaaagtggcaaaagttttttcttaggtatctacaaatattgagaactagtttcggttacgatccaaaaaagaagtaggtgttatttagttaagattttaaatattttgctaaaataagatttcaggcattttcgtgtaatttacaaatacaaaatgtagtgtgtaatttagacccatatttcctttcaaactaaccgatcaaaacattgatcacaaaatccttgtgtgcaactaattccccaaaaaagaagaggagaatactaacacgtaataatcaatttgaggtgaagtgtttatttatttattttgctaaatatttgaggtgaagtgttattttgataaatgcttcacttatcctttttcttttttacaacaaaattagttcatccatttaaattagaaacggatgattttttttaggagaaaaccagttcataataaaagattttatatgaaaaaaagataaaactttgtgctttttctttttcggcgaggcaattaataccaatattgtttaaacgtaaaataaaaagataaagaaaaacgataaaagttaggttttaaaatattaaaattttataattctagaaatgtccaaaaactaagtcaactacttcaaatgcttcacttatccaacttcaccgattctcatcgagtctatttcatacatagtttttattttcatttattacgtttagaccgatctcacagatatgtggatatttaatgattaaggattttaaagaaagttttgctttcatactatatcgtcaacaagttgtctaaaaataggaacataaaaaaagctttcacactttgaattctttaaattctataatcttttctttttctttttgagtcttactttatcctttcatatttgctgtcacaccttgaaaaggtctattattttactcgctcatctcctctttttaagaatcttgttttgaatcttcatgaaagctttgctcgttaaaaaatcaacaaactcgttgactctgcaaaaccctcatgtgctaagtttcaagtaagtatctctagctcctttatttgctccccagcaaaaaaaaaggaacatagcatcatcttgtgtttgatccaattcttgaatcttgaaaacaggtttatgttcttttgagctcaatggcggatagatatgagaaccaacctcctgagaagcttcaggtgagagtttccaaagaactcaatactcagatccaaaaatctctcattgtttttctgatttaaaaacaaaacaaattcgtgttttctctcttgacttttaaaaacaggggaagtatcaagcaatggttgtttgctgtattcttggaattggatctctcgtttcttggaacagtatgctcactatagcagattactactacaaagtttttccggttcggtttcggttcggatgattctcagattccaaattggtttattgaattctgatgttgtgtgtttagttatcaagaagttgaaagaaacaaaactttacgtttcttgtaggattatcatccttcaagggtactcacacttgtataccaaccgtttgcgcttggaacaatcttgattctcgcataccacgaatcgaaaatcaatactcgaaaacgtaacctcattggttacattctattcacaatatccacattcttgctcatagttgtaagtttttgtattacatgtcttgctcttacattaatctttcatatgtaaatggattttaattattgactcaagaatttgaatgaataaaaaacagttggatttggcaacaaaaggacgtggtggaatcggtccttatatcggtttatgcgctgttgttgcttcttttggcctcgcggatgctacagttcaaggaggaatgatcggtgatttatcattgatgtgccctgaactagttcaggttatacattttagagaatattgttttagactaaccggtttagattaacctgaatttactagctaacatattcctacttgtttgtagtcattcatgggaggtttggctgtatctggtgcgctaacatcagcacttcggctaataactaaagcagcctttgagaaaacaaacgacggtccacgaaaaggagcaagtgagttaatgtttttgaaggtttcaaattttgaaaaccgttagaattaaactccaatcatcaaagtgatatttttctgcagtgatgttcttagctatctccacatgcatagagttactctgtgtgtttctatatgcttatgtgttcccgaaactcccgattgttaagtattaccgaagaaaagccgcttctgaaggatccaaaactgtttctgctgatcttgctgctgctggtatccaaaatcaatcagacttggtaacttcacattcctcaagaatctatgtttcttgatttttattattattttcgtttttaagattctttagcttcttgattcttctatgcagactgatgatgattccaagaatcaaaggctaagcaacaaagagctattgattcaaaacatagactatgcagtgaatttattcctcatctacgtttgcacgttatccattttcccggggtttttatatgaaaacacaggacaacacgggctaggcgattggtacgcacttgtcttagtagcgatgtacaattgttgggacttggtcgggaggtacacaccactggtgaaatggctcaagattgagaatagaaagttgatcacaatcgcggtattgtcacgttatcttctcattccggcgttctacttcactgcgaaatatggtgatcagggatggatgattatgctcatttctgttttggggttgactaatggacatctcactgtttgcattatgactatagctcctaaaggatacaaggtaatctatttattttacaatttgcatatgcaaacgaatacaatctttgcgtttgagacaagtaatctcaccaaaaaaaatgtgggggtttttgatttggtgaagggtccggagcagaatgcgttagggaacttactggtgatatttctgttaggagggatatttgcaggagttgctttggattggttatggcttattggtaagaagaatgccttttgagttttaatcactccaaaacagtggttcactttaagttaatttggaggttaagttgctttcatattctttgcttgtaacctgtaaaaacagaggatgtttaattacattttctatgtatatggggtgttaaagaatgattattcctataactgacacatgtcattaagccacaagttaaggtgacaatcttcaagtcgattgtaagaataggattgagagtgacctctttccccgatatttttcgtatttgttcttttcgacaacttctttcgcatattagcaaacttggatgagtttgtgtatattctttttatcgctttgtttgctctaatgctctagctaattggctaattgcctcagggtatatcagatggtgcatatatttgctgtaaccattttgatatttgaattgaagaaaattagttgataaaaaagaagcagctgagcagaaaatgaaaaacaattggtcattaagttttttttaacaactaatttagtttttctacatttagaatatattcaaaaacatttgttctagaaatactattcacttttactctcccacctctcccattaaatttgtctcattaaataatgttaattaattaaaaaaaaccgcaatgtatatttgtcaaacgggtctccacttatatttttaacgtatattgcaaaataagtaattacagtttaaagagttctgcacatgaatttagttggccaaatcatgagtgtgactttttaattttatatatatgagacaagcccaaagctaaaatccaaatgcacaaaatttatccttcaacattgaatcctaagacagaacttctccctcaatgatagcattttttttttgtcaatatgttcttaaattatagtatgttatttcaatagcaactacattatactccaattgtaagatttgttttatatcgtaatcttgcattgttccctgttatgtgtaattcttcattatatttcttttctctaaccaaaaaaatatattaaaatttttatctttccctgttttttgtattaacgttgacatataagaattaagaaaatgcataaatgttttaaaagtatagaaagtaacggtgagattgagtgtcaagttttgtatgaaagtttatttgatttacacatatcaatattgatggaagataagaagtttcatagttcagaatttataaactctatatgatacattaggaagggagcatatgataagtttttttttctaactttacctaataatcaaatttggtgctctctattattgtgacgtcaatagacataaggataaatataggaaataaataacattaaattttataaacttttatgaattgtttttaattcaaaaattagttcaaactacataagcgattttatacaaactttatgacatgtggcatatttttctatgttttatttccattttcattctcacttgaaaagaaatgatatacataaggtatgaattataagaaaagctt

SEQ ID NO: 536 - DNA, 122529 bp, Arabidopsis thaliana
aagcttcgagaatcggcgtcacaacgccacctacgcatagtgttcctctcactttcttcttgcagtttgtcaacgcccatttcctgtatccacacaggtggatcaacagaagcattactggtggcgcgtcattgagatcacctctcaggaccttctttccctttgtacggtggagaatgcttgtaagtgcggaatctatcacatccatgtctgtgttagacacgatgtctgtagactccctggagtaaagaacattggctacttagcactgaaagtagcgaatcaatggactccagatttggttgctcttggaccgggcagagtttagcggtacattgttcccaatagtagcccacaaatccttaaagtctccctgtcaaacttgggcttggttccctttccactatggaaaccaaacagttctttcaacttcttgatcgacaactgatagcgctgctcatccactgaaaatgtcaagaatcccaatctcatggtgtctagctcaaattctgtgagaccctgatacatctccacttgcattgtggagagaaacttgatcgtctcctccttgtaggcagcgtatgggtaagacatgagtgtctccagatgacacttcacgaacagatgctgcacgtcctcaagtaaccccagctgggctaaattctcatagcagggatagctcattccccaaaaatcgttcagctcaaagaatctgatatactcctccactgtaacctcgtcaggtttgttcaacagctttgtctccttgcgccatgactctggctcatactcagtttcgatgtcctcatcaatcaactcatatctactcgacatcgctctctttcctctagcgatttcagctatcgagcgttctatttctatcctgaagctttcgtaaatgtgttcttctctctctggtctagttgaccaagactcagcttcatctacattatattcaggatccacagaggattccctactttagtttctcatgacgaaacctgaaattagatggaacacaaagaaaaatgttaatacgttagtcccaacaaaaccaaaacacaaaccaatcgagtataccggtcaagtaaactggtcaagtaaaccgttttttttttttggtttggtgaattgttgatcgagtgattccttgagtgagtgaatggagtgttctccgcgatcgagtgaggttgagaggcgagacttcttgtgggattcattggtgatacgcgatcgagtgttgctagtgaagagtgagacgaggtcgagtgatcttgtgaggtcgagtgaagctagtttcgtggttgtgagatagagtgaaacggcggtcgagtgaatcggttgttgatggtggcgtcttccttcttcttctcttttgattcgggagcgagttgatttgagaatgagatgatggtcgagtgaactaatggagcttgagcggtgaggagcagtggagaagtcgagtgattgtttcggtgagaagagaaaacggtggcagttggtcgagtgactggaacaaagcggtggaaaacgatgaggctatgagggagctgcagtcgagtgttgttggtggcgagataaggtgagaagtggcgatgtgatgaagatggtgatgagagatcgagtgaatgcgcgacgtcgagtgggttgaagaggcgatgtgatgagctttcgtggggaagagagcagtggcgttggaagcgatagagagatgatgagcttgaaggtgatatttgttcagcggtcgagtatatgaagagagatggtgacgtgatcgagtgaaggttgtgaggatgatgatatcgattgaagtcgagtgtttttatggggagagaagctggagtggtcgagttgagagatgaagtcgagtagtgaaggtgaggataaggttgcgtagtgatcgagtggagagatgggtgtgaagagattccatgtctcttggtctgctgcatggaggacatgggcgtcagtggtgggtcccactatggcttcttgtctttcttctgtgctctctgtttacaggaaaaacctcaggaaatcccgcaatcctttgtaaacttgataaactccctataagactttgtagcttctgttggtcgagtaaaatgatgatttaaaaatttatgggttttaaacatcactcatattcgaccaatatactcgagtgcaaggtctccaagtgcaattgaaagttttaaaaaaatttgcaatccactatactgtgtaattgatctctaggccgtctgtagagtaagagttttgaattttcactcttccttcaagttattcctctattcctgagaacaacaaacacaacgaaaacaaatccaaaataccaagaaaagaaaaatttattcacagagatactcatgggacttcctcccaagtgagcttgtttaaagtctcttgcgtgactcctcacacttatcaagaagaaaattaatgatagagagggtctgcataatcctctctaatatcatcatcatacttagcgtcctctctggagaggtgtgcagcaaattactcaattcgcctttctccaaaataggcttctttgtcttctagagggtaatctatctcttcagaccatcttgaagtgaacttttttctcggaagtgtcaatcccgcctttaggttaggcttctttctacatctgatccagcttactcttaagttcctcaacagtgtgggctagctcctctatagttttctcttgcttatcagacctctttttaagctcttttactctttcagtctcatatccttctcctgcaatcactctattgtcttcagaggtctttccatcttctgttaacctttgtggagttttgttgatgtcaaactgaagcttgatatgctttccaaggttgagatttattttcccttcctgacatctatcactgctcccactgaggctaagaaaggtctttcaggattagaggatccttatgctcttcttccatatccagcacaacgaagtctgtaggcacttccactccattaaccatgatgggtaaatcttttagcatgcgaaagggttttcttgaagacctatctacaaggatcaaagtcaggtcacaaggcctatactaaatgaattccagcctccttgccatagagagtggcattaaactgacaaaggctccgagatcgcacaggcaattactgaaagctaattccccaatggaacatggtagagtaaaagatccaggatcttctaacttttcttgaacaatcctcttatcagcagctcgagacggattagcatcacaatcatcatctgaatcatgatacatcttgatcctttacagtatcagatttctcacatctttgtgagggtgaggaatcaggttgagaacttccatcagtggcatcactgcttcaatctcgtcaagttgtttctctgaaacagatttgtatctctccatccaggctttcttgaatttccatggaagagcacgtgagggtaatggagtaggtttgaaacgttttaccattctctcaattatagatgctttttcttctgaggtggattgaatgtgatggcgagaaccaacagaatggttgaattcaacaacagagacatcaatctgagtagagggctccccttcttgaacatcattgtccccagtgattaagttaggaacaggtcgagttggcagctctcgatcctggcggatagtgatggcgtgagcagttgcatactcctttagattttgtatggacttccttggaagtcctgtaactttgggagcagaggtagatgcggattgttcctccaagtatctgacttttgtattcaatgcctccactttggcattcaggtcattgtagctacagtccagcttatggtgcaattcagataacatctttgcaatttccatggagctagatgcttgtccttgtagcaactgttgtaccatctgtttcatttagcttcaggagcagcaggactttggtgttgatgaggagcaaacccaggtggtggtggttgctggtagttcccctgaaattgttgcttgggaacaaaaccttgattgtagggaacaaaaggtttgtttgggccttgttgttgctatggagggtacacttgatcctgaagattaacaacgttggtgctgcgataagagaggttggggttgttcgtcttgaagttgttgtaccctttgtagccaccttggttgttgatgtagctaacttcttctaactggttcccctccccatcttggacttgatactggtcgtcatcaacaaggaagtgcacatgcctctgctggctaagaagaattttgtccagcttgtcattcagcgctttgatctccttcctgtgtttatcatcataatcagttgtgcctctgatggttctgtcgcagtcctcattgtaatttccatctgactgagctaggttctcaaccaattcccagccttctttaacatctttgttgtggaaattaccattgctggcggtatccagaagcattctgatccgtggtagaactcctctgtaaagagtgctgagcagagaggctttcttgaagccatgatgagggcattggttggtgtagcctttgaaacgctcccatgcttcacagaagctttcaccagtcttctgtgaaaaaccagaaatctcatttctgagtcttgcagttctggcgttggagaagaactttgctagaaaagccttcttgcaatcatcccaggtggtgattgagtcatggaacagattattttcccagatgtgtgcattgtcgcccaaggagaatggaaacaaccggagcttgaatccgttttcactgacatcattgatttttgttaggttgcagagtctatcaaattcatccaagtggtcgagttccccagaatcatcgagatgagaccactcttgatctcgaagttgttgttctggatagcaggaggtgcaattcctttcctctgacggtggttccttggtgcatctccaacaccaatatttgcagggccattctgttgattttgtttgtcagccattttgagtgatttctggggtaaaaggttgactgtgtttctcctttctctgagttcgcgagcgatgcggtcaatgttatcgttgaaaagaaggttctggttgcatgttgatcaagtttgcatacagtagaggtgtacctggatcaagaagacaacaagaaaatcacaaagtcagtaacagaaataaaaattgaaaaagaacttggtctatgcaagtctgaaatctcaaatgtaacaaacaaaaacccaatgacaacggcgccaaattgataatatgtcttttttcaattatcctaaaacaccaataatctcgttgtagtactgaaggttgtcaatcgaaatgagtgtgatgctagcaattaagatgcaatcaaagttcacagagggtcaagccaagcaataacaggttttggtgtgttctagcagtcctaagtgaagatgcaggagacagaaatttaagcagaacagtagaaacactcgaccaacacagcttgttgccaagcactgggtgtgatcgaatgacaaatcgagtaacagatagaaaatgtaacagagatactcgactgcacagtcagacaactaagtggtcgagtatcaggtcgagtaacaagagagaaatgcaaaaactaaacaacaggtaataagatgcagtaaacaacagtagagtaaacaaagaaatcaatcagataaagaattcccgaggatggggtaattgagtagtttcgtttcctcagtttacaggtaattgacatgctcaataaattatccctagccaacaagttcggtaaccaaatctaagtgccactgcaacagagaccctcaagttaaacttgtcccagactcaatcaccattgacgagagctaacctaacaggcattacgaatcaaacaagttaaagccaaaacgctccctaaaaccaataccttggtacagagccaagaatctctggaattagtggttcagacatttcatcgaacaccttttgggcgcggaaatgtctgagctcaaattctagttgatcagaaagcaataggcattaagaacaactaatccagaaaggatctataaatcaaactcaaccacctagcatactgagaattctaaactactctaacccatcctcagaaacctattcactactcacacatcattgtagaagacataaacgatgaacataatgaaaacataatagcaacagagtaatagcaagatgataacaagatgaacaacttagtaaatgatattgaaaagcaaatactgaatactgaatagattaagagaaatgaggattacaaaatgtcaagaacacagtgtctgcggaataaaacttagattttacaaaaatgtaaaatacatgctacttatagcaaaatattgcgtaatcctaatactcaaaacgacccagtattgggacggattaagaacggtactcgacccaggtggttgagtgaatggtcgagtgataagctggagtcttcttttcttccttgtgctcgagtgtctggttgagtgcggaatggagaagactctggagcttgcagtcgagtatgcagtcaagttatagagatggtgatacccggcttgaaggtagagtgatcgagtgaacgtgatggagttactcgaccaattggtcgagtggtgtgattgagtgatggttaggtattgaggtgatgatactcgaccagggggtcgagtggtgtgatcgtgtgactctcatggtggtactcgaccagggggtcgagtggtgacgtgaagtgatgagttcttctactcgaccgggtcgagtggtttgttaaagatgtggagccatctactcgaccaatgggtcgagtgttctgctgtgatcaggtccgcttcttccaattagctcgcccaacagctctaaatcacctggaaacaacacaaatatgtaacatgcatgcaaaactatcctaaacgtgcaaagtgatgacaaatgatgagaaatgatataaaacagtgatgatatgatgctaagacaaatggatgctcaaaacatgtaaaatgcacacttcaagaagactaggatgacggtactcgagcttgtggtcgagtatgttgatttgattaggtccacttcttccaattacctcaccagcagctccaaatcacctcaaaacaacataaatatgcaatatgcatgcaaaactatccttaacatgcaaagtgatgacaaatgatgagaaatggtataaaacagtggtgatatgatgataaagtgatgacaaatggatgctcaaaacatgtaaaatgcacacttatcatcatatcaccactgttttatatggactaacaagagtggtagataagtgtgaattttacatgtgttgagcatccatttgtcatcactttatcatcatatcaccactgttttataccatttctcatcatttgtcatcactttgcatgtttaggatagttttgcatgcatattgcatatttatgttgttttaaggtgatttggagcttctttaagctaattggaagaagtggacctgatcaaatcaacatagtcgaccacgagctcgagtaccgccatcctggtcttcttgaagtgcttggtcatgacctccgcagctagtcactcgaccgcaacactctcgttcacgatactcgaccagggtcgagtaaaaggcatcaccacttctcaccaccactcgaccccttggtcgagcattaccatctctacttctccccatccactcgatcactaccacttgatgtcatttgagtattagggtttcagaacattttgctataagtaacttgtgttcttgacattttgtaatccggatttctcttaatctattcaatatttgctttacatttcgtttactaagtagttcatgttgtatcattttgttattactttgttgctatgatgttttcattcatgtcatcgtttatgttttctgaaatgaagtctgagtagtgactaggtttctgaagatgggatagagtagtttagaatcctcggtctgttagctggttgagtttgatatatagtcccttctggaatagttgttcttaatgcctattgctttctgatcaattgaaatttgagcccagacatttccgcaccatataagtgttcgataaaatgtctgaaccactacttctagagattcgtggctctgtaccaaggtattggttacagggagcgttttggctttaacttgttgattcgtaatgcctgttaggttagctctcgtaaatggtgattgattctgggaatactttaacttgaggatctctgttgcggtggcacttagatttggttatcgaacttgttgtctagggatattttattgagcatgtcaatcacctgtagactgaggaaactaactattctattacccaatcctcgggaatttctcatctaattgatttctttgtttactctgtcattgcttactcctcgcttagcttttgcattttaaagatgttatcattcatatactcgactacacccaattgtcgtgtaacagactgtgcagtcgagtatctttgttactgtctctgctatttactcgacttgtcactcgaccacacctagtgcttggcaacatgctgtgttggtcgagtgttttaactgtttctacttgaatttctgtttcctgcatgttcatttaggactgctagaaactccaaacctgttattgcttgccttgactatgtgaactctgattgcatcttgattactagcatcacacccatttggattgacaacctaaaatactaggacgacaggatagtgttttaggattaattgactaaaaacctattattagtggttaaaatgaataagaaaatccatgtattttagggtatccatgagttgaaatttgatacagacatgataattaaaaaatcagattcaggttcaaattgatagggaatggtatcaaatcatgacagtgtgatcgagtatagtaatctagcttaaatcaaacaatcctttgtgttactaaacttggaagagagtactcaggacaaaacacatcacaaaaacaaaataaaaacacgagatggtatagtacaatggtgaagtcaggtgcttacctctgtcgaagtatgaacagagttggtcatcaatggctgcctgtgattgctcccaagcaatgaaagtgtcgccctgttctgtctcagccccaactccctgaggatacttgacctcatcgcctcttctgcggccagcaccgccacaaggatactcgacctctcttcttcttttgcggccagcatggcggtcgagtgatctcctcgagttgataaggcatgatctgctgctagagcgaacgagcatagccttcttcttcttcatgtgctcccgagactcgaatgatgaatgtgtagctgggaaatgtgagaccctctgctcactaggctcaggcctgtgttgactcggctcaagctcgtcaaatctcctcaatggcatgtcctgaggaggctgtccctgcagaatagttgtagtggaagtggagcagcttagcatggccttcaaagacttgatagtctttaggcatttgataatgaacttgtcttgcttcttgcaccacttctgcaacttgctattgtttctgtgagcttcactcaagctcttactctccctcgctagagctacgtgctcactgaaatgatacatgcttgaatcatacttctcctcatccgtctcaccgatctcatcctcagtaccgtcttgcatcctcatctatcagctaagcgttcttgtaatagaggttctcaagcgcaggtgtgaaataaatgttatctccctctattatgcgtctaagcttaggactggggggaaggatgttggctttcttgtttgtaaagtgctcaaacttgaaacgatgcctgtcgtcgaccatttccaactcgaggatttcgtagtgtcgtagatgctcgagatccattgctcgtggctcaagtccatcagatgtgattgggactccacaagcgataagaattggtgtcagaacccctcatctgcaaagagcgcctcgtgctctcttgtggttattgctggtagcccagctcttatatccacacatgtggatcagaagaagtatagagagaggagtgtcattgatttcaccttggagagaaataccgttcttggtttggcggagagtacttctgagagccatagtgatcatctccatatcaaagttggtgacagtccctgttatctctctagagtagaggacattggccacagaacgctggaagtacctgatgaaaggattgcatatctggttgctcttggatctagaagaatttagtggtacagagctgccaatggtgatccataaatccttccactcatctctgtcatacttgggcttggttcccgttccactgggaaaccaaacaatccttccaaacgcttgattgacatcatataatcctgaccatacacagagaatctcaagaatcccaatccttcactttccaaatcattaaaggtcataccttggtggagctccacttgtagtgtggaaaggaactgaattgtttcttcctcgtaggctacatatgggtaagccatcagagtgtccaggtgacaactctggtacatgtgctgaaatcctccagtaatccaagctgtgctagggtagttgagcagggatactttgtgttgtagaactcattcagcttgaagagtctgatatactcctcagctggcaataacccaggcttgtgtagaggttttgtggctctatgagaatgctcaggcatatactcgacctccatctcctcgtctatcagctcatacctctctgtcactgctctcttccctagagctatctcagctcttctcctgaaattctcatattccctctgttctctttccggtcttaaagatgaaaactcagcctcatccaagttatagtcggaatcaattgacgaaccgccactatagttgctcataatgatcctgaaaaagattgagaactcaaaactcaaatgtcaataggttagtctcaaaaaaaactatgaaaccggaattgttctcaagaattaacaaaaaggactaaactggtcgagtgtaacccagtactcgagtaagctgacgtgttcacaagctcttctttcatgattggaatcaagttgcatagagtggtggtcgagtaaaactggtgatgtcgagtggatctgctaaatgagagcaccagcgatcgagtaaactctcagtcaaccggaattatcgtttggaatcttgaatctggtctagtgttcttgaggtttcgacggccaaactgattctactcgatggtgaataagatggtgaactcgattgcggcggcgtagcggctgtcgagtgactcttcgaagttacttagattccagaggggatgaatgtgctttcgatggggttaaaactggtgctactcgaccaaggacgagtcggcgtactcgattgcgacggtgaaatacttctcttccgcagcagtcgagtaatcttgttgaaatcgagtcttggagatggtgaacttgagaggcggcgaagtgtttattttcctcagaggtcgagtaaatttctttagtgttttgaaggaatgaaggcgatttcaaaaggaatggtggagattaaatttgtatttctctctccatcttatcctcagtgagaaaacgcgtgtggtccacgctatgttgttttgtcattaagctcagttccctgttgactgcaaaacctcaggaaatcctaaaatcctctgtaagtctctgtagcctctattggtcgagtataaggttgaatttttgggtcaaaacaacaacacactcgatttccaccgctggtcgccatatggcttattacggtcgagtacgaggtcgagtataaaggctcagaatcatcaagtttactcgattatatttcctcatcagcatgtggccagtgtgatcgagtgacatgttgaagctccaactgaaaccttgtttatactcgattgcacagagacactcgatctctacatcatgtggtcaagtgaatttttgaggttgaatccattgcacttaaacattagcagttatctcctgaaaccactagtaaaatgcatcaaaaattacaaggaaaacaaaaatatgtacagagaaaggcatgggacttaaaccccccccccctcccccaagtgagcttgttttaagtcattagcttgacttccttactcctttaatcatcaagaggttcctggagatgagccgaagtcacctcaggaaggatttgatctgctaagtatttcttgagcctttgaccattcaatgtgaaatctccactcttaccagctagagtgactgctcaataagggcggacttcagtgatatagaagggaccagccatctagacttaagcttccctggaaagagttatagtcgggatcaattcatccttttcatttttaacaacagtcattccaccttttttagggacgcatgcactagaaaaacccaagtaccatcagaaatagggtatatgacaccagcatcaagcagtttcaaaatttatttttcactacttttttcaagttaggatttaacctcctctgtgcttcaatgctagaataggatttgttttcaagatggatcctataattgcataaactaggtgaaattcccttaatgtcagataatgaataaccaattgctcttctatactttttaagttcagacaacagcaggttcacttcatcatcatttaactcagcattaatgatcacagggtaagtagagtttgaaccaaggaatgcatacctcagaccttgaggaagtggtttgagatcaaccttcggtgctttgagttcagaccagtcatctgaagttggaatgatcagctccatagtgtcgctgataaatgtggtcgagtgaatagttcaaagaaaggcatgggacttccccccccaagtgatcttgttttaagtcattagcttgacttccttactcctttaatcatcaagaggttcctggagatgagccaaagtcacctctagaaggatttgatctgctaagtatttcttgagcctttgaccattcactgtgaaatctccactcttaccagctagagtgactgcttaataagggcggacttcaataacacagaagggaccaaaccatctagacttaaactttcctggaaagagtttcaggcgagagttgtatagcaacacctgatcaccaacctggagatccttggtgatgatcttcttgtcatggaaaagcttggtcctctccttgtatatcttagagctctcataagcttctaaacagatctcatcaaggtcattaagttggatcaaccgcttctcctaagcggtttttatgtcaaagttcagtagtttaaccgcccacatataattgtactcgagctcaacaggtaggtgacaggattttccatagagaagattgaagggagtcgtaccaatgggggtcttgaaggcagtcctgtaagcccacagtgcgtcatcgagctttgcagaccagtctttccttgtaatccgaacaatcttttctagaatcgtttttatattcctgttggagatttccaccttcccgcttgtctgtggatgataaggagtggcgaccttatgtcttactccatgtttctttaggaggttctcaaaaaccttgttgatgaaatgctttccaccttcactgattactacccttggaactccaaatctcgggaagattatggttttgaacagcttcaacacaacttttgcatcgttagtaggactggcaatagcttcgacccactttgatacgtaatctacggctaccagaatatacttgttaccatatgaagatgggaatggacccataaaatagatttcccatacatcaaagatctccacttccaagattgggttctgaggcatctcattcctcgtgctgatgttgcccttcctctagcatgaatcacattttaagacaaactcatgagcgtccttaaacattgttggtcacgaaaagcctgcttgcagaatctttgacactgtcttgaatatcgcaaagtggccaccaaaggcggagccgtgccaatgtagcaggataccttctacctcatcttctgagatgcatctcctgtaagatcttatctttggagagggtgtagaggtaaggctcatcccagtagtaatggtgtatgtcactgaaaaactttttcttttcataactggtcaagttgggaggctctactccgcatgccaaataattgacgtgatcagcataccacggagatcttccctcaacagcattcagttggtggaactctttcccgcagtaactaccaccaaagaattttataaccatgagttgctcttttggcattaagtcgtctatcggaataggttcttcaattgacagatggtcagctgcaccattttcaatccctttcttatctactatttccatttcaaactcttgtagcagaagtatccacctcaacagtcttggtttagtatccttcttggcatacagatgctttaaagctgcatggtctgtatagacaatgaccttggatccaatcaaatagcttctgaacttctcaaatgtgaatacaacagctagaagctccttctcagttgttgcatatcttccttgagcttcatccaacgtcaagttggcgtaatatataacgtgaagctccttgtctattctctggcctagtacagctcctacgacgtaatccgatgtatcacacataatctcgaacaaatagtcccaattatgagctcgaacaacaggagcagataccaaagcttgcttgacggtgtgaaaggatttgaggaaattctcatagaattctaacttggtccccttgcacaatagtctagttaacggcctgtctatcttggagaaatctttaataaatatcctgtagaactcagcatgaccaaagaaacttctgatgtctttgacagtttctggtggctgcaactgcatcatcactttgatttttcccttcttaacctctatacccttctctgatatcttgtgacccaacactatgccttccttcaccatgaaatgacacttttcccaattgagaacaagattagtctcttcgcacctggtcaataccctgctaagattcaacaaacatgaggagaaggagaggccatagaccaaaacattatccatgaagacctccaccatctcctcgattaaatccgaaaatatagaggtcatacacctctgaaacgttgcaggagcattgcataaaccaaatggcattctcttataggcaaaaattccataagcacatgtgaaagtagttttctcttgatcattagggtgaattagtatttgaaagaaactactatatcagtcaagaaattaatagtatgggtgattagctaagagttcaagcatttgatcaatgaatggtaaaggaaaataatctttcctagatgcagtatttagctttctataatcaatacacatctatacccagttatagttctagtcgggatcaattcatccttttcatttttaacaacagtcattccaccttttttagggacgcatgcactggagaaacccaagtactatcagaaatatggtatatggcaccaacatcaagcagtttcaaattttcttttttcactacttctttcaaattaggatttaacctcctttgtggttcaatactagaataagattcgttttcaagatggatcctataattgcataactagctgaaattcccttaatgtcagataatgaataaccaattgctcttctatactttttaagttcagacaacatcaggttcacttcatcatcatttaactcagcattaacgatcatagggtaagtagagtttgaaccaaggaatttgtaccgcagaccttgaggaagtggtttgagatcaaccttcggtgctttaagtacagaccagtcatctgaagttagaatgatcagctccatagtgtcactgatagatgcggtcgagtgactggtcgagtatgtcttcaagtgagcaggttgaacctttgttgactattcttcattcataaccattacctctattgctgccccattcaattcttcaaagggttctgattcttccatcactttatgtgaatctaacagcttctagtagcccaaagtctccaaatgcagaaatccatcttcacaattcttggtcaaagcactattaaggtgatcttcttctgcaagctcttccagtaactcttcagctaactgatccatctcttcgatccaaaagagttgcccttctatagtaggcttcttcattgcatctttgacgtcaaaggtcatcctaaaatctttgccaaggtttagatcgatcttccctttcttgacatcaataatagctcctgcagttgctaagaacgatcttcccaaaatcaaagggtctttgggctcttcatccatttctaggactacaaagtctgtggtatctctacagctccaatcctgattggtaggttttcaagtaaaccatgagggatccttactgatctgtcagctaagataagggatatgttgcaagatttctattgagtgagccccaatcttttggcaacggagagtggcatgagactgactggtgctcttaaatcacataggcatctgttgaaagccaatggatctaaagagcatggtagagtgaatgaaccaggatcactaagcttctttagaatgatcttcttctgtataatcgcactgcattcgtgactcaatactaccatccgttgcacttcttgaattctctccacgatcaagtctttcagaaacttgtgggaatccgggataagtgctagagcgtcgacaagaggtatccttaactctacttccttgatgttcttggcaaacatagctctatacttatttgccagtgctttcttgtgacggccaggaaatggaagatggggtttgtaaggaggaggaacaaagaccttttctttgttcgtgagagaaactagttttggagcagttggtgatgttagtgggaatggtggtcgagtaacgtggtctagtggatgctcgagtggttggtcaagtgactggtcgagtgcctgctcgagttgtttttcgacttgatctttactgagactgatatcctccccatcattatcttcactgtcctcagtgactgttttaggttcctctctgattggaagtgcttttccattatgatgggtgataccatgagcatcagcataatcttttggattctgaatcgcttttcttggaagttggcttgtctgtttctgagcggaagtagatgtagaatatccctccaaggatcggactttggaattcagtgtctccaccttgacatttatatcattgtagctacagtccagcttattgtgtaattcagatatcttcttaacaatctccatggagccagatgcttgtccttggagtagctgttgtagcatttgtttcatgtcagtatcaagagcagaaggaccttggtgttgccgaggtgcaaacccaagtggtggttgcggctggtagttcttctgaaatggctgcttaggagcaaagccttggttgtagggaacaaagggtttgctctcaccatgcacttgttgtggaggatacacttgatcctatggattagcaacattggtgcctcggtaagagaggttggggttgttagtcttgaagttgttgtaccctttgtagccaccttgattgttgatgtagctaacttcttctaactggttcccctccccatcttggacctgatactgctcatcatcaacaaggaagtgcacatgcttctgctggctaagaagaatcctatccagcttgtcattcagagctttattctccttcctatgtttgtcatcaaagtcgattgttcctctgatggtcctgtcgcagtcctcgttgtaatttccatctgactgagctaaattctgaaccaattcccagtcttcttgaacatttttattctggaaattcccattgcttgtagtatccagaagcattatgatccatggtagaacacgtctatatagagtgccgagcagagaggctttcttgaagccatgatgagggcattggttggtataacccttgaaacgctcccatgcttcacagaagctttcaccagtcttctgtgaaaaaccagaaatctcatttctgagtcttgcagttctggcgttggagaaaaactttgcctgaaaggccttcttgcaatcatcccaggtggtgattgagtcatggggcaaattcttttttcagatgtgtgctttgtcgcccaaggagaatggaaacaaccggagattgaatcggtcatcactgacaccgttgattttggttaggtgatagagcctattaaattcatccaaatggtcgatttgatccataggcagaccatggaacttgttcccctgaatcatcgagatgagacctctcttaatctcgaagttgttgttctggatagcaggaggtgcaattcccatcctcaaacggtgatcccttagtgcatctctagcaccaatgttcgcaggtccattttgttgattttgttcatcagccatttcaagtggttgttggtgttgtacaaggtcgactatgtttctcctttctcttagttcgcgagctatgcgatcaatgttatcgttgaaaagcaggttatggttgccggttgatcgagttcgcatacaggagaggtgtacctggatcaagaagacaacaagaaaaacacacagttagtacttgaagtgaaaattgaaaaagaacttgatgtaagcaagtctgaaatcttaaatataacaaacaaacacccaattgacaacggcgccaaattgataataggtttttagtcaattaatcctaaaacactatcctgtcgttgtagtattttatgttgtcaatctaaatgggtgtgatgctagcaatcaagatgcaatcagagtttacagagtcaagccaagcaataacaggtttgggatattttggtatgggccgaaaaacatttatatattgggccgaataatgttttgtaattgatttagtaatgaattatgtttgtaatgaattatgtttttcttattttggacagataattaaattattgtttgaagacacgttgtcttttggtgcaaacccaaattgttgaacattgtcggtcgatcgacaaatctgtagcaaaattcacagataatccacctattttagtctctgttatactttgtatatactttacagatttagttctataaagaagtatgttttttgttgcatcatatattagttttttttgttttcaaatctgtcgattaaatttataatctttgaaataatttgtttgataatagatcgtccccaagaattgtcaaaaaacaggatctgctatgggtaattattttgaaatctatatatagtcgtagatcaaatgagacggatttgatttcgttttcttttaacactacagctaacaaaatcattatgtgctacaatttcccgtgttccgaactaaaatttcttgataataagctactcgaaacacgatagaaggcttagatgttcaccttggagatttccagaattctaaatgtaaagattcctttgacttgaaaagttttcctcacctaaattatacatcgtcacttgtttctaagaatgttaaatgaaaaagattagtctttggaacttcacagaaagctaaatgaaaaagattagtttgatgttaagtacaataatacctttgtttagttgctaaaaatatatacatatatatatatatatatatatatatatatatactgttattcttaactgttgaagttgctaagtacctactcttcacctattcgaatttgatgaataaacatagttcactttgttttatcattgtatgtcgatggttttgattataataaattgcttgcttccataaactatattatcctattgtttgataagcagtaacaaacctaaatgttgtatatatgaaattgttaacttcataatacttaatctgaagttaattagactgaaaacttttagaaaacaaagttaacctgattagaaaataaagtaacataaaattaacatatgcgatttggctgcaatatcatttcttctcttcattactcatttaataacaccaacgcttgcctaatgcaaagaagagctagacaaataaatcaaaagaagagctagacaaagaaatgttagaccatttgtttcctcaatcaataatttatagtgagaggaatcaaacttgttactaatctttgattaatttggtaaacgttgaaggtgagtgaatcaaacctaatttagtataaattaatttggtatcaattaattttttaaaaaattatgagtgatgagaaacagttgttcaacttttgaaggtgagtgtattgttcttgaaaatattgggcatatatttatactaattactaaatcaatctcgtggagcattaggttaggttgagagaatatttttcagtttattaggatattaccgaataagttatgataaggtatattctttctgcaaaaggatcaatttaattaaatggattagttttggtaagtcagtatattgtcaaatgataattagtttaggagatgaatctatattctgtacaaaggcaagaaatattcggaaagcttaaatatgatatgtagatattcagaaatgttaattagttaagagatatatatatggtatcttttgaaagttacgatttattgttgattgcgttatagaataaatatctgttaatatgaattcgaatgtggtgttgttgctgtatttttgcattggaaaacggatattatgggataagaatatattcgtttagctaagattttattgttgattgccattagtttttgaatctaaatagttgctatttatttgcgtgcaggggagtgtcgtgttattgggtcatatttggaatcattggcccatatagtccagtgtaccaatctttgaatacgactggcccgataatagatcagggattcgaaatagttccgcgtttttttcaatatgttaaatgaccagtatacccatggacgaatacttgatttagtcttagacattataaaaaactactcttcaaaggttgtaaagtttcccaatgatttccaattaataatatagttgatatgacaatccttcactacattattagttacctaagattgcattatctacaaccataacttacccgactattcattgttgtttatttaagagtaggaatttcattatttttgaaatacgtaattctaagatatgtctacaccaaatatacctgacgatttgctagccaagatagccaaaaatggctaacaaatgttggtggtacctcagacctctcttaacttcaaggcctcgtggaagaaacatagtctaccggacggatgccctcaaagatgctaatattacagcgtgtacagtgatcccgatgatttccatgcggcagatgtaacgcccgtgaaccggataatcggttagggtttgtttcaattgtaacgcccgtgaaccggaaaatcggttagggtttgtttttaaatcgtccggtttaattggttgggttaattggaaaccctatagtgtgcatataaaagaaagaaactcgaaattagggttttagttagccacttttcgttttataaaggagaaaaagagagagaaggagaatgagcagaatcgttagggtttgggagaaatctgtttcgtcatatcaaatcgtggtaaaaggtaacaaaattaggtagagttatttccaagtcgtttattgttattctccagtttacagaacttgatttggattacaattggttgagttattcgcagtttcgtgagacacgttttctcagacgcgaattaggaccagcggggattgaaattgagatcgtggtctcgtctgttttccgatcaggacgatattttgtgggaagcttcgtgacgtctagggctaacgtttgaccggagcgatttaatagttaacggttactttgtattttagggtttcgtgtttgaggttgtttgtttctgtttttcttgtccagtttgcttcaaggtttcttttggttgtgacttgttgtacgacgtttctggactgtttcagacgcaaggagagtctctcctgagtttaattgttattagaatcaatttgttaaggtgagtgcgtgaccatgagcttatctgagcgattgggttgtgtaatttgttttgtgtgatgatatgtaggtgtggtgaatgtgttttgggtgaattgttcaatgactggtttgtttgtattgtgtttgtgattatacccttttatttgcttgtgtgtatagctcgtagatgggaggatcgactcactaagtatttatgataatacttacgcatctcattgtgttgttgatgcaggtaaagataaagtgtgatcgttgaatcatggcaaggaagagaggatgatctaggaactcgtttgttttatttttggtgtttttggttattggaacccagttaggattgttagttattcttggttttgttggtcaaattatttagtgattcataaaatgttatttttgatttgcggtttaattgttattttattggttggtttaattagatatttatgggaatatttaatttattttaaaaaaatgggttgggttgtttcaatttggtatcagaacgatcacggttctaggatgtgtagaataattaattgataaattattttcctgatgattgatgtgggatgagctagggtgttagcatactgaggattagttatggagtgtttagtcaattttgggttgttggagtcctagcatcatcttcttcgagccttaaatgagattccacggtaagttgtttgtgatatattcgtttgttttagtttcttagccatttgttcttgagtagcgcagatggttagaggagctggagttcgtggtcgtggtcgcggtaggggacgagtcctcgagggtaccggcgagagtgatggccacagtgccacacttgagcagagtgtgggttcgcagcctaagtttgtggagcccggggttagggacagtcttggtgtcgatatagctggtgcagccggagtgtgggctggtggagctggtgtcggtgccggtgtgcatgccattggtgctgagggcccaggagtgatgggtgccgcagccagaagagcctaggttccagagttggagcggttaccaggtgtggtaccagtgcaggctcgagttgcgccacgagtgggggaggtgcagcagagggctgcggttgctgaggaggttccatcttatttgaggatgaaggagtagttgcagaggattggcaccgagtgtttttctggtggtactagtcccgaggaggccgacagttggaggtcgcgggttgagcggaacttcggttcgagcagatgtccaacagagtatcgggtggatctagaagtgcattttctagagggggatgcacatttgtggtggcggagtgtgactgccaggaggaggcaggcagatatgtcttgggcaaattttgtggctgagtttaatgccaagtactttccgaaggaggcgctcgaccgtatagaggcgcgttttcttgagctgacacagggcgagcggtcggttcgggagtatgaccgggagtttaaccgacacttggtgtatgcgggtcggggcatggaggatgaccaggcctagatgaggaggttcttgaggggacttcgacagaatttgagggtgcggtgtagagtgtcgcagtatgccacgaaggcggcactggtggagacggctgctgaggtagaggaggaccttcaaaggtaggtggtggcagtgagtccagcggtacaaccgaagaagactcagcagcaggtgcacctaccaagggcgtcaagcctgcgcatgggcagaagaggaagtgggatcatccttccagagctggacagggtggtcgggcatattgtttttcttgtgggagccttgaccacaaggtagcggattgcacgcagcgagctgagacgagggagtgctaacactacagggagaggggacatctcaggcaaaattgtcctaagctgtagcggatgacagtggctgtaatacagccggcggtgcagcacggagcgctggtgcagcagggagtgcagcagttagcacatattgcagcagcaccgcagggttacactacgcgtgagataggcggtaccagcaacagagcgattactgggaccttattagtgggcggtgtagaggcccatgtgttgtttgactcaggagcatcgcagtgcttcattaccccggagagtgcctcgtgcggcaacatccgcggggatcctggtgagcagtttggagccgtcaatgttgctagagggcagtttctagcggttttggggagagcgaagggtgtggatattcagattgcaggggagtcgatgccagcaaatttgattatcagtcttgtagaattgtattatgttattctaggaatggattggttggatcattacagagtacatcttgactgccaccgtaggagagtttttttttagcggctagaggggaggttggtttatcagagagtgagacctacctcagggagtctcgtcatctcagcagtgcaggcagaaaaaatgatcgagaagggctgcaaggcttacctggtgacaatatctatgccggagtctgtggggcaggtagcagtgagcgacattcgagttgttcaagcgttcgaggatgtgattcaatcgttgcagggattaccaccatcacggtctgatcctttcacgattgagttggaaccagggacagcgccgttgtctaaggcaccctacaggatggctccagcagagatggcagaggtgaagaagcagctagaggatttgttgggtaagggattcattcgtcctagtacttcaccttggggagcgccggtgttatttgtgaagaagaaggacgggagtttccgcttatgtattgactaccgggggttaaaccgggtcactgtgaagaacaagtaccctttgccaaggatcgatgagttgttggattagttgaggggtgctacttgtttctccaaaatcgatttgacgtcgggttatcaccagatcccgatagaggaggcagatgttcgtaagactgctttcaggacgagatatggacattttgagttcgtggtgatgcctttcggtttgactaatgcacctgcagtgttcatgaggttaatgaacagcgtgtttcaggagtttttggatgagtttgtgatcatctttattgatgacatcctggtgtattctaagagtcatgaggagcatgaggtacatctgaggagagtgatggagaaactgcgggagcagaagctgttcgctaagttgagcaagtgcaggttctggcagagagagatgggttttctaggtcacattgtttctgaagagggactttcagtagatccagggaagattgaggcaattagagagtggcctagaccgacgaatgccactgagatcaggagttttcttgggttggcagggtattataggaggttcgtcaaggggtttgcgagtatggcacagccgatgactaagctgacaaggaaggatgtcccttttgtgtggtcaccggagtgcgaggagggtttcgtgagtctgaaggagatgttgacgagtacaccagtgttagcattgccagagcatggagagccttacatggtgtatactgatgcctcgagagttggtttgggttgtgttctgatgcagcgtgggaaggttattgcttatgcatcacgtcagttgaggaagcatgagggcaactatcgtactcacgatttggagatggctgcagtaatctttgccttaaagatttggaggtcttatctttatggcgggaaactgtaggtattcacggatcataagagtttgaagtatatattcactcagccagagctgaacttgaggcaaaggcaatggatggagctgttggctgattatgatctggagatagcttaccatcctggtaaggctaatgtggttgcagacgcgttgagccgtaagcgcatgggtgcagctccagggcagagtgttgaggccttggtgagtgagattggtgctttgcggttgtgtgttgtggcacgagagccattgggattggaagctgtggatcgagcagatcttctgactagagttcggttggctcaggagaaagatgaggggttgattgcggcttctaaggcagagggctctgagtatcagtttgcagctaatgggactattcttgtgcatgggcgagtttgtgtgcctaaggatgaggagttgcgaagggagatcttgagtgaggctcatgcgagcatgttttctattcatccaggagggactaagatgtaccaagacctcaagcggtattattagtgggtcgggatgaagaaggatgtagctaattgggtcgcagagtgcgatgtttgccagttagttaaggctgaacatcaggtgtcgggtggcctgttgcagagtttatccattcctgagtggaagtgggattttatcacgatggattttgtggttgggttacctgtgtcgcgaaccaaagatcctatttgggtgatcgtggaccgtctgactaagtcagcacattttctagccatcagaaaaaccgacgcagcgacggtgttggctaagaaatatgtgagcgagatcgtgaagttgcatggagtacctgtgagtattgtatcagacagggattccaagtttacttctgcgttttggagagccttttaagcagagatgggcactaagttgcagatgagcacggcttatcatccacagacagatgggcaatctgagaggactattcagacgcttgaggatatgttgcggatgtgtgtcttggattggggaggtcattgggcggatcacttgagtctcgtagagtttgcttataacaacaactatcatgcgagtattgggatggctccttttgaggcgttatacgggaggccatgcaggacaccgttatgctggacccaagtgggggagaggagcatatatggtgcagattatgttcaggagagcacggagaggatccgggttcttaagctgaacataaaggaagctcaggatcgacaacggagttatgttgacaagaggaggagagagcttgagtttgaggttgggaacagagtgtatctcaagatggccatgttgcaatgtccgaacaggtctatctcagagactaaggtgagtccgaggtacatgggtccgttcaggattgttgagcgggtgggaccagtggcatacaggttacagttgcctgatgttatgcgtgcgtttcacaaggtctttcatgtgtcgatgctgaggaagtgtcttcacaaggatgatgaggtgttggctaagattccaaaggatcttcagcccaacatgactttggaggcgagaccagtgagggttctcgagaggaggatcaaggaacttcggcggaagaagattcctttgatcaaagtcctgtgggactgcgatggtgtgacagaggagacttgggagccagatgcgaggatgaaggcaaggttcaagaagtgctttgagaagcaggttgctgcatgagtttgcctatcattggtttccagtttcagtgttattgagtttttgagcttttgagttgttgttcttatttctctttcatttgtattttcgtttggagttgtaacgatcatgacattgatgattaataagatgagtatttttcttggttttgacttgagttgtcttatttaagaatgtgttgtgcaatttccaaaaatggaaagtttcccaaaaaggacttgtctatttttggaaagtttgagtaaacaacctaagagaaaggtgtgtttacgagatggccgggagttggtcataaggatgttctcgaggggatatgatggatggtgaggcataaagatgtcttacgcgaatccatgagagagtctggagatttgctcggaagcatttagtattgtttgctcgagggacatgagggtcccaacgactcgtgaggagctgggtatgctcctgaggtaccggtaactcgagggacttgatgtatttagagtgcgaggggtacggtggcttcgggtgacgatccgagagcacgcttcagggttacgatccgagaacacgctttagggtggcgacccgagagcgagttttgtggtattgttttctccaagtgtcgtaacttgatgactttgtggctgagagtaagacgacacaactcaaagtttgactttgagtggggaagataatatgtgtgatacccgagataccgtagccaaggccagagagtgacggtttatgctcaaagattgcggtctgagagtggagagtgagttgtgagcaacaatgactagtaaatcgtgagtatatcgactggataaagagacctagagggggtctggttggagggagtgcggaccgtagtgatggttgcacggagtccctcggagtggaagggtgaagctagattcgtggacgaatctatgttagtgggggagaattgtaacgcccgtgaaccggaaaatcggttagggtttgtttttaaatcgtccggtttaattggttgggttaattggaaaccctagagtgtgcgtataaaagaaggaaactcgaaattagggctttagttagccacttttcgttttataaaggaaaaaaagagagagaaggagaaggagcagaatcgttaggatttgggagaaatccgtttcgtcatatcaaatcgtggtcaaaggtaacaaaattaggtagagttatttccaagtcgtttattgttattctccagtttacagaacttgatttggattacaattggttgagttattcgcagtttcgtgagacacgttttctcagacgcgaattaggaccagcggggattgaaattgagatcgtggtctcgtctgttttctgatcaggacgatattttgtgggaagcgtcgtgacgtctagggctaacgtttgactggagctattgaatagttaacagttactttgtattttagggtttcgtctttgaggttgtttgtttctgtttttcttgtccagtttgtttcaaggttgcttttggttgtgacttgttgtaggacgtttctggactgtttcagacgcaaggagagtctctcccgagtttaattgttattagaatcaatttgttaaggtgagtgcgtgaccatgagcttatctgagcgattgggttgtgtgatttgttttgtgtgatgatatgtaggtgtggtgaatgtgttttgggtgaattgttcaatgactggtttgtttgtattgtgtttgtgattatacccttttatttgcttgtgtgtatagctcgtagatgggaggatcggctcactaagtatttatgataatacttacgcatctcattgtgttgttgatgcaagtaaagataaagtgtgatccttgaatcatggcaaggaagagaggatgatctaggaactcgtttgttttatttttggtgtttttggttattggacccggttaggattgttagttattcttggttttgttggtcgaattatttattgattcataaaatattatttttgacttgcggtttaattgttattttattggttggtttaattagatatttattggaatatttaattatattttaaaaaaatgggttgggttgtttcagcagaccatgatccaaacaacatctacttcgaaggtcgatatagaccctttttcgaaaggtgtctggaggctggttacctgattgttatttaccatgaaggactgcatctagacactattttacttttacaccgaaatgtatcaaggcacgtcgatgcaaccctggcctgtgcagttctttgcatatatgacggtaatactcatatgggtggtctgtaccttcggctttttgcaagcaaccattatgcattgaaattagaagaaacacgtgacatgtgtgaggagttgcgagaaaaaataaagaaaaatggaattattttaaataacacttacggcgcaactttttcgtaccctgagtgttgggtattcaaacgcctccttgcgcgatgatgtgttacatcagatttggatcctttaagaatctttgcaaagaatattacctctggtggtttgtaagaagaattagaaaaaatttctagttctttctttcgtaacattcctttcaaatttctaagtttttgtgtcataatatgtgagatttgagatttattctttgattatcaataatgcattttttttttctctatatacttccttgtttcctaataattccatgtattatctcatactgaaaggattctcacccttatttaatacctcatactttagcaaacaaacatcaaatcaataatatattaatcaaaaaaattctcctaacctatacgtatacatgtataatttattttacacaatattttgttggtttcaaacaacaaatatgggaaacgagtttcgagatgctagtaaataatgaagtaaatacaagattttggctatgagtagatagtgaaaatgcagcggtcgcaatgtttgatacagatgaactgtgtctttgttcatattcaaccttataaattcaatgtaacgtaaaacttatttaaatattatttaatattcacgaaccgtttgtggttcaatattgtgaactaaaaatgaagatttttgcaatcattctcttttttatttgattttacaaattttaaaaataaattatatataatttatccaaacatacatgttatccaaattttcttttgttatatattatattataaaatttaatttgtttatatacttattagcattttatttggtatctataatgctaaataatgaataatattataaaaatattcttttttttttacagctattataaaaatattttaaaactgaattatataaatacatgttcaaaaatatgttaaattaatattgtaaatctaataataattttttattatatattatactttatttgcaattaatatttttcacaataaattatttcatctacaccgtctgatccgtttttaccattcaatacatattttgacgcattctaaccgcttgatccgctttacttctgcttgaaacacctaatccgcttgatccgctttaattctgtttgaaacacctgatccgctccaccaaatatgttttctacattcagagccttcgctttgttattaattacatactttcaagctttagccatagatatgacctctgtcttgtcacataaatctctctaagtacacgatttccaattaatgtaccgaaccgcttcgtgtcacatacgtaaactatttttctcaagattggctcttttgagttctaattaaaagctgatgacaaaaaaaaaacaaatgccctaccagttacattcatttcgttctcccctataaaaacgatatctcacacacttatttattagcatcacttattcttaaacctcttccattaactccagcaaaatctgtatacctccttgatacgcaccatgccttttccagcaactcctccaaccaaaatgtaccttggaatacaattgccaaaccctgttaccatcctcgtgaactacctttctgtgaagcagacccctatcgagacactctggaacttggtcaacacaaaggacatcaacgccatagcgatggacgatttcatgacttggccgtacttgcttcaactagattctccctcccatcttgggcacatgtaatgaggagacaacctttgtaacgtcctactagatgttttccatctacgatagttaccttcctcatatacttcaccccgtttatacaagccccaagagatacaaatacatatttaaagtgatgtttaccatcagcttcatgtgtagagtgtaggtgagttatcgtacctggattagctaatttaagaagatacaaataggtaggcaaaaacctgtaactttttatatcatccccccttacattttccactacaacatctttagctctccaagctgtagaatatgaaatccgaacattgagatcatttaggagcaactgttgtaaatcaacagctctcggacccccttgcgtagaactatatctgctcttcactacctctccgagaaacttataactagcatatttattataattcatgcgagtgtcgatgtcacacgtatgggtggtatcatactatgtgattttgaaacattctgagttcttgacgacttgagcagtcaaatgtaatggacaagtatcatcaatgcaaactatctccaatcttgtaggccatgaccttatagcaaaagtattgtttgattgcgagataaagacattgtttgttgtatgacttttctgttcttagaaacacaccccacatacaaagccgcacatgtcgtactgagttcaatttgtgtctgatcggctcaaaaattggctaaatcatcgaataccgaagcagcatcattatcgagaatctccaactcgtcaccatgtagtgaagaaaatccattatacacttcgtaagcctcaactactgttgatgcaggtcaaattaccctaagaccactctctcaaataagagatcgttgatagtacttaaggatcgaattccacaaagttctttcgttcacacgatgagcctaagtggtaagattaattagctagatgagtgtaacaaaatgaaaacaaagtaaataagcaaatagcaggttggttggtagatctagatatcagtaggttgttatcaaaccgttcttaaactcaaactctaattacaggataaccggtgatgttctgtgaaactcattatgcctagagctaagattccaggtgatgtgccgggaaaatcctatacctaaacatgcatgcgaaacgagttcgataagttcaccttagtagataggccaattcttattagaaacctatattccaggctcatcaaatagtgattctggtaacaaatacctatggtggatatgtctattatctcatatcaagttctagttaattactctaaaactagcattaagaacaactaaagatgaagaattctacttataacctagcaagggggcgatctactaaatcatatgaatccccactgagaaaccctaaccctaacaagcaaactactcagacatgatggatgaaacaaacaacatgtatgaataagaaatcataaacaaatcaatagagaaaagtgttagaaaagatctctttactcttattgaaatctctgatgaaacagggatgaatagcttatgaaagtgctttgggaaaagacttagttgcaagaaaatttgataaaaagcttgatacgtctaaacaatgacctttaaaacaatatatatgacctaaaaaacgtgcagtgactaataatgaaaatagagaagtcttctagggtaaatttccaatttttcaaacctaaaagcgtgatgtacttctctgggccgcaactggtgtagctcgacaccaagagtgtgtcgatcgatactctcgacttgatctagaagtgaaattgtcctttggcttattttcttcagcttttgctcccaaatgttttctcatctccattgttgtccctctccatagaatacttaaaaagactctaaaaagtctcaagaagtaaccaaaagactcaaaatcatatatctagaacatagttaaaaacagtaaaaaaaaaaagggttagatcaactcccccagacttagcttttgctttccctcaagcaaaacacaaaagccgatcccgtggaagaggttttaaaaacaaagaaactcccaacattctctagtcgatttccaagatcattctaaacaaattcatatgtctagcaagtctaatcaaatcctaaccaacatgtacttctccgcaagcctacacaacattctagattccatacctaagttccacagctatatccaccaggctttcattgttgggtctcatcaagcaagctaatattcaagaaccgtctagactcattcatgtactataccatgataaatcgaccattctttatatttttttatcttcttttggtattctttctctcccagacttattctttttgatgagtaaacaaaggtgaactagcatagtggattgacactctcggcatatttccaacctttgtaattgattattcctaataatgtataatcatgtggtcatggaaaacattcctactcctatacactaccgaaaatcatctcaatctcttgcttctttttttttataaggaaagaggaatactttttttcatattggtcttaatatcaggtatatatgaacaaggagtcaagttctatgaatactaaccgttttgataagataataggaagagcagtgagattagctccggccttaatggattgtgttggaaaccaggatatcctcaagtctatcggtttgccatctggatattccaatagttgaattgaatcgaacctgcatcattcatcaaccagacaataatctaaagacatatagatcatgattcctagctagactaaacaaaaacgtgtattttttttagaaaataaaaatatgacttaataaacataaaaacgagaaataataagaataaaaaataaaagcatagttaataagcgtctcccctatacttaaacgtcactgtctcagtggcattcaaacgcctccttgcgcgatgatgtgttacatcagatttggacccgtcaaaaatctttgcaacaaatattacctcttgtagtgtgtaagaagaattagaaaaattctctagttctttctttcctaacatttctttcaaatttataagtttttgtgtcataatatgtgggatttgagatttatactttgattatcaataatgcatattttttttatctatatacttgcttgtttcctagtaattccatgtattatctcatactttaaggattctcacacttattttatacctcctagtttagccaaaaaacatcaaattaataatatattaaacaaatatattctcctaacctatacatatacatgtataatttattgcacacagtattttgttagtttcaaacaacaaatatgagaagcgagtttcgagatgctagtaaatgatgatgtaaatacaagattttggctatgagtggagagtggaaatgaagcggtcgtaatgtttgatgcagatgaactgtgtctttgtgcccattcaacattataaattcaatttaatgtagaacttatttaaatattacaaaatattcatgaaccacttgtggttcaatattgttacctaaaaaatgaagatttgcaatcattctcttttttcatttgattttacaaattttaaaaataaattatatataatttatccaaccaaacatgttatccaaattttcttttgttatatattatataataaaaatttatttattacttattagcattttatttggtatctataatgctaaataatgaataaaattctaaaaatatttaaaattgaattatataattacatgttcaaaaatatgttaaattaattttataaatttaataacaattttttattgtatattatactatatttgtaattaatatttttctcaataaatcatttcatttgcaccgtatgatccatttttatcattcaatacatattttgaagcgttctaactgcttgatccgctttagttctgcttaaaacacctaatcctcttgatcggctttaattctgcttgaaacaccttatccgcttgatccgctccaccaaatacgctttgtccattcggagctttcgcctggttattaattacatactttcaaattttagccatagatatgacatctatcttgtcacataaatctccctaagtacacggtttccaattaatgtaccgaaacgcttcatatcacctacgtaaataagctttaggagcgctaaagaataatccaaatacaccatacttaccataatagttggagatatttcgctcaaggtgtactgcacatgctccatgatgagctttcagataaatcacactgaggcctttatatatagaagaatgtatgtctaatacaatcattaaatcttcagtgtcttgaacaatgtcagctaatttatcaaagaaccacgctcatgaagcattagtctcaccatcaacaacaccaagagctattgaaaatatttgaaagtttccgccttgggcacatgtaatgaggatacatcctttgtaacgtcctactagttgtgttccatctacgacagttacctttctcatatacttcagaccttttatagaagccctgagagatacaaatacatacttaaagtgttgtttactatcagcttcaggtgcagagtgtaggtgagttattgtacctggattagctaatttaagaagatacaaataggtagccaaaaacctgtaactttttatatcatcctccttacattttccactgcaacatctttagctctccaagcggtagaatatgacatccgaacattgagatcatttaggagcaactgtggtaaactgacagctcttggacccccttgcgtagaactgtatctgctcttcactacctctccaagaagcttatcactagcatatttattataattcatgcgagtgtcgatgtcacacgtatgggtggtatcatactatgtgatttgaaacattctgaattcttgacgacttgagcagtcaaatgtcatggacaagtatcatctaggttgcttatagcaaaagcattgtttgattgcgagataaaacattgtttgttgtatgacttttctgttcttagaaacacaccccacatacaaagttgcacatgtcgtactgagttcaatttgtgtctcatcggctcaaaaattggctaaataatcaaataccgaagcaacatcattatcgagaatctccaactcgccaccatgtaatgaagagaagtcattatacacttcgtaagcctcaactacggttgatgcaggtcaaattaccctaagaccactctctcaaataagagatcattgatagtacttaaggatcgaattacacaaagttcttttgttcacacaatgagcctaagtggtaagattaagctagatgagtttaacaaaataaaaacaaagtaaataggcaaatagaaggttggttggttgtaaatcaagataataaaacgtctggtttagtgtattctgagaaaacagatgattagtagatctagatataggtaggttgttatcgagccgttcttaaactcaaactctaattacagaataaccggtgatattctgtgaaactcactatgcctagagctaagattccgggtgatttgccgtgaaatcctatacctaaacatgcatgagaaacgagttcgataagttcaccttagtagataggccagttcttattacaaacctataaaccaggctcatcaaatagttgttctggtaaaaatacctatggtggatatgtctattatctcgtatcaagttctagttaattacactagaactagcattaagagcaactaaagatgaagaatcctacagataaccttgcaagggagcgatctactaaattatatgaatccctactgagaaatcctaaccctaacaagcagactactcagacatgatggatgaaacaaacaacatgtatgaatacaaaatcataaacaaatcaatagcaaaaagagttagagaagatctcttcactcttattgaaatctttgatgaaacatggatgaatatcttatgaaagtgctttggaaaaagacttggttctagaaaacttgataaaaagcttgatacgtctaaacaatgacctttaaaactatatatatgacctaaaaaacgtgcagtgactaataatgaaaatagagaagcattcgagaacaaatttccaatttttcaaacttaaaagcgtaatggacgtctctaggccgcaactggtgtagctcgacaccaagagtgtgtcgatctacactctcgacttgatctaaaactgaatttgtcctttggcttattttgttcagcttttgctcccaaatgtcttctcatctccattgttgtctctctccatagaatacctaaaaagactctaaaaagactctagaaataacaagaagactcaaaaaccgacatctagaacatagttaaaaacaagaaaaatagggttatatcaacttccccagacttagcttttgctttccctcaagcaaaacacaaaagccgaacccgtggaagaggtttttaaaacaaagaaactctcaacattctctagtcgattgccatgatcattctaaaccaatccatatgactaccaagtctaatcaaatcctaaccaacatgtacttctccgcaagcttacataacattctagattccatacttaagttccacaactatatccacctacataacattctagaaaacaaaaatatgactaaattaacattaaaaaaatttaataagaataaaaaataaaagcatagttaataagcgcttcccgcagacttaaatatcagtatctccagtggcattcaaatccgaagagagcggaaaaaataaatataaaagaaaagaaaaagaaaaatcataccagtgggttggctcccacttagcgtttgtttagagtcaatagcttgactggcggagttcaggacttggatagaggggtggaggacttgtgctgcaatctcgcttttcaaggcggtgtgtaaatcgatactccctccttgtcctgcaagatcaacagaagaaacaagctttcaagaaactcgatgctcgtttaccggtgaaccacacttcgaagattctaaagaagtaatcgaaggaacagtaggagaagagatagtggagtacctatcactgggaattgaaataggtgtgggctgtgaaggaggtgcagaagcatatgtctgtgaatcacgatggtgtcgatcgacagggtgtgtagtgtcaatcaatactgattctctacagctctcatctgtgggctgagttgtaagggtctctgttgttgactctagaggtgaagtctatcagctttaggagatgtgttaatatgaattccctaagaccgacactctttaggttgagtacgagataggctttgcatccaaagcaatcgagagattactatgatgaaaggatgtggggcaaatggtcacacaaaggttgcggaaaagcctttgatttaccgatcttgaactcgtcgttggatattacgcaccaaagagaagaacaagagattgatctaacgtaaaaaggtttttgattaaaagatagttgagtctacaaagagcaaattcaagagtttaaatagataagaagagaaggggaaaagttagtcttggaacaagctccatgataactcggaaaggaaaaatatttaaatgaaagtttgaacaaaaacgacccttggccttccaaattcgtggtcgtcttaatgggcttgggcgggattgataatgggggattttgaagtgttagtcaagcctcattaaaaacctactaaggaaaacccattggggcaaaaccttagaagggaaaaagagtacccaagtaacacctagccaattaccaattgtcttgagctgctattgagttccaaacgcttagtatgacttcgtttggatgcttgcccaagtggttaagaagtccggtaacagcttggttgagaagtctagtcttcgaacgagtcataggactggttggttccgtacaaagcttcctccgctgtaagctgctcctcagctacaagctgctcctcggctacaagctgctccattggttcaagttccaagtcttgtctcacaatatcatatcatgccctcaggtggctaacaggcgaaaggcaaataccctagatgatagattcaaaaccgggtcaatccactctcgtgacaaagacacagataactttaccacttcctaatcttaactctcgttgatgaaacatagcagagcaggctttaagcaacaatctaccaaagtcaagcagtctaaacatccaatttcttgggctagaatctacaaatctctggaattcctagatcagacatccatttgaacgtcttttggacgctggatacctgtggtcgaattctcacattagccagcgaaaaccgcataggggccaacgaatccagaagggatcttacctaatcttaaccacctgactaacctagtgattaccctaatctaatccatcctcaagaaccctaatcactactcaagcaacataattaagaacacaaacccagaaattactctaaatatagcaaaatgtagatctaaacaagataaacaactttgctcagagaactaaatgcaaaaacgaaatagattaagcgtaattaaagtttcaagattctaaaacacaaagaaaaactaagagataaaagcttggtcctttggacaaaccccaaagtgacctatttatactgaaatctcgaaaaccttagatttactagaagacaagagacttgaggcggtttagatgaatgctcaatcttggggaacgagtgttgcaaagtttgcgcctttgcctccatgctccgagtgatcaattggtctagtagttgcttcttcctctcctattcttatgctctgatgtctgtttgagtggggaatgaggaggatcagaagacgctttgaacgatcaacaagtcttgtagagtaggttgcccttgatcgagtaactggtcgagtagaggatcgagtggagggtcgagtagtgttggctgcctcctctgtggcttcctggatcgagaaaaggggtcgactgaattgctctgctgctttcctcttggtttgatagtgtagagggtcgattagattccttgtaagctccttctacacctgaaaacacaccaaaacatgcaatgtatgcaagatgatcccaaatacctaagtgtgcaaaataagctaaatgtgatgcaaaatgatatgatacaatgagtgataactaagctaaatgatgataaacacatgcctaaaatgagtaaaatacagtgttatcaactcccccaaacttatctcttgcgtgccctcaagcaaacaaaaaatcttaagttgaaggagaggtttgaaggtggggattcaaaaaccgaagcatgcatatagaaatcaatgtccaaggaagctaattctaggttgcatggtgatagatccttacttaaaaaccttagccatactcgtcacaatgcaacctaacaactgcctcaatctatttaagcattcacatcaaccaattccttttaacatttattaagcccgaacaatagatcaagcaatgcgatggttatgaactcacttggtttcgggcttaggctaagagacaaaaaatggtccctctaatgatatggtcgagtaacaggggactctcatagaaaacattgagctttagcataatgctaaaggtaaaagctaacagacacatacaagaacagactcccatctacctaactctatcctttttcccattctttctcttttttggtttaagttctaaggggtgcttctttaaaacgattcaagagtctagcggtttggttttaaactttgacaaacttaaggcttttcttctaatcttagcatagaaggcgttttacccttttctttgaattacaatgcctaactttctttgaattccaaaccctttactagactaacactttcttttctatcccccttaagaactctaaactcttactctctttttttcttttcttttcattctcattctctttcccactcattccatacacaatcccaatcccaaatacaagtctccacctagtcctagctaacccaaaaagcgtgggctaggtctacatgaaagactgctcttgtcggctcatacctaacacgttataccaagctcaatcggaaaagacctcacaatcacacaaaaatgttctttggcttgaaataaggttagggtcaggtatgggaaactgctctaagaatgagagtcagctacttggattaacaaagggtggtgaagtgaataatataatccaagtatgtatatggtagccatgagttcacaaacaatgcatagacatgataattgcaaattcagttcaagttctaatagatagggaatggcatcaagttctaatagatagggaatggcaccatcgagcaatatcgatcatcatccctttctctgaagtgagtgtcaatcgacactatagctcggttctgcaatacaacaatttcgcagtcatcttcctcagttgtatcaatcatatatatgttctcctcaggcaagaaatcattaacggggacatcaccttcaatcctaatgcatgacaatagatccgctacaccattctcaactcctttcttatctcgtaccttgatgtcaaattcttgaagaagtaaaatccatctcaaaagtcttggcttagcatctttcttttgtatcagatacttcagagctacatgagtctgtatgaataatcactttagatccaacaagataagatctgaactttttgaaagcaaacactacagctaacaactcttacgcttttgttgcataatttgtttgagcgtcatcaaatgtcctactcgcataatagatggcatggagtttcttatcctttctctgccctataacaacccgaactgcaaaatcactctcatcacacattacttgacttccttgcagagtagagctgtcaatggtctggcgatttttctaaaatctttgatgaatcgtttgtagaaacatgcatgacctaggaaactcctcactgctttgacgtttctaggcgcctgaaggcttgtcatgacttcgatcttggctctatcaacctctataccatgctcagaaatcatgtgaccaagaactatcccatcctacaccataaagtgacattttcccaattcaaaactagatgtttctcctcacatcttcccaataccttgcagagattctctaaacagtcctcaaatgatggtccatagactgaaaaatcatcaataaagacctccatgatatcctcaatcatatccgtgaagatagccatcatacctctctgaaaggtttgcggaagcgttacaaagaccgaaaggcattcttcgataagcaaatgtaccatattggcaagtgaaagtatttttctcctggtcatcgagatgaatcgggatttgaaagaaacctgaatatccatcaagaaaacagtagtacttctgatttgctaacctctccaacatttgatcgataaatggcaaggggaagtggtcttttctagttgcagcattcagcttcctataatcaatgcacattcaatggcctgtaattgtccgagtaggaatcagctcatcctttttgttcttgactattttaactcctcctttgttaggacctacatgaactggacttacccaactgctgtctgaaatcagatagatgatcccttcttccaacaatttcataatctctttcttaacaacatctttcagattcagatttagtcttctttgatgctcaattgaagacttagactcatcctcaaggtggatcctatgcatgcatatatctggaaagatacctgcaatatcatcaagagaatagcaaagagctttgcgatacttgcgcagcttgcttagcagtaaggtgagctctgcgagacttagagaagcattttcaataatagggtaagaagaattttttcaccaagaaatgcgtaccttagccctgctagaagttgtttcaactcgattttaggggcctttgttggatcccaattggcattagtatttagttttggaatcatagatgaaggatcttcttggaatattagttgcatcacatgttcggtctcatctagcatcttagtgtatgtagaagcttcactgtccaaatccgcaatatcctctatggaagagaccaaagctcgctctagtggatactctatctccatctctgaaatactctctgaagctaatgaagtgaaagaacctatcaagattgttctgccctctataatctgtttcttaactaacctgttcatatcaaactacatagtaagatcatcaacattcagccctatccttccttttcgaacatcaataatggctccaactgtgtgcaagaaaagtcccccaaggattaatgggtccttaggttccttctcataagacaagaccacaaaatctgtggaaatcatactagtcccaatcatcacatgaaaatctgtaaggataccaagtggaatgcaggtagagcggtctactagtacaagagtgatataagtaggctcaagatttgaatacccgagactcatagctacagagcgaggcatcagatttacactagaaccaagatcgcatagagctcttgggaaggcatagttattgatagttacgtcgagtgcaaaggtttcagggtctgacagttccctcggggtccattcctaaatgatatcgctgccttgctctaagatcatcataacactacactcattcttattgtaggagagagatgaatggcttcaataagaggcatctcaataatcagtttgtcaatatcatctaatatcatctaaagcttgtctcgccttcttggggtacttacgaaaaagaatcttatgatttgctaactttgcttcagctgagatttgaacattgtttgaacgagctaggtgtcgatcgacctgaggtgggtgtcgatcgacactatcgtgtataagttcctcctctgtgaaattgtcgatttcactcgacataggcaaaacagagttatcaatatcaattggtgtcgatcgacaccctagtgtatcgatcaacaccgaagcttttttgtgactgaagaaggtggggcttttgctaatcgttctatctgatgtactggattgagctgctttccattgccttgtgtgattcatgaatgcgttcttattgtcaatccaattggttagtgaacctggttcgagttctcatagccatgatgtttctctacccgcaagagagtggaggaagagtttgcaaagaaggtaatcagctggtacaccatcttctttgattgaggacacgaagtcttcgaatacttccaaatgatcgagtggtgatacaccaggagaacctctaaactttcctcgtgaaacaagatcataatagacagggtggatagcaaagtcttctctttcgaaagtgcgtggctcgattgctgatcggtttgtgtagaagagatcagctctattaaagtcgcctatagtagccggttggttctgcagatggtctcgatcgacactgtcgaagaattctgccatagaaacgtggataatattctttgggtacctgaaacacaagagaccaaaagaaggagaaacacgtgaggagatgaagtgtaagaaaagtctagacttaaattgacacctactctaatggtgaactaaagaaaacttcggtaacggcgccaaatttgatatagctcaaatattcttaagcttactccctcaaataagagatcgttgttagcaaataagggtcgaattccactgagctctcgatgtggacacaatagacttatggtgattaatattatgccaaaaaaagtaggtaaaagtaaaagataataaaacagtaaattgagttgtagattcaggagattaaagtggtaggtctagggatggtttcaggaaatagataaattgtagatctagctatgaaaatgattgttattgaaccgttattgaactcaaactctaatatcaaaataaccggtggcattccgtgaaactcactattcctagagataagattcccggtgacgtgccgtgaaacctattcctaaacttgcatgctaaacaagtttgattagttcacctaagtagataggccgattcttattacacacctataaaccaggctcatctataatagttctgataacagatacctatggcgggtatatctattgtctaaaatcaagttctaagtgatcaatctaaaactagcagtcagaaccattatagatgaagaactctaagaataatcctaaggggttatcaatctactaatccaattaaatccctagtgagactccctaaacccaataaggtgattactgaaaaattatcaaaatctgattaaattgcattgaattataatatgaagatgagtaaaagggaggtcagaatcctctctgcaaggattagattcttctctccaaaagtgtatctctcaataaaaataagcttaggtctaaacaatgaccataaaattatgtatataggttacttaaaaacgtacagggtctattttgcaaataaggaaaatttatggggcttctcaaacacttagtgaatcatgaaaattccctttgccaaatatgggtgtcgatcgacatagatgtggtgtcgatcgacatagatgtggtgtcgatcgacaccaccgcgtgaaaacgtctcggataatcttcattgctgaaaaagcttccaaagttccttattatgcttcatagctctcaaatgcataattgcacctgtaatgactcaaaacacaagaaaaagattggaaagactaacactattctgaaactatgttagaaatcagtaaaaaccatgatatatcaatcaccatcagtcctagagacattgttcccgagtgccttgacaatttaatgaaagagacaaacaagaggacactaagatccccaccacaaatcaaaaagaacgtatccaagcccatttgattgtcaatgtagacatgagagcgtttactttctatcatcatagacatcttttccgacatccagtaactaattatgggattgcattcggtgtacttcaaactgaaaacttcgcataatatatgcacaaattccgtgtacgtcatgttttccttaacacgtacatagcgaccaaacatgcattcatctggttcaaatttcaattcttgttctttgcatctccactcacccaccatagtaaatacgagaatatccattacccacttgaattataaattcagtagaacctcatttaatgcatctgaaaacatgattatatctactaaaaacaaatagaattttgatatacacacttataaacataaatatatactcatttaccattttcaacaaataaaattggaaataaaaaagttatggggttttatataaaaaaacaatgttaatttcgaacacaatcaaaaatcctagtgtgttataacaaaaaacttcttaaacaacttcattacttacacgatcaatgtttgtcttggctccaaactttgtaaataaaaaagatcaaaactttttcaacatcacattcgttcagaatttgtttgtttcttggttcatctttatctctacaattattcacaagtataagttaatattagaacaagtaatgataatttttgtattaattgtgacgaaagtcatgtctaaacttttttgacattaaatgttgatgtcacattgttttttaatgttagtaatctctttgtttactatacaacgcacaaaacatttaaaaataaaatatgtttgcttaaccggaataatgtacgtaactaaactttataactaaatcatacacagaagagtatgtcgttacgctgacaaagataaaatagttagattttagggaatattaggcagaagggcacttttttgagttctaattaggcaatggagcactcttatgggagtatgtacttttttaagtttttttaccataagcccctcaaaagtaagttaaccatagttaatttcatgtggttgaggaattcaataatattttaaacagttaatcgactatgtttttcttttttcttctaccaattatagttatctgaacgtttaagccattgttattccaaaatttctttaccagttaggtaaatttatattttatccattgttgttctaaaatctcagttgcagatcgataatttcctcttcacaaatcgtccctttgatttcaggcacagttgaggctgatataaatgttctcgacactcgtcttcctcctaggctatttgcaactaaccgttaccctgatgcacgtctcaatatctaatccagacccgacattctgactgtaataagtgaagtattgaaaggtaccaatgagatggaaaccatcttagactcttgttttgggtctctgtttagttgaagggttagcgaatgtccaatatctagcaaactagttcatgctttgttatgtagatagttagttaccaaacagaaatacgaaatgtggactgtttttggtggacagcctcttagattctctttagttgagtttggttctgtaactagtttgccgtgtggtgaatttccgaaggagtatgaacctgactactttcctagacgtgtcaatgggacgaatgattactgggatgttttgattgggaaagataagaatgtaacactagctgatgtttcctctaagttccaagcgttaaaagggattgaggaccctttaaaactcccctggctcttcttttgattgttgatggagtccttattgctaataaccagactcatcgtcaaactttcaagtatattaagatgttagaggacattgactcattcctggctttcccatgggggagagaatcttttttgaagactattcatatcatgaggcttgttagaacaaaccgtcaatggctgattctaagagaaaaaggtctcgtcctggaatcaagctagaagatcccatccaacaattcacaaatcagatgcaagagcagagtatagctatttatggctttcccttagccctgcaacttcttgcttataggaacatttctggtctactggacaaaattcctggttctgcagatgagagaacgtttttggaatggcattcaattgggataccgaaaagcaatcttactatcaacgatgttcatctccttgaacgtgttcctgatgtaagtaattgtaaacattgttgtggtatcttttctttcatgtgctcttatgactttttttatttggtctaattttctgagtctgtttcttcagatgactgttatcctgaagctgtttgtaaacactaatgaggatggttggggtgagtgggatgatgaagtgagagacaagaaggttctttatttgattgaatagataagaaaatgccataatttcaccaaaaaggagtggcctggtagttatgctgatctaccgctcatttctgtcaatgaaaaggagcctgtagttgaacacaagaaacatatagttatctggaaaaggaaactttcgccaacttcttcttctaaaggaactccatcaaaaactaaagttagtacattcacgcgaggcaggaagcgtaattttgaaatggttgatgatgatgaagcagaagataatgatgatgaagcaaaagacataaaattgtgggtgaagtctcagttgtcttctataaggcatgaatttgcggagagtgttaagaagttaagatctcagaatctaaatcttctgaaaaagatcagggttctgcaatctgtcaagtcttacaggtcaagaccgtgtactcgtcatccatccaagaaagtacgctcacaaacacacctctccacagtctctcaatctcctgtcaaccctgttgtagagcgacaaaaatcacaactcccccttcaccaccattaacttcattggaagggggagtcaatgttttatctgattcagtgcatgatggagacgaaacagtatcagaaaattctgaaaagattgttgatgattagttatggcgtgagtttaaaaatgataaggtctgccgcatttgattaaagttcgtatactttcgtagatattagtcaataatctactttaacttcgatatactacacaggatgggatatccatggagacctgcaaagattcagtttgttccccacaaaagcatctggtaattgtttattaagttcattcatattttgtgtacttaacatgggtcatatattctcagatggttctttttcaggatgaaactccatccatgaagacttgcaaggattctgatgattccccacagaagcatctggtaattgtttatgaagttctttcatattttgtttccataacattggttatatattctgagatggttctttttcaggatgaaactccatcagttatattacccaagtttatatatgctaatagcaccgagctccctccctctgatcaaccaatctatgacactaagtcaaaatctagataaaaggtaaatttttcaatatcggtttcaagtcaaaaatatttaactattatatacctaactacattttcattttacattagcatctaccttctcctcgacctcctgctgttttcgataccgcaacgaaaccatctcctaatgatgttaccgaggttttcttcgacctcctgttattttcattttactttgagtttcttagaatggatgttactcatatgctaatgttatacctcttctatcttatcaaggagattaagattccggatttgtccttggctgaaaatatagacacattgcttgacacagtgtgcaagaatataagttcttcagttgctgctcccgattaggtaaggaaagagagtcttgttatgatagaatgagaaccacccatgaacccacaggtaacattatcatccattatctacgtggactacgtattttgtatggattcccaattgtggatatacttaacttcgtggatacctaactttatgccctctttcccttgtaggatgataaaaaagaagatgatcaaaaagacgatgatcaaaaagaagatgatgaaattgaaagcgatgatgaaattgaaagcgatgatgaagaggtagaatttcctggtgctcatttggaatggtggtttatttatggcgttctcaaaatattaaaatttgtttataacatcttaggatgtttccgccaataatggaacttatgttgatgtcagtgattcatcacctgcaagggaatggtcgccaactgctttgtctgaaaaagaagtccaacttgttttgtttttgcaaaaaaaaaaacaaatgctctcccacggtcagattgatttgtttcctactttggacaaaacaaaatttcaaagatttcattgacaccctccggaaggagccacataagtaatttgattaccctttttacttttctctatgttttgatgttttatcgacaaactaaaattatttaataattgcagggaacacatgactcgtggtgatattgtgatatcccacagattcctactccagcttgcacagccgagcaataggattgataccatggtaaaacaaactccctattaattcattttagttcatgtggatcaatatgctaattacatgattcatgctaaacaacttgcagcacatggaggtactaggaaatttccttaatgaaaggaacatattgacactctctaaagaacgcgcagtaattatcaaactgtggttgggcaattacctacaagggaaataccgttcctttcaagccgcaaataataagctgcgcgtccaatggaataaccagaaaaagtggacgattcacggttctccatcaaattggtttgaagaaattgacctcatcctgatgccaatgatttggaaaaaccagcattgggtagggctggcaatcaaattagggaattggtgtgttgacatacttgatccaaactaccagctaaacgatgatcgacaagtcgatgagttcatggcacgtattgtgattcaaatcccgtacataattaacaaattttgtcagcctcgtatgctcaagttcatggattggctcctttcagttggacaagaatgaaagggatttatgtcaacgagaggtctggggactgtggaccagtctcaatgaagctcatcgaaatttatgcaactggtggaaatacagagaaaatggcccttatcacagatgaaattgtcaatgaattcatgggtcagtacgctatagttttttttcaagaacttgtcacaccactttaccaatcgaacaccagctaattagctttccatttaactaaattttcatttagatatgatatttgttctagacatttcagttgtttcacggctatctttatttactttttgtcgctagctttatatgtttgttgtataagttgaactgaatttttaatttctcagaattagtccaactaattttctcgaagttattaaaggttcaagtggatatgtattcatgaaaacatgcaatttataccaaatatattcagccgaacaaaatgtttgattaacgctgatttaattatgtggatagttttccatggattcgaaataagggaaattagggaaatagtattcggtacttatcctatatattaaaacactgcgtctaagtatttatctccatcataccaatcgaatcaaccctaaaaactcttaaaataattataattttttccaatcgtcctccgacatgttttcttacattccttttcgtttggtttcatacattgttcgtcgaattggaatatcgggtttccgtaatctaggtccattcatcgctgctggacctgaatgggtagctattgtattttctgatgaagttttaaaggagcttggtcttgatgagtttattacggtctcctctttatgcatcgaagggtcgccctaccggccatttttgcttaggtgtttatagtctggcaacaacacggccaaatacatcgaagggttacgactagctgctctagttggccactctgttcaagctctgaatatgcttggcgaagctgcagttcattacttacattcttattttgcttttggtattttttatgttctttgcggtaatccagaggatggtagaataataccaaaaacgtatttggagatgtttaataatttttgggaagctgttaattgcgccgaacatgtcatgactcagatacaagacatggctccaacaggacagcaactatacagggggtacatgattttgaactctatcccagattgtcatttactacattttaagagtttggatgtttgccccgagtgctttgtcctcacttatttttttaagatccatgctttgtgttagattaattttcagtttgttggaaattcgctttgtgtcaagctcttaacaataacgacaaaaaatgttagaccatcattttctacggtttgtattatgtatgtttttgtggatttgtattcatggactatttcaatattcatggatttgtcactagtggatttgtatacttgaaactataattttactttttatttaatttttatcatattttaatcattttcacttttatcagaacgacgtggttgtcaaattgtcataaaacccaaatttctagggtttcctatagaaacaagcttattttcctcgtacaactttattaaaggttctagtggatatgtattcatggacacatacaatttataccaaatatattcagctgaacaaaatgttttaccaccgctgatttaataatgtggatagttttccatggatttcgaataagggaaattaaggaaataatattcggtaattgtcctctatattaaaacactgcgtctaagtatttatctccatcataccaatcgaatcaaccctaaatactctcaagataattatttagggctccaacaggacaacaactataccaggggtacaagattttgaactctctcccagattgtcatttactacatattgggagtttggatgtttgccccgagtgctttttcctcactaatttttttaagatccgtactttgtgatagattaatttttcagtttgttggaaattcgctttgtgtcaagctctgaatcaataacgacaaaaaatgtgagaccatcattttctacggtttgtattatgtatgtttttgtggatttgtattcatggactacttcaatattcatggatttgtcactagtggatttgtcactagtggatttgtcactagtagatttgtatacttgaaaccataattatattttttatttaatttctatcatattttaatcatttacatttttatcagaacgacgtagttgtcaaatggtcataaaacccaaatttatggggtttcctatagaaacaagcttagtctcctcgtacaactttcaccacacaactacaacatggtagatcgacttggaggtatctcgattgtctgcccttgtggcgaggaagtagtgatgaaaacatcagctactccaaggaaccctggtcgtttgttttatgtatgtcccctgggatcttccgtaagtaaatctactaattatctaataatttctactacttgctatccaaaataactatcaataatacaggaaaattggaaccatttgttcaaatggacggatacatgtatcgttgaagagatccgaagattgatagaaaaagtgaataacatcgagggttctacactaaaattgcaaaaagggctaaatttttgtgattccgtgattacctctttgtcacaggagacgtgagacctagattccgttcttcgggaagacattgaagacctgagatcgcagcttagatctatgaaaatattcttgttttatttttgctctttattttattttttatgttttttaatcgctttatttccgaaattattgtaatttctgttagtatatttatcaagacctaattcgactatccatcattgcttaaccatttcgattctattatcttccttcgttttgatttattcatcctaacgagtaggattagttaattttcagagttacatattttacagaacatgacatgtaatccacttgcactagataattcaagcaacttcaagtagatatcataatctattcgtactttttagacctaatacatcaggttatcacttcaaactgacaccctttacactaatttatctgttggatattactgtttgtgaagctacacatcaagggacccatcgtcaacatgtctatttttccgatgctagtttgtagacatatccactcttatgtttttttccacattttaattatagatttatatggataacaaactaaacaattttcgttatatcaaatgatacaaaattgtcttttaatggataagacttcatgcattggagtttatatgtttacttagatggataacaaacgaaacaatttccaataacgaaaatgagaacatatgattaaatcaaaattggacattagatgtcattgtaaattaacgatcacaatctttactggtttacattcccgttcaacttaatctaatataacaaaaacaaaaacaaaaaacacctagatgttagtatccaacaaaaacaaaaacccatagaaattattattcatgagatccaccttaagcgagacaccttttgcacctttgcccaactttcttgcacctagggcacgtacgcctcaccattcttcctggctggaaaggaagatgcataatgcacattttctcgttattcatgtcaatgaacatgcgtttgtcgtgagtacattccatcggcacctcatctgatagtatcctgttgtcgactcatacgccagtcctttgttcttctctacaaactttgcatacggattatttgcggcaagacacttttggaagaaactgtagtacttagaatgaggcattgaccaccacataaaatgattgtccatgtcaatgcgaacaaaggctagggttttcctcgacataacagcatcctttccctctctcccagctagcaaccagttcttcaaatcatcaacaccatcttcagcaacttttctaacgatgatctccatcaacggctgagaaatgtgtatatccatctttggaatctcctacatattaaatgaagatatttattcacaatcattaaataaattaacattattataaaccttgctttcccgtaaatcgcccaccttatcttcaattaaacgattcatctttttataagaatgtttaaaggttttgttctatttatagattttattaaaccaataacttaaacatcgattatgtggtatagaaccggtttggtcaatgcataaatttgtcgttggttttgatttttctgtataaaatatatttaaaaatttttacattagtttagtaattcaaaaaaaattacaatccgcgtggatatttgtttccgaaaaagttgatatttgatgtgttttggcagcaattttctctctcatccaaattagatttccccatcttcctggttcaaatatttttgatgtaacattttactattttaaccatttctaaacatttgttgtaatccttgtcgttattgaaatgtttgacatgtcatggatcctcaaaaatagtgaattattgtttgtcataatctcttgtttgtggatttgttaccatgggtacaagtataaatacgtatttatccaagttaaaacaagatgatttttttgttgttttggcggcaattttccctcgcttccgaatgagaattccccatcttcccggttcaaatatttggatgtaatattcgactattttaagcaagccaaataaaattgttgttatccacgtggatcttcagacgtttaacatctgatggatttacatatatagtgatgtaatgcatggcaataacccaaattttgtggatttgttactatggatacacgttttaaaaataatttttgatccattatgtcgtgatacctaaacgatatccggttaattcgtgtagttattactagccggttgttattctaaacgattgatttattggttatgtgagatgatatttaaggaagttgcttaacccattaattgaccataaaatcactgaaacgaaaaaaacaaaatgttcaactaccatcttctcaacgagctctcccctctcatcaccggctggactgtacgagtcattgtcttgaaaaagtacaaaatattccaaaggggcgattcattcgaactaagagttatcatagctgatgaaacggtaataaacttttttttttttttttttttgcatgttcctgatactaacaatttttgagtttctgaatagaggatgaggatggacgttacaatctaccgaagcttttcttccttctacttcgacaagttgaaaataagtggatcgggttaactaacttcaaggttatacctaattctgatctagtcaagactacgacggctaaatatgggatttacttgatcgacgagacggttgtaacatcggctgatccgaacacgctatccagttcaacaatttcacttccttcgacaacatattggaggggactttcgatatcgacctgttagtcggtaagtctatgtccatttacctttatcaattaattcttagagacaacatatttgagggtagttacgatatatgccttatattgatctaaacttaccctgaatgtacagatctcgtgggtgctgttgttgaagttggaattctgtctcattctggtgatcccgacgtcggcgttgaggggatgatcgttcctttcaaattaatggacagatagtaagttttctggctaaaattcaataaaatatgataatttcgtgtgtttaaaattgttaaatgttttccttctacagcaaagaggttctagactgtgaggccactgggagaaaggcattggaatttgatacctgttaccggcgctatggccatccaaaaattgttttggcactggcttggtggagggtggttagggagcctgaactggttggtgggcgcaaaaacaaggttaaaatcgtgagctatggtgcagtttcatctgtttacccggaaccatcgattgaagaagttgaagaaatcaaaatggtaagagcacatcttagatttacaagtatggatcacatatgataataactaattagtatatgtaataaagtcatgcgatgctgttgataataggtttttagtcaattatcctaaaacaccaatcatgtcgttgtagtattttaggttgtcaatccaaatgggtgtgatgctaacaatcaagatgtgatcagaagtcactaagtcaagccaagcaataacaggttttggtgtgttctatcagtcctaaatgaacatgcagaaaacagaaaatcaaacagaaacagtaaaacgctacaccaacacagctctttgcagagcactaggtgaggtcgagtgacaggtcgagtaacagacagaaaataaaacacagatactagactgcacagtctgttgccagacaactgggtggtcgagtatgaggtcgagtaacaagaaagaattgcagaaattaagcgatagataacaagatgcagtaaacaacagtagagtaaacaaagaattcaatcagataaagaattcccgaggatagggtaattgagtagtttcgtttcctcagtttacaggtgattgacatgctcaataaattaaccctagacaacaagttcattaaccaaatctaagtgccaccgtaacaaagactcccaagttaacctagtcccagactcaatcaccattgacgagagctaccctaacaggcattacgaatcaacaagttaaagccaaaacactccctgcaaccaataccttggtacagggtcacgaatctctggaattagtggttcagatattttatcgaacagcttttgggcgcggaaatgtctgggctcaaattcaagttgatcagaaagcaataagcattaagaacaactaatccagaagggatctatcaatcaatactcaatcacctagcatactgagaattctacactactctaacccatcctccgaaacctattcactactcagacatcataacagaaagcataaacgttgaataagttgaaaacatgataacaacagtgtaacagcaggatgataacaaaatgaacaacagtaaatgaaatcaagatcaaaagctgaatactgaatactgaatagataaagagaaatccggattacaaaaggtctagaacacaaggtctgcggaataaaactagataaaaaacttgtctgcgaaaatgtgaagtacatgctacttataaccaaatattctgaaaccctaatacttaaaacgacgaagtattgggacggattaagaactgtactcgacccatgtggtcgagtaggaggtcgagtgaatagctggagtcttcttttcttccttgtgctcgagtgtctggttgagtgcggaataaagaaggctctgaagcttgtcatcgagtatgcagtcgagtggtggtgatggtgatactcgacttccaggtagagttatgagatcgagtagtggtctggcaatgaaggtgaagactctcgacctcgtggtcgagtgatgtgatcgagtgatggtcaggtgatgggatgaagtcactcgacctcggggtcaagtgatgtggtgaagtagtgatgtcctctactcgacctgggggtcgagtgatctgttgagatcttgaagctcctactcgacctcggggtcgagtgatttgacatgaccaggtccgcttcttccagatagctcgtcaacagctccaaatcacctgaaatcaacgcaaatatgcaacatgcatgcaaatctatcctaaacatataaagtgatgacaaatgatgagaaatggtataaaacagtgatgatatgatgctaaagtgatgacaaatggatgcttaaaacatgcaaaatacacacttatcaactcccccaaacttagtctttgcttgccctcaagcaaaccatcaagaacaagctggaggtgaggtttgaaagcggggactcagagccaaagcaccagataaactagatgaaatcaatgtccaagttgaaagttctaagctgcaagatcgaattctacttaaaaacgttagccatgcctcatcatcaatcaatccgactcatatgctcgacctacacaagttttcaaatctatcaatccctttaacattcattagttctggaatgtgaatcaagcaatgcatcatcaatgaactcatttggctaaggtaaaaggtcaagagacaaagatggtcccttacagaataggcttcagtaacaggggatctctaaaaaagaatgattaacctttagtagaatgctaaaggtaggttccaagctatgcatacagagataagatcccatctacccagagtacatcaaatgaagctctaatggtaatcccatctccaatcccaatataagaacttaactctaccctttgcattcatgaatcttttaagccctttttctaatcattcttttcttttctcttaactctaggagaagctttctcaacactttgatacatctagcggatttggatttctttaacaactaaggttcctgtttttaatattttaaaatcaagggcttttgcccatcttcaatagctaacaagaactctttcttttctttaccaatcccaaaacctttactagacttttcctgcttctttagcttacttcacgtagagtgttttaccttttcttatcaatgaatcaaccctttttttcttttcaacacatcccaacccaaagtataagcgcccacctagtcctatctagtccaaaacatgcgaactagaactacatgagacactatctctatcgttacgaacctaacactttctaccaagcttaatcgaaataagacctcacaaacactcacaagtgatatagggcttgaaagaaagtctaggtttgggttaactgctctaataaggagagtcaactacttggattaacaagagtgatcaaagtgaataagaaaatccaagtattttagggtatccatgagttcaaatttgatgcagacatgataattaaagatcagattcaggttcaaattgatagggaatggtatcagatcatgacagtttggtcgagtagagcaatctaggcatggttcagtttcatttcaaattcattgactacgcaatagacaactagcaacgagggcactgagtttatccggtgaatcaaaatgcttacaaggctatctcatcatcatcccctatgcatatgcaataatcctaaatgaaacactctagactcgatcctaaatgtaatgcaactacatgaacactcttttttgtgaaatcattttctgaaatttttcaaatttttttttgtttttctatgccttagatgaatgtagactcaaaaatatacacaatgcaacacacacttcctgagccctcccccaaacttaaatcacacagtccactgtgcgaataaacttggaagagagtactcaggacaaatccaatcacagaaacaaaatgaagaaacaaatcacaacagatgatataatacaatggtgaagtgaggcgcttacctcagtcgaagaatgaacgtagttgctcgtcaatagcagcctctgattgctaccaggctatagacgaacccccttgttccgtatcagctccagcaggtgggtactcgaccccatcagctctatggcggccagcaccgctctgaggatactcgacctctctccttctatcgcggtcgagtgaccttctcgagtgaatgaggcgtgatctgctgctagattgtgtgagtgtagccttccttcttctcttgtgctcctgggaatgacgaatgcctagccgggacatgtgagactctctgctcgctaagctcaggcctgagctcaggctcatcaaatctcctcgatggcatctccagaggaggctgtccctgtggaatagcagtggtggaggaggaacaactcagcttatctgttagaagcttgatagtcttgaaacacttggcgagcagtttgtcctgcttcttgcaccacttctgcagtcagtcaagctcttgctctccctcgctggaggtacatgttcaccaaagtgatacatgctagtgtcgaactccactcctctgtcttcatccatcccatccgaagcagcttcttctagaagatcatcctcatccaatggcggagcgttctcatagtagaggcgtccaacctcaggccaaaaatcaatgttatctccctcgattatccgtgtaacctcaaggctggggagaaggatgctagctctcttgtctgtagaatgctcaaacctgaacctgtgcaagtcgtcaaccattgcaaactccaagaattcgcagtgacctagatgctcgatatccattgctcgcggctcgataccatcagaagtgatcgggactccaaaagcgatcagaatcggtgtcacaacacctcctatgcacagagcgcctcatgctctcttgtggttattgctgacggccatgctcttgtatccacacagatggatcagaagaagtacagagagaggtgtgtcattgatttcaccttggagagacatgccattcttagtttggcgaagagttcccttgagagccattgcgatcatctccatatcagaattagtaacagtccctgtgatctctccgagtaaagcacatttagaacgctggaagtacctgatgatagggctgcgtatctgattgctctttgacctggaagaattcagcggtacagagctgccaatggtgatccacaagtctttcaactcttctctgtcatacttgggcttagttcccgttccactggggaagccaaacaatccttccaattgcttgattgataacctatactcatgaccatatatagagaatcgcaagaatcccaatccttcacaatccaactcatcacaggtcataccttggtagagctccacttgcagcgtggagaggaattgaattgtctcatcttcatatgctacatacggataagccatcagagtgtccagatgataactctggtacaggtgctgaacatcttccagcaatctgagttgtgcaagtgtggttgagcaaggatacctcgtgctacagaactcgtttagcttgaagaacctaatatattcctcagcaggcaatacatcgggtttgtttagcagtttggtggctctgcgactatgcttaggcatgtactcgtcatcctgatcctcatctataagctcatacctctctgtcatcgctctcttccctcgagctatatcagcctttcttctgaagctatcatattctctctgttctctttctggccttgaagatgacgactctgtctcatccatgttgtagtcaggatcaacagaagaactgccactgtaattgctcatgattccccttagacctttaggaagtggtttgagatcaaccttcggtgcttttagttaagacaagtcatctgaagttggaatgatcggctcctcagattcgttggcagacaaggtcgagtggctggtcgagtatgtcctcgagagtgcaggttgaactcgtgttgacccttcttcgctcattaccattaccttcgttgctggtccattcaattcctcaaagggttctgattcttccatcgctttatgggagtctaacagcttctggtatcccaatgtttccaaatgcagaaacccatcttcaccacttttggttaaagcactgttaagatgatcttcttctcccagctcttccagtaattcatcagctaactgatccatttcttcgatccaaaagtgttgcccttttatggtaggcttcttcatcgcgtctttaacatcaaaggtcatcctaaaggctttgccaaggtttagatcaatcttccatttcttgacatcaatcatagctcctgcagtggctaagaaaggtcgccctagaatcaaagggtccttgggctcttcatccatctccaggactacaaagtcagttggtatctccacagcaccgatcctgattgagagttttcgagcaaaccatgagggattcttactgatctgtcagctaggatgagggatatattgcaggacttgtattgagtgaaccccaatcttttggcgacagagagcggcatgagactgactgattctcctaaatcgcataggcatctattgaaagccaatggacctaaagagcatggtagagtgaatgaaccaggatcactaagtttcttaggaatgatcttcttctgtatgatagcactgcattcatgactcaataccaccatcccttgcacttcttgaattctctccacgatcaagtctttcagaaacttgtgagagtctgcgattagcgctagagcgtcaacaagaggtatccgcaactcaacctccttaacgttgtcgagtggcagatcgagtggttgctcgagtgacaggtcgagtggtttcttgagtgactggtcgagtgactggtcgagtggtttgtcagcttgatcctttccgagacttaaatcttccccatcttgatcttcactgtccgtagtgactgtctttggttcctccctagttggaagtgtttttccactatcgcagggtgatagcgtgagcatattcttttgggttctgaattgcttttcctggaaattggcttatttgttttggagcagaggaagatgcagaatgtccctctaagtatcggactttggtattcagtgtttccaccttgacattgagatcattgtagctacagtccaacttgttatgtaactcagatatcttctttgccatctccatggagccagaggcttggccgtgaagcagctattgtagcatttgtttcatttcaccatcaggagcagcaggaccttggttttgctgagttgcaaacccaggtggtggtggcggctggtagttcccctggaattgctgcttaggaacgaaaccttggttgtagggaacaaaaggtttgttttgaccttgttgttgctgtggaagatacacctgatcctgaggattagcaacgttggtgcttcggtaggagagattggggttgttggttttgaagttgatgtatcctttgtagccaccctggttgttgttgatgtagctgacttcttccaactggttaccctccccatcttggacttgaaactgctcgtcatcaacaaggaagtgcacatgcttctgctggctaagaagaatcctgtccagcttgtcattcagcgctttgatctccttcctgtgtttgtcatcagagtcagctgtgcctctgacggtcctatcgcagtcctcgttgtaattaccatctgattgggcaaggttctcaaccaattcccagccttcttcaacatctttgttctggaaatttccattgctggcggtatccagaagcattctgatgcgtggtaggactcctctgtagagagtgctgagcagagaggctttcaccagtattttgtgagaaaccagaaatctcatttctgagtcttgcagatctggcattggagaagaactttgatagaaaaaccttcttacaatcatcccaggtggtgattgagttatggggcagatttttctcccagatgtgtgctttgtcgcccaaggagaatgaaaacaaacggagcttgaatccgtcttcattgacaccattgatctttgtcaggttgcagagcctatcgaattcatcaaggtggtcgagtggatcctccattggcagaccatggaatttgttcccctgaatcatcgagatgagaccactcttaatctcgaagttgttgttctggatagccggaggtgcaatttctttcctttgacggtgatcacgtggtgcatctctagcaccaatgttggcagggccattttgttgattctgttcttcagccattgcgagtggttgttgaggtacaaggttgactgtatttctcctttctctgagttcgcgagctatgcggtcgatgttgtcgttgaaaaggaggttctgattgcctgttgatcgagttcgcatacagcagaggtgtacctggatcaagaagacaataagaaaaacacacagttagtaaccgaaaagaaaattgaaaaagaacttgatctaagcaagtctgaaatctcaaatgtaataaacaaacacccaattgcaacggcgccaaattgataataggtttttagtccattatcctaaaacaccaatcatgtcgttgtagtattttaggttgtcaatccaaatgggtgtgatgctaacaatcaagatgggatcagaaatcactaagtcaagccaagcaataacaggttttggtgtgttctagcagtcctaagtgaacatgcagaaaacagaaaatcaaacagaaacagtaaaacactcgaccaacacagctctttgcagagcactaggtgaggtcgagtgacaggtcgagtaacagacagaaaataaaacacagatactagactgcacagtctgttgccagacaactgggtggtcgagtatgaggtcgagtaacaagaaagaattgcagaaactaagcgacagataacaagatgcagtaaacaacagtagagtaaacaaagaattcaattagataatgaatttccgaggatggggtaattgagtagtttcgtttcctaagtttacaggtgattgacatgctcaataaattaaccctagacaacaagttcattaaccaaatctaagtgccactgcaacagagactctcaagttaacctagtcccagactcaatcactattgacaagagctaacctaagaggcattacgaatcacgaataccttggtacagggtcacgaatctctggaattagtggttcagacattttatcgaacacctttcgggcgcggaaatgtatgggctcaaattccagttgatcagaaagcaataggcattaagaacaactaatccagtagggatctatcaatcaatactcaatcacctagcatactgagaattctacactactctaacccatcctccgaaacctattcactactcagacatcataatagaaagcataaacgttgaacaagttgaaaacatgataacaacagtgtaacagcaggatgataacaaaatgaacaacagtaaatgaaatttaaccctagacaacaagttcattaaccaaatctaagtgccactgcaacagagactcacaagttaacctagtcccagactcaatcactattgacaagagctaacctaagaggcattacgaatcacgaataccttggtacagggtcacgaatctctggaattagtggttcagacattttatcgaacacctttcgggcgcggaaatgtatgggctcaaattccagttgatcagaaagcaataggcattaagaacaactaatccagtagggatctatcaatcaatactcaatcacctagcatactgagaattctacactactctaacccatcctccgaaacctattcactactcagacatcataacagaaagcataaacgttgaataagttgaaaacatgataacaacagtgtaacagcaggatgataacaaaatgaacaacagtaaatgaaatcaagatcaaaagctgaatactgaatattgaatagataaagagaaatccggatttcaaaaggtctagaacacaaggtctgcggaataaaactagataaaaaacttgtctgcgaaaatgtgaagtacatgctacttatagccaaatattccgaaaccctaatacttaaaactacgaagtattgggacggattaagaactgtactcgacccatgtggtcgagtaggaggtcgagtgaatagctggagtcttcttttcttccttgtgctcgagtgtctggttgagtgcggattgaagaaggctctgaagcttgtcatcgaatatgcagtcgagtggtggtgatggtgatactcgacttccaggtagagtaatgagatcgagtagtggtctggcaatgaaggtgaagacactcgaccttgtggtcgaatgatgtgatcgagtgatggtcaggtgatgggatgaagacactcgacctcggggtcgagtgatgtggtgaagtagtgatgtcctctactcgacctgggggtcgagtgatctgttgagatcttgaagctactactcgacctcggggtcgagtggtttgacatgaccaggtccgcttcttccagatagctcgtcaacatctccaaatcacctgaaatcaacgcaaatatgcaacatgcatgcaaatctatcctaaacatgtaaagtgatgacaaatgatgagaaatggtataaaacagtgatgatatgatgctaaagtgatgacaaatggatgctcaaaacatgcaaaaaacacacttatcagctgtcaagaatttaagttagataattgtgttttgattactgcaagtatgcctgggagttcggtcagatcgggttattcgggtcgggttattcggtttagggaaaattcggttttagaaaaatttctccgaattaaactgaaattaatttcggttcgggtcaatcggtactcgggttattcggttcggttattgggtttcaaattaatttcgaattaaatcaattattttactatttcggtttatttgaaccgaattacaatagaaaaaaggataatgggctttgttttaagcccaaactttttatatcaccaaaaataataataattttacaaacccaattagcaaatttacaaagcccagcgccccagcccattcacaattagggttgatggtgatgaggcagcgacggacgatgacgacggcggcaatggacggtgacgacggcggcagtggacggcgatggacgatctccccaaccgcaaaaaagttaagaccgacaagatctatcatatatgtaatgataataacatacaaatctatgatgtaaattgaagatcaatcagatctagagagttaccagtgaccctagccgtgatttttgtcataaggaaaagtttaccaaacaaacaacaaagaatcagacaaagaaacgattaagaagaaagaagagctaacaacaattgagattttaaagactaaaagaacatgtagaagatgatgaattgatgaaagaaaagaaagttagcaaaattatggattaagttagagaagaagatgattctctatttcccttttgcaagaggaggcgtcgatccaaaagaagaaaatgagacaaaattagggcaactgactcattagctttataaatggctgtagatatttggtttaggtaaaaccgatcggtttcgattaccgaaccgacccgaaccgaaatccgatttcccaaattaatttcgcctatcggataagaagaatcagtttggtttatgccgataaccgaaaatctcggtttgatcgggtcggtttgatcggtttccaccgaactcccagcgctatctgcaagccttgaatatgaatttaagggaaaattttaaactgaattgagttgctgagcttgcgagatgtctcttctgttaggtctcaaacaggagtttgcttgaagatagggaaagaattatagtgaaaattttaatgaaatcatgggtgtcaagacttattgtaaaaaattgattttctagataactgcgaattggaaagtccagtttctagttctaggtgtttctataatgagataattctgggttatatgaactcttattaatgacttctctatattgtatctattagttttgcagttggtcgcctgatgtatgaatactaaaggttcactatgtcttcttttgctcctagtgaagactttttatcggatttatgttttgttgttgttttaaaagacccttgtttaaatcccttgctgaactctttgttgtaatgttctttgttgtacgaactaatgatcctccttaaactcagctttactctattttaactaagtttacctaagtttctaagactattctacaatataattacataatcacaaccacatggttacctatattatatagatagggtaggttccgtcgaatgtcatctgtttaaaattgatatcaattggtataaaactacaaaatatacaaatttttaattgtaaaggttaaacagcatatgtcaaataacaattgagcttacattggttaatgtgttttgtgggaaataattttaaattagccgtttcaacagttgattgattgatatgtcattagatggtgtaggcggctacatggaacgattctcaataacaacttacacacgtctctaacgctataggctatgaaggtcctatatatatatatatatctaattattttttcctcaaaattcatcatgatcttattttaaaaaatttccaacaattcggtttaactccatgtggttaggcggtggtttcaatatccttatcgcatattctctctatatgacgtataaattatgatttatattgtagattatgcattttagtgatatcgaaaatatttaaaaatctaaaaagtttattgactaatactaataattgtaatattctggttgtaaggatgtttatagcataaaattctatctaagtaaatatatagggttcaatagaaaaagtccacgtttattcataaacaattatcgatatccaaatagacgtatccacacagacgtatccaatttagtcaaataaatatttaaagaacatctaatcggtttcaaaccttttagctaattacctaagagaatctaatcggttcaaaccgtttagctaattacctaaggaaatctaatcggttcaaaccttttagctaattatcatatgatattgttaaaccttcaatttagggtaatatgctaatttcaaacctcaggcaaacatacaataatgttgatatttcaaacctcaggaaaatttcttagccaaatttcttaacataattctaaaaatatttataaatgttgcattacaaatccaagatcatatggataaactcccatggattcaaaaagttaataacataaacaagatagcaaactgatacctaaatgagacaaagataccatcaaagaagcttaaaattctcacccgacttacattagtagcaatccaaaaaaaacattcaagaacaattccccaacattctgacttcatcctcaaacccttactccgtacaagtgctcaacatgtgcccaatcttcttacatctacggtaccttggcctaccaactctgtccggctgataaggtggctgaaccatgcacacttttatttcattcaagtcgaggaaaccaccattgcgtttaccattgcacacctttcaacggcatctcatttgaaagtaccctatagtcgattcataagccagccctttatgattctctacaaacttcgcataaggattattcgcgacaagacacttcttgaagaaagtgtagtattttgaatgaggcatggaccaccacatgaaatgatggtttttgtcaattcgtacggatgctaatgttttcttagaaaaaaccgcaactctcccctctctcccagtcagcaagaagttcttcaacgcatcaacaccatcttcaccaaccttgcttacgatgatctccatcaacggctgaggaatgtgaaattctgacattgaaatcaccttcaaaattaaaagtaagttaatagttaaaaaatcatcttatcactagattcatataaacggtttaaaatacctccataacaacatttgaacccttgctttctccacaactttcttctacaccacacattgttatgctctcttgtgagtctcccattaaaagagaaattgttaaagttagcctaagtttatggtacggtttatataagagatatatagtgtttattcattaaaccaatatcctattcttaacctaatttcggatagatggcaaatttttcgcttaggtttataatttttttttttaattatatacattttagacacatggatatgtcagtgtggatttgtaaaataatataaattttttaattattattttttaattcaacttcattaatgagataagacaatgatgttaccttcacttttcataaccttggtatatgttgccaatatccagactgcgtcagaaccttaaaatacttccatatgaacattgctacttattaggctatacgtggatttatattttttcagaattcccaccacttgatgatctattgttttggcggcaaatttccctctcaaacttaggctaactaggggaatagaagttatcaataattgaaacgtcgattcagtgaaaaggtttttcaatcagtgtttaaacggaaacatcttctcttatacagaatatattgccctagaacaaataaacgttttccgattagcggtttatgtatatgtatactatgattttaaaatttacatataaatttatgattaattcagactataaataccatgaaattgtttttgatataacgaatttaattataatatgtcattcacaactatctaacacagattaagattatgtttatgattttggatttagggtttagtgtttagggtgttgagtatagtttttattatatagaatttagagtttagtgtttagtgtttagagttagggatttagggtatagtgtttagggtttagggtttagggtttactgtatagtgtttatggtttagggtttagtgcttagggtttattgtatatggcttagagtctaggtttatggatctatttctattgatttgactatatagcttttactatttacaaacacttgtgaattaaagagataatatttgtgtcttactctggatatgttgttatggatattgtttttattaacttttgatttatatgaccgattactaaattctaccgtatacacgttttccgattagcggtttatgtatatgtatactatgattttaaaccatattccatatggattggatgtagaccgaatcggtgaaatgatctttctgacaatgaaagtcgttattcttttccactgtttttcctccatcgactccagatatacagcagcgtaccgacgatcaattgttgcttccatttgatcaccctaataaaaacaaaacccaaatagatattttccattgaagaagtcaaaaaattattttataaatataaggatttacaaaattaccgtctcatcaacaagaatacagcaaatttcataggagttaggatacactaactttttgtgtgtccttagtatacaaacacatattctccaccccataagaacaggtgacaactcgtgaagcatatggtagttagccataagaaacacctggaaatacataattggatcaagagagtttttgatgcgatttgttctagggcaatatattttgtataagagaagatgtttccgtttaaacactgattgaaaaaccttttcactgaatcgacgtttcaattattgataacttctattcccctagtttaacttcttgtccagtggctgtcaataacactcctttgtatttaccagtcaaatgtgtaccatcagctacaataaccctacgaagatatcgaaacccatcaatagatgcaccaaatgccaaaaataaatacaagaacctgcgaaatccattttcttgagtctctgttttgatatgtgtaactgtaccaggatttgcaagttttaaaacatacaaatacgcttctagggacttgtatgagtcatcatcagtaccaaaaacctcttccacagccttctcttttgctctccaacacgtcccatacgatgttgtcactctcaaatcctcaagtaccatttgttgcaaatccaaaggtacaggcccttcagagaacttactgaacttggctttatagactgatgctataactcttgaagtcgccatcttcatgtactgtccccttgtttcaatgttgcatgtgtgctctaaatcagccttccttatcaggtagtaaccacacgtcttcatctcatgggacattattctccactgacagttttcatcagcacaagtgatcacaaagtaatgtcgcttggtacgagactgcttaaagtaaaattgctccttgatagcgtggatagctaagcttatttggcaatcttgtttacttgcatatacccttcctttgtagatacctttctcatcatcttcaatatcaagttctgggatttcgtctctttcatactcagtatcatcaaaaagcggaggaatattaaactcctcatcttcaatatcatcaagtttccttgtttctcaatttctctgtcctccatttggcatggattcggagtcagtactactacctctaccatcattgcaatctttatcttcttgaattctagccactcgtggactaaacatgatctcaggtgcattagaaccagctaactcatcatccaaaaagtgaccccaaaattctgtatcataacctgtcggagcaacttcatctacattttctccatcttcgacctcttcctcactattcccaaataaatcttcatattcatcactactggcactagttctacttttcctctcgctgccactgctatgtaaatgttcatcgcctctgttatacatggtttctagtacttcaacttccgctataacagcgtcatcatcctgagttgtcggaatctttgggattttggaaccagcagttggtgcttcccatccaatgtcatcatcacttcttgcaagtccttcacatgatgatgaaattgctcttttcttactcttcattacagatgaaccagcaacttcttcttctctaacatttttccgacgagaatttcctatttcaatcatttcgctgaaggtaacaaacaaatttaaacccttgttcctcccaaacatctcaatgaagaacttcaaacctacctccctagtaatcaatatcggaggtgtcttcttccctgtcgtgtaatccatgatattagacggcaaataactaaacctaggggttccaaatgtaaaatctttattcatgaattctttcaaaacaatatcttccaaactagaaagattcatccctgcaggaattggaacaattctagacattagaattttgttaatttcaaaataccattcttgaatatccgagcattcccattccccgcagatgaccatacaataactctctattggaacctacatacaataacatttcacaaccatcaacacgaatccacaaccatcaacagatttaataaccgcaataaatttttagattttacctcctcgctcatgtttccttctggagagcaaaaaaaaacgagattgtcggttctatccacacaacaaccaactcttctctaactcttaataatagccaccaaattgattctttctccaaaacaaacgaacagctgtgattaaaatttgttaaccatattagcgcaacagctgacgtcattaggaaataaattaaaaaagtacctttaaaaaagtagaaaactttcaaaaaaaaaaatgcttattccctctaaaatgctcaaaatgagcttaaaaatttataaaatgtttcatcataacaaaatctctaaattttaacataattattaaaacgtgaaaacgatatctcattttgtcaatttgttcttgacctgctgcccattctaatttctataaagcgattgtataatgtatagtcaaccatatcgatttttttgtcttttacaacggagttatgtgaaatcttcaagtgtaaatttttattattctatttaaattcttttgctccattttactactttttgaatcagttttttataaacgaaagaaatgttttattagttttggataaaatttgtatgtgtggtattttaaagtacttttttacaaattataatataatcttacggatgtgactaatttcgtataatcatgatgatgattatgacgactcatagcagacaaatggtgtcctctccaccgtaaatgcttcgttcttaagtttctgacatttcttcttagtgaactaatttctcgtaaaacaaacaaaaaagtactaatgacagttttcaaaaataaaaagaaatattgacttaaattctagtttatgcaagcaatgtgctattttcactttatatgtctgtctaatatatattcacaatttattcttggaagttgaagaaattacttattctatttggacctttcctcttcctcttccttctttataagtagaccaaactgataagccagctttttcctgttgtcttcgtttgtggctttgttgattcctttgcatcagtgcttttgaagaaactgtttcctacttatcatcttcctatttagtttgcgttgtaagccaagttacttctctatgtagctatgacctgctataaggtaggaacctaactcaagtttttcattgttattatgttgcagaaagtttctgtgacatggagagaaatgagaagacaagtctgattaatcaaatcttctctcaactatattctcaacaaagatatcaacaaggaagagattaggtcgatactcgataccaggcatgttttgttccgttgatgaataccgtaagagctttgttcctcttctactagaggaaacacgtacagagttgtcctcaagcttgaactgtttgtggaaagctcctgtcttttacataagttccgtggaggctacggcaataaaattaccgagtagaagctcaaacaaggttaatatatcagtacttacgagtgttgcacaaggaaatagaactaactacgagccgaaacatggagatctcattggagtcacaaggaaacgtggatgacttaaacccactgattcttgcgtatgtgttctctgttggagatgagctacatttctctgttcattcctctaaatctatatccattgatgagcaatattcgtttcgttcgggtttttttcttatatacttaaccacaaacactcgtatctggaaggctttgcacaacggagatggaaacttgagtctcatcaagagtgtccttcaagcaaataccgcggtaagtaaacatgaaatgatctggctttagcgtctaatgtggagtaactgtggtttttcttgtaaatatttcaggatacagagcaatctgtttcttctaggaattgggggaatcatgtgttagatattatacgatcagcgaatttgaactcttctcaagaatctgcaattttggcttgccttgagacaagagaaatccgcgacaagactagtgtgaaactgatatggggaccccctggtaccggtaacacaaagacagtcgctactcttctgtttgctcttctcagcctaagttgcaaaacagttgtgtgcactcctacaaacacggctgtagtagcagttgcatcaaggctcttggcgctatttaaggaatcttcttcaacagaacattctacttacggacttggcaatattgttttagtcggaaaccgagtccgaatggggatagacgaaagggggaatgatgatctcctcaacgtgtttcttgatgatcgcattagtaaattgggtgaactgttttcgccatcgaatgaatgggaacggagtttggaggcagtcatagatattcttgaaaatgctgaatctagttataagaaatatctgttgctaagtgaaaggaaggagaatcaagaaactaaaaacattctgacagcatttggagagtttgtaatgaaaatgtttcttggctcgaaagaaacaccggagaaggaagaagaaatcattcttacatttggggagtttgtaatggaaaaatttgatgggttaagtgaaacaatgaagaagatccagaaggatatggtggatttgtatacacatctgcctaagtcctttctatcgtctaacgatgtgaagaatatgatcgtagcccgtcaagctcttcgccaagccagaactttcttgcaggagaaacaaggaagcttcacatttgattgcttcaacaaatttgtctgtgttgattgccttcggactctacgtttgctatcaaaacgttttgagattccagccttgttgatgaaggaggatataaggacattctgcctacaaaatgcacacataatcttttgcactgcctcgggtgctgcagaaatgaccgcggaacgggcagggtccatagacatgcttgtagttgacgaggcggctcaacttaaagaatgtgaatcagttgctgcattgcaacttcagggtttgcaccatgctgttcttataggagatgagcttcagctaccagcaatggtgcaaagcgaggtactttcttttgtcttatactataagaaactaggaattgcgtttgaaacatagtcttgaatgagtaggtatgtgagaaggccaaatttgtgagaagcttgtttgagagattggattcacttggccataagaaacatttgcttaatgttcaataccgtatgcatccctctataagtcttttccccaacatggagttttatggtgggaagatctctgatgctgagattgttaaagaaagcacctatcaaaagaggtttcttcaaggaaacatgtttggctctttttcgttcatcaatgtaggacttgggaaagaagagtttggtgatggacatagtcctaagaatatggttgagattgcagtagtttctgagatcttaaccaatcttctcaaaggtaaatatttgttgatcttgtatatatatgtaatctgtttcttatggttctttttaatttgcctatttttttaaacagtgtcaagtgagacaaagacgaagatgagtgttggtgttatttcaccttataaagctcaagttagtgcaatccaagagagaatcggagataagtacacctccgtatcagataaccttttcactttgaatgtccggtcggtggatgggtttcaaggaggagaagaagacatcattatcatatccaccgttagaagcaactgtaacggaaacatagggttcctctctaaccgtcaaagagccaacgttgcactgactcgtgcaaggcactgtttatgggtgattgggaacgagagaactttgtcgctgagtggttcgatttgaaaaagcttgtaagggactcgaagagacgtggatgtttctatgatgctgttgatgataaaaatttgagagatgccatgaacaatgctcttcccaagcacaaggtcgacatgtctgatgtgtattcgagttttcgatctctttcaatcaggaaagaaagaataaatgctcggtagctcctcttttaccaatgtatctatgaatggtttttatttctctttttgtgacttcgatatctatggatagaggatagtatggaactattagtgtatctctctttcttgctaaacaagtaactaatgtatcttttatgtggcaagatcaatgctcacttgatagatgcatttcaactcttgcgtgactttgtcgaaagctagtcagcggcttaggaggaaaaaagtagtaaacacaaaaaacataaacacagaagtaaacctacacaaacaataaaaccctagttgttacatatacacatacatgcgaaacccaaactttattgttctaccactgaattaaacccaaacgagtctttctgatgaagaaattatcttttacaagaccaacaagtatccaatggcctcgtgatattattggaacatctttcgtttcttaaagtcttgtttagttgaaaactctaaaaaaaacatctctacttacttgataccctgattgcattctttacgctattattgatgtgaaattgtttagagtcttgaaggcattcctccagcgacaaccaaagtttctccagtgatgtaagaagaatcatctgatgctaagaaagcagccgcagcagccatgtctcccgttgttcccaacctgttaagcagagtcttctcttcaataccttccctctgagtatattcacaagtggttcaattattatcattccatcacttgagatacaatcataacctcagttttaacagtttcaatcttataacattaccacttcagagctaccggtgatgaaagaagcaaagtgtgtgggcacaaaaccgggtgcaactgcgttcacacgtgtatcgggggccatctcagcagcaagcgcctgaaacacatgataaataatctcataaccatcatcatcataactattcaatcatgagatggggacaatgatacacataccttagttagtccgagaagagcagttttagtgacaccatacatagccatagctccttgtggtgaaaatccagcaatagaagttatgaagataacagaagaacccttctcaaggtgaggagccatatcctgataaaataaacatagaggagtcaaatcaaatctaagaaaaaattgatctatcgggtcatggaaacaaaaagctaacacttacggaagctttacctgcaggagaagtatagaggatttgacattgatttcccaaagcttgtcaagaacagcttctttgctagacaagattgggtctgtagatggattggcagcagcgttacagacaacgatatctatcttcccatatttctgaatccaaaaacacagaagacatctcttaagtaaaaatcaaagatgcgcaaatgtgagatagtaagagcttaaagcacacaacaaatcaacaacaataaaaaaacaaacttcttggttatgtaaagctgttcatgatcaaatttttcaatgagctttgaaccaaaagctcgtaggatgtgttacctgaaccgtcttttcgacaagattgcggcgatgttgagcattggaaacatgacagacgattccatatgcatcaatccctttggatttgagttttgctactgcctcatcaacatttgcctgcacatatataatcaaattcaacccttttagtctaagaaaaattgcaaaactacaattcaagaacaaagaggaacaaatctacgaaaataagagtaaagttcaattccttaggaatgactcttttgagcttaatctaattaatatcggtcgacaaaaaaacagaaagagcaaagttcctttaaaatctttgaaaattgcgatcatacacttcacagtgattgttgtataattgcatctgtaacaaatcaaatccagaattatcaacaattcgcggtacgaaaagaaacctaatgaagcacaaatacaaagatcccatcactagaaaacgattctttagtttcatcgttttaattcaaattcggaagatgaaagtgagagatggtgaaacctgtttgcgggaagagacgacgacggaagcgccttcgagaccgaaacgctcagtgattccgaaaccaatcccttgcgtcgaagccgtcacaatcgcgactttgccttccaatcttctcggtagcttcttctccatttcaatcttttttttttcttttgcttcttccaatgattgttttgtttgttcttctttctctctaagcgatgaaagtgagttgcgtttgaagcgtttaaataatgtgagttgcgtttgaagagtttagaaaagaaaggcgtttgaggttattccaaaaaagtaatattgtggtaacgtttggagagacaaatccagagaggatttctatttgggtcaattgcaaaactagccatatttgataacttaattaagaatataacatcatatacatataaattaagaaaatagcatataagggttggaaaaagacaattttggtgtggaatagttgatgagagatgatttagtaacacttcatttagttttcacctatttgtatgtttttgttatatattttttccaaaaaatagattctaattataaaatttattagataaaaatttctgtttttttctacatacaacatagtttgaatttttaaaatcagatttgtatttataaaatagtaaaaaatgtttgtaagtaaatttatattgtactatttatgatgtatagaaatagaatgttgtactatactattttcataaatcattcgtaattcagttttagttttagtataaaacaaaatattttaaattaaataaagtaatagtggtggtagtggtggtgggatagtagtttaggttgcaatattagctacgataatcgtaaaagataaaacatagacgatttaaattactgagttaaagcgatatgatccccattaaaaaactataccctaagagatacaatattgggaacccaatcaagcaagttaactgttgtagtgacggcaatacgattgtagtgacgacaatacggttatagcagtgagccactgataaggataatggtgacttggtagtagaggtaatggtgtaataatataggtgataattgtattatgaattttattatgtgtactatttttttttgttagaatagaatagaaagtacatatagaaaaaaatagaagtaagagacattaagagagagagataaagagagagagaaagggagagagagaaagagagagagggagagagggggagagaaagagagaaagagagaggaagggagggagagagagaaagagagagagagggaagagagagagagggaaagagaaagaaagaggaagggggcaaaattgtgattaatacacaaaatataaagaatatcatctcttttttgttttgatgctactttcttaattataatttttttgtgtgttagatctgcaaatttccctttctatttctaactatagtgacacaataatattatttaccaaaaacaaaaaagttgaacaaagaataatgattcaataatcctatgaatttgttgaatggtgatttgcaaaactagctatttttataatgtaattaagaatataacattatatatatatataaattaaaaaaatagcatgtagagataagaagaagacgattttagtgttgagttgtatgtgagatgatttagtaacagttaggcttcgaatggtaactgcgttttagagagtgcgagacaagcggttatagaagtgcggtgcggttttactgcgggccggttgattaaaacgcagtatgcggaacgagtgcagttagtgcggaacagacagtgcgggacaatgtatgaatggtaaaaaaacgatatgtgttacattacaaatgagtgaatggttaaaatcgcaataggcgttacaaatatattataattatatattttgaaaataaaaatagattagtgatattattattataaaagttatagttttgtgttaaattaccaaaaaattttatattttattacaaaccttaaatatacgttaatttaaatatttgagtttagaattttataaaaataaatttatttcagaaattaagggaaacaataattatcaaaaacacaagcaaaataatattaacgagtatttttatttgcccacaacatatctgcaatattgtctcttatttgtgtcataaattctccatctgctacttcatttgcttccatatcatttatttcaggctcccaatctgtattgttaattctagcctctgtcattacttctaaaaaatttgaaattttgaaaaaattgtgtaatcccattgtagtcattaccattctcttttgtacttgaatactatatcttgggaaatcacaaagaattatccatttcttcttccaaactccaaaagttctctcgattactgaacgtaatgacacatgacatcgattaaataattcttttttatttcttggaggtggtccagaatagaactgcgacatatgatacctcacaattccacctcttgatgatctgtaaggagccaaaaattcatgtccgtttggatagccagaatcaacgacgtagtacttttctagcggaggcaagggaaaatcagaatcacttcgttgtgccattgttagaacagatttgtcgtgacatgatctcggtgctccattccaaatatatgtgaagaacatattcaaatcacatattgccatgatgttcaaagatgcattatcgtgtcgattccaatatattccttgtaattcaggcttcacttttttacacaaacataagtcccatccatagctccaacaaatccactaaaatatggtcaatttcttcgatctacttgaagtatctcaagatttcgatgtagatcttgagtttttggagttctaatataatcacatgctagtaattcagttgccgtaagaacttctccaaattttctcttcacggtctcttgatttcgcccaaatctcaaaccaacatctctttgaacttcattatgcccacatattcgtaaaaacatagccacacattcctcaatgcttatatttagtgttggttgtagaccgtaatttgtttgtagcagactgcacaatgttgtaaatgctgtgagtgacattcgtaataactgaagacaagcagcatcatcttgttgtagtcgatgccaaatatttctccatcctaaacctccatcggtttgcgctggtgctctttgaaaatatcgatcatagtaactcaaagttggctggattattaactccttaaattgctcattttctaatttccacaattcaagtctttctttataagttagaatatggattccttgtgatcgcaactgacatatacggaaaacctgaaattttataaaatagtaaaaatgtttttagccataagtgaacttacattatacaattacaccaaatgcatagaaactaagaaaagccgaatatttttaacataaacgagaataataatctatagaaaaaattaattttcgtcttctaaatcaatttgattatcctcgtttgtacttgcatttactctcttcgaggttccccatatattaaacagacctcctcgtctaggtctttccaatctttcttgatgaatatcccttatattatcttcttgacttcccactgaaaaccattactaaatatttgttggagttgttgcagatgagcttccttattgaaaatttggtgtattacgcccttgttgaacatttgatggtgaaccccaagattgaaagtttggtaaaagaccccaatgtgaagcatttggtgatgaattccattgtggatcatttcgtggtgaactccattgtgaagctgttggttgggtgccccattgtggaacatttggtgatgtaccccagtggaatcatttgcttgtgtgccccagtgttgagcatttggtggagtattccattggggagcatttgattgtgtcccccaatgttgattgtttggtggtgtgttccattgggaagcgcttgattgtgtcccccaatgttgattgttcggtggtgtgttccattgggaagcatttgcttgtgtcccccattgttgagcatttggtggtgttcccaaacgttaagtatttggtgatgtttctcaatgtttagcatttggtggtgtgccccattgttgtatactaggtggtgtttcccattgttgagtacttggtggtgttccccattgtgaaacatttggtggtgtttcccattgctgaaaacttgggcctcctgaatttggactgccataagaatgtccagagcccaacctcttcgacaagtcttggttgttccgagaaacactagtcatggcttctaacaattgtattttttcctcgttagtgcctccaactatgtcaaggaaatactttcgccaaaattttagctgtttaaatgtatcaatgcatgcccaatgaaatttggtattccttggaagttccaaggcaaggaatatagcttatgcttttttgaattcatcgtaatcttcttgatcaaaactaccaggccgaagttgttgcaaactttgtcgttgatactcagtatagccagcgatggtgtcttgtatagttgtttcaaaagattgtcttccacagtttcctctggacctacttccaaaattttttgcttttgaacttccttcagatctttgagaaccacttccgcgccttacactagaattaaaattcagtctgctttgttgttcacctcttccaacaggaacacggaatgtgtcacgagtgaactcattcgaaggatgtgtatcatcatcgatgttaatacgataatttttttcattttcttcgatctcgggaacattggtctcaggcatgtcaccaccatccgagtaaccatgaatggcatcatcagctcgtctctggttcattagctcttcttgtctttgtcgtgaagaatgttgtgattgggaagaaacatcatgcaatctaaaacatcgttgcattacatcccaaaactctgctggttatcgtttgaacttagtagttattttgcatccctgtaaaactcatacatattatttattataatatatgtatgtgttaatattagtagtaagaatagaatggttataagtaattaccaattcatgacccttccaccacgagtcagatgcagaaatcatggatgtttcagaatcaaccgagacaccggtagaagtcattagaaatttccatcttttatatgcttttttgaactcatcaagtttgtttttgaaaaacaaataatttatattcatgttaaatgctaggttaaatttctcaaccatgtattctcgaccgagaggcgtaggatctttaagagtataattattcatggaaattgcatgatcaaacaactcaatcaatgttttttcttcttcataagtccatttatgcttcgatgttgtctacaactttttaaaaaatttgtagaattagtttaatatactttcaaaaactatacttaatatgcaaatatataaaaagtatataataacaagatttacccttgctatcttttcggtgggaacatttgtgtttctttgcctggaagaatttgtattgaatcggcctctagacgacatacctacatttaacaacacaatacaatataatattaaacttaaaataatttatcatcagattattcatattatcaggtttttcattgttacggtatttattatataaatgtttaagaagactattattatacatattatttacttaaagtttctgtcatatatgttaagattaaaaatgtaaattggtttcaatatttggatgtggagaaaattttatttttatttttaatttattttaaatagaagtgtataataatttttatgtaataaaacatatatatctatatatatatatatatgtattaaaaaagaagtttactgatgcaaagagatggatcggtgaatgcgtatttgatagagaagaaccttgtacaaagagatggatcggtgaatgcgtacttgatagatgagtgtttttttttgtaagatgataagagagtattttgaacgtaaaggaaaatagtgtatgatgtgaatagcaatagtatagtgaataaggtgttatataggatagtgtttatagtctttttaattaaaaaataatgaaatattaatatcaactatctaccgtgtctaaacacatcttttccttatattctatttttgaacactttttccttatattctatttttgaagtacgtttccatatggatgggtctgtttttgttcctcacatggtgtattttctttttctgttcttttaattaaaaaataaaatgacaaaatgtcgttgtgaatggtgaccaaaagtaaaacacagtaggcggttttttggaacgctcgaaacattcaagacctcagtttagtttttacctatttgttttttttgctatatatcttttccaaaaaatagattccaattataaaatttgttagaaaaaatgtatatcttttttacatataaaatagtttgaatttttaaaatcggatttgaatttataaaatagtaaatagtgtttataagtaaaaacatgttgtactattttggatgtagagaaataaaatgttatactatactattttggatgtataaaaaaactataccctaaaatacaacattggcaacccaagcaaccgaataacataagtggtatctgaaaaatttactttgtccttctcatttgtttgttatgttataacgaatgcagacttgaagccattagaagaaagtgatgaatgcagacttgaagccattacaatttttcaatcattaggaaaaaaacgagatgggtgaagattctaagaagaaagggaagtgaggtgacgtggacatacaaagaaaatgcaaaagaaagagaaaaaaaaaaagagagaggagattgagagaagaaagaaaaagagatgacacaaagatgagagaggaagggactttgagtgaggtggagagagaaggataaatatgtcattattatatataatatagaatatagctgttactttcttaatttataaacttttgttagttattcttgcaaattttcctttgttgaatatatttccttttgtataataaaaacaaaaatcaaataatttgaaaaaaaagaaaatgggataaagagtataacaaacctggtgaaaattgtgtttatttcgaccaaatggtggacgttttcagcttatttggaggaattacacagtgacaatgaaaaattcacaagtttctctttatctttaattttccatagcgtatatgcaaagcggataagaaacacttcgtatcacttatgtaaaaaagagtataacaaacaaaaaagaaattaaaaaggaaaaaaaaaaaagaaatcgagataacaaaagaattcgaagcaaaaataaacaagaaaaaatggaattttgttccaaaaaataaaaaaatggaaatttttacaataataaatcaatttactatttttgtgtgaaatcacaaactttataaatagagagctcttatgttaagaaattaatcacaacaacaaagagaaccaaaacaactaaagagagagacctaataatgagaattgtttcggaacatgattgtcccaaaagcgtcgaagggtttagctatgaccctgaacctaacaggagtttcgatcgcttggtctctgagaccgagtcttttgaaaagaagctcaatgcttttacaaagtttcatcaaccattcactaagacaacctcaaggacggatatagcattcgtaatgcgtgtatcagaagatgatatggatagtgatgaagatgtagagaataatgatcaacaagacaaagaagaaagtcaaatctgtacctgtgatgatctatacttaagcgatgatgatgagtttgatcatgaacttgagtatacgataatgaataaaatgggtttggccgagaacagggccagctccgagaattaatggaccatagcaattttttattttggtgttttatatataaatatttgatattgatactaaaattttaagattttaggaaaatttggcctatttttgcaagaataatatattttgggggccaaattttgcaacaaaatttatgggggccaaagcaattgtttcaattggctgtgctcagggccagccctggctgagaacgaccaccaaaccaaaagcacggaagatattcaaaatcaagtatcagttgttgaaaaggaaataaggaatgagattgaaagggcactctctgcaatagctctggttgagaagtaccgcgaaaaccgtagagaagttgaacggagtcttgatcttcaatataagcgagaagtttctgaagcacttgagactcatatgaatgtagtcaaacgtgaacatgcaattatatcgtatatagaacaaagaaagataaggagagaagaagctcaagaggaaatgctcaatgaacttagatgaccgaatgtatctcaatgaacctcaaggaagaactatgaagacgagtttcttgtcggcggagtttactgcagagttagttcagcattaccagaggaatgattacatagactgctattgattttgatgtataattctttttttttttatggcgtttcgaagtgtttaatttcaaaatgaatttgttaacatttagtgatttgaacaatttaaacattcagaagaacacataacataaatcaaaatatttgacaaattctactgattacagaaaaactctgaaacttgatataatgttttttaaagtaccgagcattattatttaattatcataaggatttctgaatttcttcaagagatctggaatgtcgtatcccagcatatcatctactgcttgaatcatcttaggcttcagtttctcgaatttgtcaatgttatagcctcccaatacttctctaaaatgttccacacttggaaagtctccagctggaagatgaaactctcgctgcacctgtttttttgacataaggttgtgtaaaaaatacgagataaaatgtctataatctttattgtacttctttcttggtcactagagaggtatgcctaatctaaattctggtttggcttatagtcagatacagtactttggtttaggacatgaagaaatcaattctagttccagtttcctaatcggatggggtttggttttctaccaaaagatttctaagtaattgcaaaaattttaacgctacacctaatgcgattagtctaagttctagaccaaatgagatattttacgcacctttccaaattcttcttcgagattgtccatgagacgttgctgagctttggatttgcccatcattgctggcatttccttcttaaggtgactcattatgtatgcatttatctttgcagatcgagctcgcttcacaaactcattaatctgcaaagaataacaaaaaaaatagtcaggatttgagaattgtaacatacattattgtttaaattgagactcatcaaaatcatacctttctgtcacatgctttcttgggtacgtccattaagtctgctagaagatcattttgctctttctcaaagagttctttcccaatcggtccaactgcaacttcgtttatgggtttgtcattgaaggacctgcacaagttaaaagcaaagaaaaagaaatcaatctatcgtgtgtacaagtgaaactaatggctttttgacttctttgttgacaattcatgttgtactcgaaaaaacatacccaatatagacacgtacgacctctggtgtgttcaggactttaccaagcgaccacatcaatgctccatacactctcattagctttagaaaaagcggctcaacaatgagtaaaaatgaagcttatgaacataacaaatgaatgggacgaaaacgaaacttacttgttgagtatcaacttggtcagctttgtttaagacaacacggatcttgtcttcattaccacgtagagatgttatcacacgtttgaattcatcactgatgtcaagcttgtggggatcaaagagcaggagaatcatgtcgcatttagatgcaaaccatgagatgacaccagtgaagtcatagctcctttgcatcctttgtttctctcctgaaagaactccaggagtgtctacaagagtaatttggtccaagacctaccacaaacaagaagggaaagcttctttaaaccaacagagggaaagataaaaagagagagtggggtaatgcttaatcactcaccggatgcggcatttgagaacactcgaactttgagaggaaagcacctccaaagcttgttagtccgttaaatggcatgtcagcttgaacagccatggtatttccaggtatagtccgctcatctggtccactctataagaaaatcaaatcataagagttaactcaaataaaaagaaaaagtaactagcaatcattacactacaattagatcaagacacattgacataccattgcaactacaaacctatctgttgttggctctggaccgatatgagctcctgacaacaagaggacaatggtgaagatcagatagataactgaagattccttgcatttgctaggattagaggaaacaaagcaagttacctgggtagtcacatccgagcaagtgttttataaatgttgtttttccggtggaatattgacccaaaagcattaccattggtttggcatcaaaatcgctactagtctgcaaatcataaagtatcaataaactgagaatcattttccatggtgatatagatatgagttctttagctcttcaccgaaaaaacggaataaacaaaaactcacaagtgtttctgaaacagtaaggatattactcaccagtaccggggatgcaaaatcattgaaccgatatgtgacttccaaaggctttagcttttcagtgtacaatcttttcaagccatcaacaattgtcaccacatttacttgtggctggatatgaaaagtgacaaaatactcgttaaatcacatgactccatatttgaaaaagaatcacatttgcagcaataaagaaaacagcaaccaaccttaataatagattttgatttgaaccaaggagtttttgccgtgacttgtggcttggtaactactgcaaaagttcatccagcaaatcaacagttttacattaacgaaaaatatcatcatgaatgaaacaattggtgaaaataaagaatgttatttaaccattgtcttcaacatccacatttgtttttgacactttctgcttctgtaagcaaatatattagattaggaaaaccaaatcatgtaaagattgaaaaacaaaatgagataatcagataagaaagagtcttactgatacaacgttttctagtccttccaacactggaagttccacactcttcatgtcaactataacaaaaacaaagatacagattagctatatctaatatgactatcaagctcttacatcagaacctcttgattcaaacagtttaagatgtaattttccacttacttgagcctttgagaaggtctgaagtaatttcatgtccttcttgtgccaatgagacgagctgagcaacaaaatcaatccattgagtaagaaatttagcagaaaatttcaaattaacagatgtaattgatacaattattataccttcatcgcagtgatgaactccgataaaccgagaaatccttgccgctttgaatccgcaactgcccaaacctacaaaccaaaatccaactaattccaatcaaccctagattacactgttacaaattccatggattcatgaactcagaaagttcaattttaaaccaaatagcctatatatttcacgaatcgtcgattatatgaataataacctgtttgagttcctggcgagaaagctttgacatcgcgaagaactttgtagcatcgttacccgaaacacgaccatctccatctgtaatctcagagaatcgaaacaaaatcagagcaggaataactaagacgcactagtaaattcaatctgagaagggaaaaaaacactgaacctgaatcggcgatgttgaaccattccttgtagatcttctgatgctcttttaaacaagaaccgatcgagatcgtcgatgaagtctccattactgagataaagaagaagaagagagatagagagagaaaatggtttctgaaatttgaaaattgaaactgaatagttgagttaagatagagagagagagagagagagagagagagagagcgtcgacagagaaaagatatatatccaaattggggattttaacgggcttggcgcttgtcgaggaggggaaacaacattacgacatcgttttaagtggccgacacgctgtgtaactctttaaatttgaaacaacgtgaaagttcgatctaatagataattagcctaattaactagatttttttgctattacagtttaaagaggtcagattttttgctagcaatcaacggctgtgatttgatatctcgccagatttatttattttaatttaatttttactaaatttgaaaacttgaaaaagcgtcacttctgcaaaatctcagctcagcatatctcggtcatatgtagctgttaaattttatagagtaggtcagtattcatataataattcttgcaacctgcacatacaaaaggaaaaacagttagtatttcataaattgtgtagaataattaatatgtaaaagtaattaaaataacaaaaatttcataccattctcattaatataggtcagtaccatgtgctttgcacgagataacattttaattcgtctgttattttggtaatatcttatactaatttgatggattcttagtgtggataaaatgttatcttctataatttacaaagggaaaatgttagaaaaatcttcaaccttcaaaaattgcatggaaaaatttccaactccggaaatgtcgttttaatcacaaaacttttggttgactttccagaaaataccaaagtttggttacctggccaaattagtcatcgcgttaagtctctgttaggacgatgattatgaggttaataagccgttaacggcttccgggttagcaaaacgacatcgtttttgtaatgacagatgagactctaaaaacccccaaatcgatttcagatttcaatccctaaaatttctattcttcaattcgatctctctctctctaacaatgagttcaagctctgttacatctggagtcaccggagaatgtgatgtgccatcgaagtgtgtgtggattggggatcacaatctttacctccactgtcagcatcagtgttgcttgcatctccatcttctcttgcaccaacaccaaaatctgcttcaaaatcatcacaattttcctcctctagacctccatccatatcgtcttcaccaacattgtcttcaccaacagtcccacccacattgtcttctgggtttcgattcgtcgcagtttcttctgggtttcgattcgtcgcagtttcttctgggatctgattcatcgcggtttcttctgggttttgatttgtctccagttcttctgagatctcaacaactttcggtggtcgattcgttatgtttgctctgttagcttcgcctgcaatagccattagcctccgcgaccgacgaggattccagtttcctccccgcgtcttcgccatcgggatcaattggaaagagattgagagaatttcagaattttctctcttttagggtttctaatcgatttgggaatttctcaaatctctctgaatcaaaacgacgacgtttctatcgattatggctcattttgtcattatagaaacgatgtcgttttgctaagacggaagcccttaacggcttattaaccctgtaatcgtcgtcctaacggagacttaacgtgatgactaatttggccaagtcaaccaaacttttgtattttctggaaaagtcaaccaaaagtttgtgattaaaacgacgtttgaggagttggagattttttcgtcctatttttgaaaattggcgatttttctgacatatttcccaatttacaaagtattaaagtctatatcaaatttgaatcttatagtataaatgaatcttatagtatgtatagttgtatacgttgtgtgtttgtaaaacgtcatgtgttagtatatacgttgtcggttagtgtatggaagaatttataaacgtgtatatattagtaaatatttgttttacaaatcccgttttattagctaagtattcacatataatgaataaacacaacaaacatataaattatcaaaaccaatcatttaaaaccataagtttcaaaaataaattgttaatttatctgagagttaaatttatttaaaaacatatcattgattattaaattttaaaagcaacaatgattctcgatataattcctgcaatttgcacatgtaaaagagtaaatttttagtatgagtttcattacattttttattgtacaacaaaacatattctaacttttttacgtaataaaatagatatactatattttctatgttttattttctgtttagatatataaagtaattatttttatactatattaagacttaatacaataagggtggctgtaaagacttcgactttaaaaaattatgttgtagaaagtttggctgtagagacttcgactttaaaaaattatgttgtagaaaattatggtaacaaaaagttgtagaagctgtgaattttatttacttatatttattattattaaatatatttataaatataaatgatatcaaaattgaattatgttgtaacatagtgacaaaacatatattttaataataataaaaaattaaaatacaacattttttaaaataaatgacgaaataaatatcctcaacaaacaaaatacatatgtcttactcattcatttattctcttagtaaccaaaaattacattaagaagtgggataaactgagaaaattatggtgtttcgagattattatgatatatgttgttttgcttcgtcaaactatccaaacgatttttcccatgtttccaacacaaattatttccaaaataattgttaatattctgaagaattatttattttctgaatagcacttaaaccttttttattcttattcatatttttgaatggcctatataaacagtatatgatttctgaaaatgctaattatgtaaactctcttacacttccaaacacaaatttacttcaaacataattgttaatattctgaagaattctttatttctgaatagcacttaaaccttttttattgttattcatatttttgaatggcctatatgaatcgtgtatggtttttgaaaaatgctaattatgtaaactctcttacatttacattaacgttggtgataaaaatataataattattagtaaaatagattttaaaagaaagatagaaaattaataataattaatttattaaaactgatttgtgaaaaatatatataaacttgtggagagtttttaagttatcatggggagaacaaaaaagaaagtttttaattttatttgtttgaaagccatgtattcaagactatacaaaaagaagagaaataaagaaaaaaaataaaaaataaaaataaggctttgagaactttcaaaataaataaagtaaaaaaagcatgattgacaaaaataaatctgtagacactttgggggtgattggaagacactttaagggctttagattttttttaaagtcttaaaagtcgaatatttaccaatcacaatttcaagactttacgtttttttaaagttttgaaagtctaactgtccagttttttcatttttacgcgggtgattgggaagaggcttccgtggctttaaaagtcctcacagtttttattttaacaatcatgctttcttgactttattttttaaaaaagttctcaaggccttgttttattttgttctttgttttcctttttttaaaaaacttctttctaatgcccttttcatgatgccctttttcaattctaccattttttaatctattttcattactaccctctttaaatttttaatgaccattttactcctattttgaaattgttttaggttaacaaaatgaaataatatttttcgcctaaaatattccaaaataaatttcctgccaaaaattttcgaaaaaacaatttttcgccaaaatttttttttcccttttaaaatcccttataaatctttttaaatcattttaaaatcccttgtaaatcttgtaaaagggaatttaaaacgggaaaaatgtcataaaaatcatcactttacaaaaagtggtgaaaaaagcttgaactttactcctggtaaattaaattttcaactttcattgactttctaattaaatcgttaatttttattgactttgccaaataaggcatgtcgttaagtcaactgacggactaatttagtggagttagtcaacgttaattgattccgttaaaactgtaaaacgacggagttttgtaaatttcttttgatatttaaaaaaaacaaaagtttgagatcacagaagttcgaacctcccaccttaacgatttacgatttgatatattgccctctgaaccgaaacatttttatgaaaatattacacaaactaatttatataggtagtttagcatctctctctctagattatacaatacgcttgaaaccataataatcccgatttcattttctcagattgaatcgttaacttttaaaacgtaaccttaaactaatttcaataatttaggttttttccccttgaaattaaagaatcaaatctagagtgaaacaatgccaatggagactactactatgcggaattcgtcatcaattccaccatcatctatatcaatccagcacagtttcttttaaacggcaatgataatgtaatcatcaatggaggatctctaaggagacaatgtttgagagaagtggcaaggtttctaagtggtgcgagtaacggacgtgtgatgagggagctgcctatgcttacgagttatgacttataagggaggttgcggctgtttaaagagaagaaaagcgattaggtttattaggagatgagagagagatactgatataaattactttgtgtaaaattttcataaaaacgttttagttgagatggctatatatctcgtcgtatatcgtaaaggtagaaggttcaaaccactgtgacttcaactttttgttttttaaatatcaaaagaaaatcacaaaactacgtcgttttagagttttaacggaatcaattaacgttgactaactccactaaattagtctgttagttgacttaacgacataccttatttggcaaagtcaataaaaattaacgatttaattggaaagtcaatgaaagttggtaatttaattcaccagaagtaaaattcaagcttttttcaccactttttgtaaagtgatgatttttatgacatttttcccaatttaaaacccttttaaaatccgttgtaaatcttttaaaacccttttaaaatcccttgtaaatctatttcccgccaaaaaaaaattacaaggttttttaaaagcattttttagctgagaacaaatttgttacgaaaaaaaaatatggcggaaaaattgttttttggcgggaaaaaagtttagcgaaatttttttttttgaagggaaaaataaatttggcgggaaattttcagtttccaattacatgttcctattagatgaaggtaatttggtcattctatttaagagaaggggtattttaaaaatggacaacataaaaggttattgttgcaaaagagtagtaaaaaaatgatagttttgcaaatctgagatttgaaatctcctttttttttttgataaaaattctttctaatacccttttcatgatgccccttttcaattcaaccctttttttagccatttacatttataccctctttaaatttttaatgaccattttacccttacttagaaattgttttaggttaacaaaatgaaatattaattgtttttgcctaaaatattctaaaatcaatttcccgacaaaacatttcgaaaaaaaaattcccgccaaaagttttcgaaaaaaaaattctcgccataatgttttcttcaaaaaacatattctcggaaaaaaaaaattttttggcgggaaatagatttacaaggggttataaaaggattttaaaatatttacaagagattttaaaagggttttaaaagatttacaagggattttaaaaaagttttaaaagatttacaagagattttaaagggctttaaaagatttacaaaggttttttaaagggtttaaaattgttttaaaaggtttttaaaatatttacgagggattttaaaagagttttaaaagatttagaagagaatttaaaagggttttaaaatatttacaagggattttaaaggactttaaaagatttacaaaggttttttaaagatttttaaacggtttaaaattgttttaaaacggttttaaaatatttacaaaagatttacaagggattttaaaagggttttaaaatatttacaagggattttaaagggctttaaaagatttacaaaagtttttaaaagatttttaaagactttaaaagtgtgctaaaagatttattagggattttaaaagagtttaaaaagatttagaagagatttttatagagttttaaaagatgtataagagtttttataagatttttagagaatttacaagaagaacctttaaaaatttatgtaaatctttataaaatcttttaaaatctgttgtaaatattttaaaacccttttaaaatcatttgtaaatattttaaaacccttttaaaatctcttgtaaatattttaaaactcttttaaaataccgtgtaaatatttttaaacacttttaaaattccttatatatatttttaaacccttttaaaacccgttatatatcttttaaaacccttttaaaatcacttgtaaatctttttcccgttaaaaaaaattacaaggatttttaaaaacatttttttggctgaaaaaatattgttacgaaaaacaaaatttggcgggaaatattttttttggcagcaatttttttttttggtgggaaaaaagtttggcggtatttattttttggcgggaaaaaaacattttggcgccaaaaaaatttgtttgaaaatttcagtttccaattacttgttcctattagatgagagtaatttggtcattctgttcaaaagaagggtatttttaaaaatggacaacataaaagggtattgttgcaaaaggtagtaaaagaagggtagttttgcaaatttcccttttttaagtaacgattacatggctttcaaacaaataacctttcttttttttctcccatgataattaaaaactctctataattttatatatattttttcacaaatcaattttgattaattaattattattaattttatatctttcttttaagatccattttactaataaatagtttatttattacatgtgcagtttatttgttgagaatatttatttaagaatatgttttgtattttatttttatattattaataaaatatatttgtgtcactatgtttaaacataattcaattttaacatattattatttataaaaatatatttaataataataaaaaatagtactcacagcttttagagctctatattaccaatcagaatttaacaactaaagtctcaacaattaagtctgtacatccaaattttctacagcaaaagtttttaaagccaaagtctttacagccatccttaccaatagatttctaaagtctcaaatatgaggctttcaaacaaataataaaacattaaaataaataataattaaaagttttgtttttcttttcctcataataactaaaatctttctacatgtttacatatattgtttcacaaatattttttgataaattatttattatcatttttcattctttcttttaagatccattttaataattattattttattttcataatcacctttgttatttcttttaaataaatattttatttttaataatttgatttttagtttatccactttttaatccaatgtttggttattaaacataaatgaataataaatatttttctatgcatttatttatgattgttgtatttggttttttaattcttaccattaataaaattatattgtcaaataaattcatttataacattatttctattttaaaaacatatataatttttaaaaaataacagtcacaacttctacagttttgttataccaatcagattttaacatccaaagttcttaaatcgaaagtctttgcagtcaaagtttgttataccaaagttcttaaagcgaaagtctttacagtcaaaactaatagtcccttccaatcaccccctttacaacactcttaaagccttgaaagtctcctgccaatcaccattgatgtataggatatcatatttacatgatatgttgatggtccactaacaaaaggtccaatgcacattttgatatcaccggatatagttgtatttggtaacttaggtaagtgataacgatggaaatgttttttcctcaatcctcctcctactaaaaacttttgaaaaaataataaaaccaaaataaattgtgtttgatatcttatttatcatcattaggaaacatttttttgttgtagtaagattataagatgtaatatagagtcattaacgatcaattagattttcctttgagttggtcattgttgtttaccaattaccacaatatctttgagaagctacatgggccgattagtagcgactgctagttatggctttagaagatttgactttaaaagtttgagctgcaaagaatttggttgtaaagacttcggatgtaaaaactttgactcttaaaatctgattggtaaaacaaagcaatagaagttgtggatgttatttattattattattatatatattataataaataaaataaatttagaactaaatttatgtaacaagaattgtttttaatgatttttaaaatattattattcattcagtttttaaaaaccaaacattgcattatgaagttggatttactaaaaacaaattgttaataaataaaatatttcttttaaagaaatgacagctgtttagaattaaaataagaaataaatattctaaaacaatacattttattagaatattatggctaaattgtttttctgaaaactgttttgaatgtttttttttattgagtaattgtataagttagacttatcaaaaaaatcaacaaatttattaataatgaaccaaataataaaatgattattagtgaaataaaattattagtgaaatagatcttaaaagaaagatagaaaatagataataattaatttatcaaaaacattttgtgaagaaagtatatttaatttgtagatagtttttaattatgctgggagaagatcaaaaaaacttttaaaaattatttgtgtgaaagcctctattattggactttaaaaaaaagaagagaaatgaagagaaaaaaaagaaggctttaaaaacttaaaaaaagaaagtaaaaagcctaattggcaacaaaaaaaactgaaagagtttagactctttttaaagccttgaaattcacttgccaatcaccccaacaatttggtctaagcaatccaacaaaagtttaagtagaagttaccaccaatctcggaggacgaagttcgacctcgacgacctatataagaaggaaaaaagaactagaaagtgattttataatcccctaagagcacctccattgatagtttgttaattagagactcataatcactcataagcaaataaagaagaaacgagatatagtctttttaaacaagaaaaactattaagaaacccatatctcacttatcttcttataatcaattatatttatttttatagtttaaaacttaatcgaaaaaatttccaaaaaaaactccacataatttttatttgaacatttaataccaaataccttttggttggaacaaatatatcatcattctgagccttgacttcatggctgatttatactagatcccaattgggtttactgttaagtataatcgagttgtgtgattataaaatgcaccataatggtttggcttgctcacgatggagctcagataaaatgcaccatactgttaagtataatcgagttacatttgctctgtttcacgtctcggaaggactaggggccgattgatagcgactgttagttttggctttacaggctttgactttaaaaatccgagctatagagaatttggctgtaaagacttcggctgtagaaactttggctattaaaatctaattggtaaaacaatgctgtagaagctgtacgtgcttgttattaataataataataaataaaatatatttagaaataaatttatctaacaataaattttattaatgatttaaaaaatatgtattattcatttattttttagaaaccaaacattgcatcatgaagttggatttactaaaaatgaaattgttaatttaaaatatttatgttaaagaaatgacaaaggtttagaaataaaataagaaataaaaattcttaaaagatacatttattgttttatgcagagacttaatatccaaagaaattagtaagaagtgggataaacttaataaaacttggatgaaggcgtggagcttgaggatcattataatatatcttgtactacatcttcaaataatctaaactgtttttagatgttgcccctctaaattagctccgagttgattgttaaatttctgaataatattttttattgagtaattgtataagtttgacttatcaaaaaaatcaaaaactttattactgattaaccaaataataaaataattattagtgaaataaaattattagtgaaatggatcttaaaagaaagatagaaaattgataacaattatttttcaaaaatgttttgtgaaaaaaatatatgtaacttgtagagagtttttaattatgttgggaagaagtaggggtgtcaaaatgggtcaaaattcatgggtcaactcaactcaattcaacccatgaaccctaatgggttgaaatttttgactcaaatgagttgatgggtcaaatgagttgatgagtcaattggtttgatgagtaaaatgagttgggttgtaatgggttaatggttttagtggtttacccaattaacccatcaaattttgtaaaattgaattaaaccaactaaaatctctaaaccaatatttaaccaacacatctaaaccaatttaataaaatcatccccaaatttaagaaatcaatcgtttctcgacctccacttcgacctatactctccaccggtctcatccacatcggagactgacaagacgacgaagactgcttcaattgaagacgacgatgatgatgtgcttgtagtgggtcaaaagggtgaggtatgtttccactggacccttctcatttctaagttctttttcgttttcttcattcgaattggcgtgaaagttcagattctgtatgcgttagtgttgtttagctcttaatttgaatcctctaagaacaaattattttaaacaagttaagccttcattcgaaacattgagttcttaagggttttagttagtgtttaagatccttgagttttgttcatttggttgatcaattgagtttaacttgaaggctttggtgattcaatctaagggatactaagttaggattgaattttggttaagataagagagactgttcttgtgtgtgtgctttgactattcttttaggatcaatttagttagactgttcttttggttaattttcactttatttgaatggctctacctttaatagactagtcttcttctagtttgtggtacttgagcgatgaagtttgagttctgggattagttacttctgatagttttgatgtgattgccaaattgttatgtgtttgtttcggtaaagggtttaagctgaaagaagatatttcagcttatgtctagggtcaaagatgatgtctatcacgtctcctcttggtttgggaaatcatgttcatgatctaacttaaccaaatttttaatgtatcatgtctaatcagagttacactcagtgtagaaatatttttagaataacaagagctaacaaaaatcgtatttagtcatatgcttgccgtattgtccaaaacagtcttcttttctctttgttttattgattctttgactgtgtctatgtgattaattcttgtatttggctaataacaggttttattaagcaatctctaacttggccttatttctatgtatagttatttgcagctgatcttttacaaaaaatggacaatgaagacgaatgtacttatggtggtgaaggtgggcaaacatcagcagatacatcacaatctaaaagtttagtaagtgcttctcgttttaaaagaagtagaacatcagatatgtgggattactttacactagaagatgagaatgatggaaaaatagcatattgtaagaaatgcttgaagccctacccgatattgccaactactggaacatcaaatctgattcgtcatcataggaaatgctcaatgggtttagatgttggaagaaagacaacgaagatagatcataaagttgtcagagaaaagtttagtcgagtgattattcgacatgatcttccttttctttgtgtcgaatatgaagagcttagagatttcattagttatatgaatccagattataagtgctatactaggaatactgctgcagctgatgtggttaagacttgggaaaaggaaaaacagattctaaaatctgagttagaaaggattcctagtaggatttgtttgacttctgattgttggacttcacttggtggagatggttatattgttttaactgcacattacgtggatacaagatggatattgaatagcaaaatcttatcgttttctgacatgcttcctccgcatactggtgatgctttagctagtaagatccatgaatgtttgaaagagtggggaatagaaaagaaggtgtttacccttactttggataatgctacagcaaataatagtatgcaagaagtattgatagatcgtcttaagttggataataatttgatgtgcaaaggggaattctttcatgtgcgttgctgtgcacatgtcttaaaccgtattgtccaaaacggtttagatgtgattagcgatgcattgtctaagataagagagactgttaagtatgtcaaagggtcgacatctaggcgattagcacttgcagaatgtgtagaagggaaaggggaagtgcttctatcattagatgtgcaaactcgatggaattcaacatatttgatgcttcacaaagctttgaagtatcaacgtgcactaaataggtttaagatagttgataaaaactataagaactgtccctcgagtgaagaatggaagagagcaaagactattcatgagatcttgatgccattttacaagatcactaatttgatgtctgggagaagctattcaacttcaaatttatattttggtcatgtttggaagattcagtgtttgttggaagttcatcaaacaacgaagataaagtagtccgagagatgatttttaagatgagactgaaatttgataaatactggaaagagtatagtgttattcttgcaatgagggctgttttggatccgagaatgaaattcaaacttctaaagcgatgttatgatgagcttgatccaaccacttcacaagaaaaaatagatttcctcgagactaagattacagagctttttggagaatatagaaaagcatttcctgtgactcccgtcgttagttctacaagagcaggttctcgtgtttcagaacgaggaagtgacaacttggacgtgttagatgtaagtacttaactttgacattttctattattgccttattagtttatctaattacgtattcatcgttcctgttggtagctagtataattgagtgggttgatgaaaatgagtatagttagtaaatcgacgatttcattttgaacgtcactcttgatttgttgtcttagctaaatgttaacatgttagctattcatgttataggatttgtttgacttagatgatgttccagaagttgaagaaggaaaatcagccttagatatgtatttggaggacccaaaattagagatgaaaaatcatcctaatttaaatgttttgcaatattggaaagagaacagacttcgttttggtgcgttggcgtacatggcaatggatgtacttagtattcccatcacaagcgtggcgtctgaatcttcttttagtatagggtctcatgtcctaaataaatatcgaagtcgtcttcttccgaccaatgttcaagctttgttatgtactcggtcatggctctacggttttgtgagtgatgaagaaggtatgatacaattttatttctcatattcttctactgttatgtgatcttaatatatttcttggttatgaattgcagatgacaaggaagagacgattgttattcgatcgtgagagtgttagtgaggttttcatttgtgttttgttcaaaactcatgaactattgtaataaagtgaagtttttttactaaagttttattgaccggatcatgttacaattcattagttttattgtaaaaaacgtaaaccgtaattttcgcgcaaaaaacgtaaacctcgtgattttctcgccaaaaacgtaacttcgtgattttcccgccaaaaaaacatgaccccgtgattttcccgtctaaaaatgtaaactcataaaaatttctgaatcaataaatatctcaaatttaataataatgaattaatgatgataataattatttattattgttttataatattaattaattaaattattatttaaatggttaacccatttaacaactcaacccatcaaatgaaatgagttatgggttgacccaactcattttgttaaatgagttgggtctaacccataactcatttaatcataaactcatttgattatgagttgggttgggttgggttacccattttgacacccctaggaagaagaaaaaaaaccttttgagaatcttttgtttgaaagtctcgtttatgagactttaaaaaaaagaaaaggagaatgttgcactattaggcacttttaaagaaagtttttacgtttaaggcactttgtagggatcaaacacttttccttctttttggagaaaaaagacaattatatccttctccaattaaatcattaattgcttaaccggtttgatatgtttggtttgatttggtatcaaaagaaaacatgtggcaaacacgatagacgagttttttttgtcgacaaagatgatcaaggaagttacctcaaacaattacacagacggttgtaattcagtcacaactttgtttctttgacgacgaaggtacgatctatgcctaaattatcctaaaatcgtaatgcattaacaaatatctcttaccctaatcggtaattaatgtgaatgctctgttttgtttgattagggaatgatggatgaattatgtattgtaatttgtggagattgggtttgttcttcgaatggagagtggaaactggagatttgtaacaaattgttttctagggtttttccaatttcttaaggaatgacattagcagcgttgaaggcagcgatttcggaggagtttggaatgaatggtgtaaatcctttgctgagttacgttttgccggataagtagatgtttacaactaaggaaaagactcctccagttatagttacaagcgaggttggccttctatactatctaagtccacttagagaaaacacgggtctaaatttgtttgtgaagtttgaggaaagggatgaaacatcaaaacttgtggctgcgagtgatgaacatttacagagttttgatgcacgcgaagatagtagcacgaaacgaaagcgtcagtgtagttttgagtcacaaagttttccaaaagtgcgtgtcaaagttggtcgcgatatatcgtctgcgggtttagaaacccctaaagttttgttgactcctggtgatgacgaattcattgaggtatttgaacaagcagaaggaaacctaggaagtaaaagtggtgacaaagttgctcgcgatatatcatctcctggttcaaaaaatacaaaagttttgttgactcctgttactacaagaaaacaggtaattagtgacaacacaaaaggtagcttagtagtcgctaaatctaataacacgactatttggcgactaaaacacctagtcggtaatccatgcgtcgctatattaattagtcgccaaatcgtgcgactgttaggcgacatggttaccactatatattgacacttaagcgactctttggtgactaatgtggtgactgttttgccactacttggcgactaagtattggtgactgaattgcgactatttgacgactggttacaggttgaattatcgattatacattctgtttttagttaaaactgtaattaacaaacttgataaagcaactaaaaaactgtatttcacaaacaaaactgtaattaactaacaagctgtattttataaactccgaaccttaattcaaatacacacacattaatacaagttcttaagtttgataagaaaagcaactaaaggaaggggaaatgagatgttcactcctggggtggatcttgtgaagcagtagcagtctggacatcctctgtttgatcttccgaagcagaagcagtagcaccagcagactcgaggaatgcgagaaacttggggtctctttctgtcaagtacttcttaaccatcctcaagtgtttgatctcttcttgttgctcattagcaacacgcttgatatctgcttgctcagctttcaccctcaatgcctctgcctcacgatgtgcctggagagtcgcttgttcttctatcttgcagttggcttcctaaagctgtgactgcaaggtagtgaaagcagaactgcagcctgggtacttccgctttccattgatgtacctccctaagcttcccattccaaagtatacccatctcttgtttgtgacagttgactgcaaacaaaagacaagaggattattgtagaaaagatgaagcaagtgataatataaaaaaaagacaagaggaacaagaccattacctgaaggaagacctcatcatcctcctcctgagatagttctgatcgacgggaagtaccatctgacccttcatcattctcacgggcagccaacttagcttccttgttcctcaaatatgcctcatgaatttcatgcgccttcctatcaacaaaagtcccatcttttttggtatgagtcttaacgaatatctcaccaatagtaggtggtcttcccaactcaatttcctgaaatgttgttcacaaaacaattcagactcttaataaaaatcattctataaataaacaaatgtaacttactatctcttgctcaatctgtaagaaagactttggccccgatacatgtttgtgaggaccaggaccattacggtcagacattcaagctgctgatgtggttgaactcttggcaatggcttcttttgtgtcccaatacgcacacatttccttccacaatgtcttctcaatccatggcggtcgctcatttgcacgttttgcgcaagccttagaaaccatgtccttcatacgcgtttgacatattttaaagaatttttcttcaactacaccagtcagtgatggatgccatgtgtgtgtactctacaaaacaagaggagagtttgatgttagtgatcaaacaaccaaaccaaaccaaatgtaagagattaataagagatagaagttaatttattgcgaattcgaggaagtatatgtgtcttctttcagtaggtacacagctccaactgtaaaatggcccattaaacttgtttgtgaagacctttgtgatcttccgggtcagcttaccattgtcgtgaccaaaccttcaattacataaaccaattagcatatacaaacctaatcaacttagcatatatacacacattactcaatattaacgcttaacctaatcaacttattaaatatattacacacctaatcaactttgaggatacacacacacattactcaatattaactcttattctaatcaacttattaaacacctaatcaacttaataaactaagcttaccatagggtttcacacacttaacacacacatattacacacctaatcaacttagcaactctccctaatattctcagcttaccatacggttagaggctcaaatgtgggagagataaccgttgtatacttctcacggcctggctgggcaagcatgtcatgtagatttgcaagcaaagcttcagggagagttgattccctttcaagatcagccacaaactcagcatcatcatcttcatcttcctccgcgtgtgagttttgagcttgagagctgtgatgagatacataggctcgaggtagaggatttgaggcttgcggaagtagaggattggatgcttctcgttgaaccagcgctatagactgattggaggcattcttgtgaaccgccgctggagattgtctcgccgtagaggctagacgatgaacagatcctccagatctaggttgagtcgagccggatgctcaaaacagagtcgatccagatccacgaggagaacaagatccgcgaggagacccttcgcctgactggaaaagttgcgtcggaggaggatagtccctgacggatggacccgttgaaggctgtgcagtcggatgatgttcaaaatcttgaagcggggctggacgaatcaccagcgtgaactcgtagtggctgggatgaccactgggccttcgatttgatgccctagtcttcggttcaactcgaactggctgggaagaagtgggtcgatttgagggaatgtttgatacacttcctcttcctctcttgcctccaccacatgtcttcatcacttgaagctaagaaacgagagattgagaagattgaagatggattgatgaagtttaggatcgaaaggggattagggttaggttagggttcgtcgagagtgagagagtgaagagaagggggattagggttagggttaggcgtaaaatcgtttatatagtctgggtttagggctaactttactggatcgttactaaatcaagcatgtgaaagcccaattaattgcccaaataaaacatatgagtcgctaaatggtagctgtacttggtgacctattagcgactaaattaatgagtctcacattcaagactgattagcgactattgtataatatagactaattagtcgctaatacgtcactatttagttgccaaaacttacgactacataatcagtcgccgaattaagtagctaacaacgtgatttcttggtgatgacgaattcatggaggaattggaacaagtagaagcaaaactaataagtaaaagtggtctgaaatcgtcccgggatgatactcagaacgaaggtattagcattgatgatgaaaaatattttttcgctgacaacgacaaagaggaaattaaagtagagatggaaaagcttgattatagtatgccctgtggcggttatgataaggaattttggtcaaatttcttagcagatgattatggtggctccaatgttgaggagttgatggcaacgggaggtttagatgtaaggtacgggtcttacaataaggttgtgggcaccaatccggatgaagtagttttgtgtactggcagcagagtctttgaccacgttgtatatgtcaatggggctggagcagggataaagacagagcatgcaaaaaagaaagaacatgttatgaaagataagatggttggtcgagttggaagctctcagggactgaagaagggggtcagaaagttagaggaagtggatgacgaggagtttgacatcccacctttgtttgaggacatcgagtatgaagtagataacttatctgatttggacattgatgatgatggtaaaaggatataccagggaaaagtgtatgcaagcaaagacgattgccaaataggattggctatatatgcaataaagaatgtgtttcatttcaagcaaacaagaacaaagtggaattattttgttcttagttgctcacatgagaaatgtgattggagaatattggcgactctaatgaatggcaaaggttactatgtaattaagaaagccaatcttcaacacacatgtttggtagagactaggaagcaatacatgaagaaggcaacatcaaaggtaaatgcatatgtatttaaggcaaaatacagtgaaccttcaaatggtcttgtcccgctggatcttgagcaacttgtactagaagatttgagggtttctgcgtcatacacaaagtgttagagaggtagggaatcagctttaacagatgtggccgagagtgatgaagagtcttacgacaatttggctgaatatttgcatcttctaaagttaacaaatccgggaactataacacatatagaaacagaaccagatattgaagatgaaaggaaagagaggtttttgtatatgtttttagcttttggggcttcaatacaaggttttaagcatttgagaagggtattggttgtggatggatcacatttgaaaggaaagcacaagggcattttactcacaacaagtggtcaagatgcaaacttccaagtgtatccactagcatttgctgtggtggatagcgagaatgatgatgcatggacttggttctttacaaagttggagcggataatagccgacaacaacactgactatattattagataggcacaaatcgataaaagtaggtataaagaaggtatttccgctcgctcatcatgcatggtgcatgtattattcacctatgtagcaatgtccaaccaagttcaagaacaaaggattgacgcagctagtgaaaaacgttggatatgagtttacaagtggaaagtttaaaacaattgatggtcagattaatgccattaaccccctttgcataaagtatctacatgacatagggttgactcaatggacaaggctatattttcctggtcagcgtttcaatctgatgactagcaatattatggaattgataagatttattaggtctatgttaactcgttggttcaatgcgcgtcagaagaagtcacaagcacattcaggtccagtacttccgaaagttgataagcaaatttcaaaaatcttgacaacatcaaatggaagcaaggttgggaggagatatgtgcctacctgttactctatccagaacttcacatccaaatggagatgttgttttaacaggactagtagttctaatccaagttgtgtaattatatttggtttttcaaattatgttttttattgcaattagtagatgtactgattgaaagtattgtttgtttaatttgaatccaagtatagctttatttcgccatttatgatgtattttttttaatacgaatcgttcataattccacattattgtatccagagaaacatatctaacagtaaactttgatttggatatttttggggaaatcagcatcaataaacagggtatacaattggagaagtcactatcatgttgaatgtgcctaaatgtgcaacattctcataatagtttctataatttatggtaacttgatgtgagaaatagatgtacattaattaattatataaaatacaaagctattgtgtattgaaaatttagctattaatataaaatttagttgatcacaaactaattgcgattttgttttttgtttccgtaaacctagttgtagatgtactgaatataagtatttatgttgattttaaacaaaggaaatctgttgtcttaaattcgtccaaaattggttattggtgaaacatatcctacgaatacgcaaatttatgcatccccgtgacttcgttacctgcacagcggtttagagcaatgtagagtagtttggctaaaggaaatctatctttacaagtattaaaaatggaaatggctccacacaggtcgaggcagcggaatccgagattcaagctatggagatacgatgatgaacctctagcaattgctgaaaccatgcccgaattacgacacctcaagctttttgggaacggactgaccaacttaagattggaagccattcttgacaactgtgttcacttggtacatcttgatttacgccgctgcttcaacattaaccttctcggggatctcgagaagcgctgttctgagaggatcagagatttgagacgccctgatgactcaaccgctgattccccttttgatgcctcttccgatatatattcagcaggagaagacgactacgacttttactcagatgatagcgatgtatataacccttattatgactaaataagggtacgttatctgatcactttgaagaatgcaagacagtatcagtggcaactggtaatgaaagcgtttatgttctctcttttgttaggtcagtagttaaagttgactcctgtgtccctctctgcttttgtaaagcttttgagaaaacagatttaacatgtatgtcatgcaatgcaagtcacaaggtttaagatgtcagaggtcttcattctccttattgatattgagcctatttatttagcttcacatatataatgccggtcatttaccacgtttaacggatgagtgtaatttcaggcctggacccaagagtttttagggaacagacaccatcatagtcttaaacgccattcttgacgttgtcctcacctggtttactttgacttaatttcgtgccccaatatttagtttctgttggaactagcattagttttcacttttcagctatcaaatagatatattatggatataggcctgatagttttgatggaagtgtccgagtgttgtttagagatttggcgctgacttgatcagtgtcagaaacagagatgatggaacataggtgtgatactacattgttgttataacatatgtgtcgaacagagaacaaaaacatatttgcttaatggtactttattctctgattttcaatgattgtctctgatactttttcagaatgagactacatgaatctgtagaagaagaaaaaaacgtaattgcacccatcaaacccatcgtctcattatgtcctacaattaaaacagaaattgaaatccccaaaccgtgtttgaattattcttcaacattgggtgacaataaatgtatttattgcttttgccctcgtgaagattaattagggcataaattgtatttgtaacttccacttcttcttatttcatagatctgacaattttatttaccctaaaaaaattgcttcgtcgtcttcgttgtcgtcaactcccttaccttcgctgatgaaagacaaaaagttgagaaactgggcggagcttccgtccaagttgacgtcatcgattctacttcgtcttggcgctattgagatacttcaaaacgctcaaaaagtgtgcaaaccgtggcatcgagtctgcaaagacccctcgatgtggcggaagatcgacatagataaccgcaatgatagggcagccttcaagtacgacctcgagtcaatgtgccgtcacgcagttgatcgtagccacggtggtttgattgagatcgagatttggtactacggtactaatgatctcatcatgtacatagctgacaggttctgtttctccctagctctctttccatgttaaagagaatttggtcggtgctaatactagggttagagtgtttgctaactatagggctaagagtgatcggtgctaatccaagggttcgagtgattgctaattctgaagttataagtgattggaggattttgtgtcactctttttaaactagatttatttttatctgttctatatccttctactgaatctctgataaagcaccttggtttgcttagtggttttgtcaacgaagtgttctcaataaggttatgtttttgacttttttagtaacaattatttgcaggtcaagtaatctgaaaagccttggacttgtaaggtgctttccaataacagatgagggagttgccaaagcagtttcgaaagtaccgttgcttgaataccttgaggtttcatactgcttgttttcaggagagtctctgagagatataggccggtcttgtccgaatctgaagacactgaagctaaaccgagcccctgaaatcatgttttcaaatagtgggtttgatgataatgccaaagcaattgcagaaagcatgcctgaactacgccacctccagcttttagggaacgggctaaccaataagggcttgaacgccattcttgatggttgtcctcacctggaacaccttgatttacgccagtgtttcaacatcaaccttgttggggatctcaagaaacgatgttttgagaggatcaaagacttgagatgccccaatgactcagatgacgattcagatgatggctcagataatggtgcggtgacaacatttgggtcacaatttaatgaaaccgactatcattggtactagatattgaatctttctgaatcttgcggaaatacctttgttgttgttgctttgttttttgtttttgacaattgacacctttgttgtttgacttatgaatagtttcagtttcctttcttggtagtttcagtgtctttcctttgaacttttttaagaagttttgagggcgtgattttaagtcgttcgagaacgatgtcatgggtctttatattttttttagttggtacattactttcacgattgtttagttacatactatcaaaagtaataatattataattaattaaatttacttatgaaaaccactaattttagcatcaatccaaagccttgcgattgatagcttaaaaaaaatgttgagtagacccgtagctatagagagaatataatcgtgtaacacttttcccttggtgtttcatcaccaatttcatttgatctttatatcaacaatgtccaaaacacaaggtatggtgtccccatgcaaatcacaacatcatcaataatcactagctagtagactcttaatgattgtttacgtgatcacctaactgtataattgactatcagtagagccggaccataacacatgaagatgaaacattccaatggggctcccattttaaaagggcccaacaaaaattttattttagttaaatatgcatatattaatttttgataataagagaaaatagttagttttatacatataaatcacaaataattgtgtgatccaaaatatttataaatctaatatacaattaaataaataattcaaaattttgtttaaattggttttctatttactctatagtttttaagacaaaaatattttgttttcgtaatttaaatggggccccggatttcattggtccgggactatcacaagaacagaatataaggtgataaaaagaaataagattgtaaataacttttccttttggtaatattttttttttttgttcaatccttttggtaatgtgtaaaaattcacaaattatcaaaagaaaaagagtggatattgattttactctttacttttggtgaatgcacttttggaaattgattttactctttactgtatttgggaatatatgcattgcaagttacaagtcaatttgttaataaaagtgttgaatgttttgtttcatctacattattattcttcacctttgttctaccgggtttaggagtagaaaacaatcaaatggattctcagattgttaatcttctgaggtctaaacagtattgtgggcctaggcccaatacattatttcagtatgcttggcccaaattagtttcgtataaaataagttttaccgtgaggaactaaattgtaaaacagagacggatacggcaattgtatcctttagaatgtcttcgtcgtcttcttcccctttccctcaggctatgaagaacggagagtatagaaactgggcggagctaccgccggaactgacgtcatcgatcctgctccgactcggtgcgattgagatacttcaaaacgctcagagagtgtgcaaatcgtggcgacgcgtctgtcaagacccatcgatgtggcgtaaaatcgacatcagaatcaaggaaaacttggtaaactcggtagaattgttttacgttatcgagcccctgtgctgtcgcgccgttgatctcagccagggaggcttgcttgagatcaacattgattacttggtgaacacttcgttcctcaattacattgccgacaggttctttctaaaccctaaaactcacaaacacgcaaattttgtatgaattctgatatgtttaatgtttacatagtattcaataatgtttatcggtatatattctgcgagtaactcgagaacaagtcttattgatcatgttataattctctatattgtagatcaagtaatctgagacggcttggagttgttgactgtgctccagtattgagcaggggagttgtcgaagcagcgatgaagctcccattgcttgaagaacttgatattacatacaagtcatcaatcagagaacaagagttaaaagttgtaggccagtcttgtccaaatctgaggacattaaagctaaactgtacgggtgatgttaagtgttgtgataaggttgctctagcaatcgctgaaacaatgcccggtcttcgccacctccagcttttcaggaacggattatccgagacgggcttgaacgccattcttgaaggttgtcctcacctgaaaaacctcgggttacaccagtgtttaaacattaacattgtaggtgatatagtgaagtgatgttttgagtggattaaagttttgagacgcccccatttagttcatgagaggtactgctagattcagttcgtttgtttgtaattctcatttagatcatatatttttttcacctattcttacaaatttatgttggattctccatgaacctaagtgggctttctatgtaatattttatatcagacctttaaaaccaagggagcaacatttgaccatacatatttaaatgaactagagatgataatgatatatatgcacacaatagtcaaaaaaagattgtagaattttatacacagaaaataagactttgacagcatatgagtgtgagagaggaccaagtttaaagactgccttaaacctctcaatcttccccaaaatatcaccacccttgcgtctttccaaggaaatctaggctgaacaaagctccattaaccgcttaggatcttcaagttgcgtgttcgagaagatgacaatgtttccagcagagttgttgcaaaatcactatttttggtacgttaatgaggagagggctgatctaagtagttttgttgatgaagtgttctcctcaacttatggatttgaatgttttttttgtttctacatggtcctgatttaaacaagacaaagtgttctcttttttttttttggtttgccactgttaatccattgctcttacattttggaatagaaaatctttggcttacattttggaatagaaaatctttggcttctggtacccttcgttgaaggctgagatggaatttagatgctttgtgaaatctaacgagcttgttgggatttgccagcgtgaggtaactacattttaccctgttcttctcaatgagaaggagttgctcaaggggttggtagaagagttctttgatgataagattaggtttgaatttgaatcagagagttacacttttgatgtttaagtgacgaaggagagaagggttaagctaatagaaatcaatacttggtgtggttctactttgccattgatgtatacatggaaagaacttgagaagattcatggagaatgtgaggaattggaattgaggattggtgagagccgtctcagtgtgcttcctggtttgaaaacagctgttccttatgattatcttgacgtgatgtcctggtagtggttggcttcaggttcttaagatagcggaagaagagtttcagaaagaggatcagagttctgatgaagttgcttgagcttttggtcgaagcagacgtacttgagagttctcagcgaagcaagaagagttagattcttgggtatctgaaggctaaacaaagatttttttgtgttttcgtagttttgcctacatcaataagtgttgtgttcatttgttgttctgcaacggtttagatcctaatgttggaccatcacatataatgtaattaactaactatataaaaaatgttttattgaaaaatactattttttcattatatagaagattttaacaaatatcaaacattgttaaaaactataattttcataaaactgaaacgaaaagatatcatcaaaggaatgtcaagtagtagtaatagggtaaataaagaaaatgcactcaaaaagatacaagtccacttgcttgctcttcacgctaccaccattccatctgcctctattcgtttttcatgccttaacgccgagaagctatggcctcaagttgtaggttacatatagtgccaacaaggatacaaatcccagtgagaaccccgtttaacagccccgtagcacttcatcaatttcctttgtctctgtggatttcttatttttttttttgtctctagttgtagactttaaagttatctatgtctctttttttttaacaaattttatctaatataaattctaaaaaacataaatcaaaatccataaactgaaaacaataatccaaaaactataggaaaatttgcacacaataattcaaaatgcataaaccgaaaacaataatctaaaaaccattaaaacaattccaaacattcatcaaatactagaaaagccagccatacataagccatactaaaccgaaagccgctcatgcctcaatagtaatcctttggcagagtgtttgctaacttgatacatttgcaaatgtcataagacagattttctataagatatctcaagctcgcaggctcgtctatgtgagtcccttgatgtctgtctcggtgaaagcatcgactcccttcttcccaacttcaccgttgatccaaagaaaggaagcacgtaaggttggattgcacaaaacaggtttggaaaacatcttcatcctctttttggtggggagtttacttgttgcgaaaataacataaagtacatctcctatatatttacaattacttggagaattagttaacaataatttttggagaaatgaagatgaagttatatttgatgtatgtggtgatcaagattttgtttggtcaattgaagatttagtatatgacggatacacaatattgtcagtaattgacaatgagtcgacaaaaactattttaccaacatgtctattctacatggaattgcatcacatggccaaattttgcactagtgacactaatctgctattatattatattgaatattaattatccaagcaaagaatacaagattgatatcgaaaacattaattttataacaaattgtatcacttgaattattctaaaatcccataataaaatgttatagtgtggtagatttaaagtacaaacaattgtttcttgttatgtagttagaaactagattttagcctgaggtacaccatagaaccatatatatatatatatatttaaatgaaaaattaatttgtttagtagattaaaaatagattttttggtttgtattttctaaatgtacaactgttgagtgatgtctttttgttgttaaaaccaaacagaaggaattggggaaactaactagaaactacaactagaggtttggttaactaagtactttttagtatcttttgctttttccttaaatcatggagtaggaagctt

SEQ ID NO: 537 - DNA, 82596 bp, Arabidopsis thaliana
gaattccatatgattctttggctttgaatcttctaacaaggaaacactactttagcttttgggaagcagttgcggttctagttcttatattcaatcatccacatgacatctagtcatatttgactccaaaacactaacaaagcttcttattgcttctcatagctttgatggtgtagctgaagtccatatgattctttggctttgaatcttctaacaaggaaacactactttagcttttgggaagcagttgcggttctagttcttatactcaaacatacacatgacatcttgtcatacttgactctaaaacattaacctagcttcttcatgcttctaaaagcttttatggtgtagcaaaagtccgtatgagtctttggctttgtatctcctaacaaggaaacacaactttaacttttgggaaccgtttgtggttctaggtcttatactcaatcatataaatgacatctagtcatatttgactctaaaacactaaccaagcttcttattgtttctcaaaacttttatggtgaagccaaagtccgtatgagtatttggctttctatcttctaacaaggaaacactaccttaccttttgggaaccgattgcggttctagttcttatactcaatactatacatgacatatagtcttatttgactccaaaacactaaccaaactgcttgttgcttcttaaagctttgatggtgtagccgaagtccgtatgacgttttggctttgtatcttctagaagggaaacattactttagcttttgggaagatgttgcggttctagttcttatactcaatcaaacacataacatcttatcttatttgactccaaaatactaaccaagcttcttattgcttctcaaagctttgatggtgtagccgaagtccgaatgaatctttggctttttatcttctaacaaggaatcactacgtcagcttttgggaagcaattgcggttctagttcttatactcaatcatccacatgacatctagtcatatttgactcccaaacactaacaaagcttcttattgcttctcatagctttgatggtgtagctgaagtccatatgattctttggctttgaatcttctaataaggaaacacaactttaacttttgggaaccggttgtggttctaggtcttatagtcaatcatataaaagacatctagtcatatttgactcgaaaacactaaccaagcttcttattgtttctcaaaacttttatggtgaagccaaagtccgtatgagtatttgtctttctatcttctaataaggaaacactactttacgttttgggaacaggttgcggttctagttcttatactcaatcatacacatgacatcttgtcatacttgactccaaaacattaacctagcttcttcatgcttctcaaagcttatatgctgtagccaaagtccgtatgagtctttggctttgtatctcctaacaaggaaacacaactttaacttttcggaaccggttgtggttctaggtcttatactcaatcatataaatgacatccagttatatttgactggaaaacactaaccaagcttcttattgtttctcaaaacttttatggtgaagccaaagtccgtatgagtatttggctttctatcttctaacaaggcaacactactttggcttttgggaaccggttgcgattctagttcttatattcaatactacacatgacatatagtcttatttgactccaaaacactaaccaaacttcttggtgcttcttaaagctttgatggtgtagccgaagtccttatgactttttggctttgtatcttctagaagggaaatattactttagcttttgggaagatgttgcggttctagttcttatactcaatcaaacacataacatcttgtcttatttgactccaaaatactaaccaagcttcttattgcttctcaaagcattgatggtgtagccgaagtacgtatgagtcttcggctttgtattttctaacaaggaaacactactttagattttgggaaccggttgtagttctagttcttatactcaatcatacacatgacatctagtcatatttgactccaaaacactaaccaagcttcttattgcttctcaaaactttaatagtgtagctgaagtccgtataagtctttggctttgtatcttctaacacagaaacattactttagcttttgggaattggttgcggttctagtcatatttgactctgaaaaacttaccaagcttcttattgcttctcaaacctttgatggtgtagaggaagtccgtatgagtcgttggcttagtatcttcaaacaaggaaatattactttaacttttgggaatcggttgcggttatagttcttatactcaatcatacacatgacacctagtaatatttgaatccaaagcactaaccaagcttgttattgcttctcaaaattttgatggtgtagccggagtccgtatgagtctttggctttgtatcttctaacaaggaaacattactttagctagtgggaatcggttgcggttctagttcttatactcaatcatacacatgacaactagtcatatttgactccaaaaaactaaaaaagcttcttattgcttctcaaaattttgatggtgtagctgaagtccgtttgagactttggctttgtatcttctaacaaggaaacactactttagcttttaggaaccagttgcggttatagttcttataatcaatcatacacatgacatctagtcatacttgactccaaaacattaacctagcttcttcatgcttctcaaagcttttatggtgtagccaaagtccgtatgagtctttggatttgggggagttgatatgtctataatttgcatgatttcggcattcattcttcaccactttgtcattgtttcgtccacatttcatctcattaagagtcgttttagtgtgttttgcatacttaggacgattttgcattaggattgcatgtgcattgcatatttggttgttttcaggtactttggatgcttttggatttcaaacagaggagaaacagaacagaaagttagaatgcctaatgacaccttcagcaaaagtactctatcgcagccttggagccctgccagggcaaatcactctatcgcaaccccggagaagctagcagctcagtttcactcaatcgcgaagccggaggaatcaccccatcagaaccactcaataaccaccttatgatattcactcgatcgcactctatcagagggtcgctggaccattcaatcttgacttcactgcatctcacttgatcgcaagcggagcccctgcagcccagtttgatcaatgacatactcgatcacaggaaagctcattttagtccatcagatgccaatgacacattcggtcgcagggtcatgacgtgaagattcgctatatatctagtttccttatttgtttcatttctcgcttatataaactgcctcttagggttttcccgagggcattcgttattatctcgtcttttttgcaactttcatagctgaagtgtttctcctgcgactttgtattttgtctttcattatttctgttatcatgttttcaatcgttgttttgctattgtttttgattatgtctgagtagtgaactgtatttctgaggatgagatagattagttgtagtttacttggtcgttttaggtggttgagtttagaatactagaatcccttctggattagttgcgcttattgcttgtttcactgactaatgtggaatatgagtccagacgtccagcgctcagaaggcgtttaataggcgttggatccaattaattccagaggtatctgactctaccccaacggattgactgtagagagggtattggctttaacatgttgattcgataatgccttcttagttagagatcgctaatgagaattagttcagtgtctagttatgcttgaggatttctatcacgggagtgaattaatctgttgttgaacttgttgtctagggatagcttctatgaagttttgtcaaccacttgaatagattaaggagaccatactattcgattaccccatccttaagaatcgtttatccatttgattgcctgttatcatttctgctttgttatttacctgcctactattgccatttctgcttttagtttcatttcatttctgttattgcatactaggactgttagaaccaaccgactctctgcttggcttgacttagagctttctaatcatatctcatctgtttgcatcacaccggattggattgacatcctaaaatactacaacgacaagatagtgttttaggattaattgagaaaaatcctactatcaatttggcgccgttgccagtttcgtgtttgtttgttatatttgagatcattagaaacgttaagatcaagttcggttttgttacacaagttactaacattgtgccttttctgtctttgtgtttcaggtaccttgcaacccgctttacagacgcatctttgattcatctgttatagcacggctgctatatgttgcatgcatacacggtcacaaggaaatcagaacctcctattcaacaataacatcgaccgtattgctcgccaactgatagaacagacagaaaccgacacaatggctgacgttgtagatgagcaagagcaacctaccaacgttggtgctggtgacttccctcataaccacgaccagcgtcatggaattgttccacctctagtacagaacaagaactttgagatcaaaagcggtctcattgcaatagttcaggggaacaagtttcatggccaaccaatggaggatccgctagatcatcttgacaagtttgaaaggctccgtggccttactaaaatcaatggagttagtgaagatggtttcaagcttcgcttgtttccattctcacttggagttgaagcccatctgtgggaaaagacgctaccccagaattcaatcacgacctgggatgactgcaaaaaggccttcttggcaaaatacttttccaactccggaatgagatatccggattcactcagaagcaaaatgaaagattctttgaagcttgggagcgctttaagggttatcaaaccaaatgccctcatcatggatttaagaaagcttctcttctcagcccactttatagaggtgtcctgcctaagatacgaatgctctttgacaccgcttcaaatgggaatttcctgaagaaggatgttgaagaaggatgggagctagttgaaaactttgctcagacggatggcaattacaatgaagattatgaaagaagcatccacaccagtactgaatctgatgacaagcaccaccgagagattaaagctctcaatgaaaaaatcagcaaactcctccaagtgcagcagaagcatgttcacttcgtctctgaagacgaagtattccaaatccaagtgggggagactaatgagtgtgccgaaatcagctatgttcagaatcaaggtggctacaacatagggtacaacaattacagacccaatccaaatctgtcatacagaagcaccaatgtcgccaaccctcaaaaccaagtttatccccagcagcaacaacagcagaaccaaccaaaaccgtttgttccttataaccaaagccaagggttcgttccaaagcagcagtttcaaggaggatatcaacaacagcagccacaacctggtttcacaccacatcaacaacaagcacctgcgcctcagaattcagacataatgactatgctccagcagctcattcaaggacaagccacatgagcaatggaaatcgctaagaagctggctgaattaaacaacaaagtcgacggacaaggtgtcgaacttaacagcaagttcgaatcaatgagcactaggatgagatatgtggaaggcatcctcgcttcaccatctgttaacaacaacccatgccagctttcaggcaaagcaatcatgaatccaaaggagtatgccactgcccatgccatcactatcagacatgatcgagagctgccaactcgacatgtccctacctcaaacactgaggacagtgttattctagagggggaggatttttatcaagatgatgttttggctgacaaaacaatcaaagagcccatccttgacagtcatcgcactcgaccacaagctccgctagctactaccttcgttgcaaaaccgacagctgcaaagaccaaagatacagtcttcgtgccaccgccttaaaaacctccacttccattccctggtcgatttaagaaagttctggttgcgaaatattgagccctattggaaaaacagataaaggatatgcctttagtggattgtctcgcgctaatacctgacgagcacaagtacgtgaaagacctaattatagaaaggatcaaagaagtccaaggaatggtggtattaagtcatgagtgcagtgcaagaagattgttcaagaaaagttggaagatccaggatcttttactctaccatgctccattaggcaattgcctttcagcaattatctttgtgatctaggagcctcagtcagcataatgccactctctgtggcaaggaagctgggtttcgttcactacaagccttgtgacctaaccttgattcttgctgataggagttcaaggagaccttttggcaagttagaggatgtgtcagtaatgattaatggagtagaggtccctactgattttgttgtgcttgagatggatgaagaatctaaggatcctctgatcttaggaagacctttcttggcttcaactggagcagtcatagatgttaagcaaggaaaaattaatcttaatatgggggaggatttcaaaatgaactatgaaatcagggacactatgaagaagccaacaatagaaggacaaaccttcttagttgaagaaatgggtcagctagctaatgaactgctagaggagcttactaacaaagatcaccttcaaactcctgtgatcaaaagtagtgaagctggatttctctccagtgagaccttgagctatgagatgtcattagactcacacaacaaagtaccaggatcagagatctttaaaggtgtcattgcgttagaaagagaggatgttgcattgaacgaggaaggctcaattgatattcgactagagtgctcaaccaaacagctaaagtcaagcatgagggcatcaaatgattggctagaactcaaggagaggtctaaatggcacgacagagctataagagagctaacacacactgtgaaagagctgaaggatcaagtcaaggagctccatgggaaagccaaccaagcaccactcgacatcaaggacgtcccaaatgatgaagttattcctatggttagaaaagaaggatgtgaattcacattagaacagtctagaaaagacgactatccagatgatgaaaaaggagcttacgaagaaagggccattgagtactcaattatagacctgtcacgggagcatgctgaatttgatgttgtatctactaaggaaggagaggagacgtcaattctactctatcatcctccttgagcctaatgagtgtgaggagtcaagctagagacttaaaacaagctcacttgggaggaagttccatgcttatccctgtatatagtttttattttatttagttacttttgatttgttttggttttggttttgattctcaggaaatgaataacagctggagcaacatcagggatgcaaccgagtgttcaaataaaaaaattcaatttttttttgatgaatcactcgatcgcaagatgagagtaaaagctcgagagtgcgatctagtggttttgggacaacatctttctcaacgacaatgtcaatctactcgatcgcaacatggaagtggtgtgattgagtggtcttctagtggaattgcccaaaccactcaatcgcaaggagaagtgaaaacgcccgtcaggacttcaatgataacccgcctgaagacatgccatccagctgccataatattgccctacaaaggcaatccacctatcaacagagggaccacaccgttctgcaagttcccgtaaggcacgagtctcatgagccaatggagcacaagaggcggaagagcgctaggatggtccgatcatcaagcaagggttggataatgtcgggtcggagaacacatgagcgacgtgctgcacaacctgctcgggttgcgatcgagcacaatgacgaggagatggcggagccacaccaagaaccggtcatgcctactgaggtaacacactaaaaccctttgtaaataccgcttttgtttttgtttttctgtgtttatcttgaattctttcacaaattttgattacacaagggactgtgtaatttaagtttgggggagggttcaagacgtatttgacttgtttttgtgaatatcatttgactctgcatatcatctaagtcatagagaaaaaacaaaaaaaaaattgaatttttttgaaaatgaattccacataaacagagtgatcatttagttgcattacatttaggatagagtttagagtgtttcatataggattgttgcatatgcataggggataatgaggaattagccttgaagcatgatgattcactaaaatgagttattagttctctaaggcatttgaatgactttgaagtaaaaccgcaccatgttctatagacaccactcgatgcatgtcatgacaccttttccctgtcaatttgaacttgaatctgacttataattatcatgtttgcatcgtttttgaactcgtggatagaatacatatttggattttctttcacttattcaccactcttgttaatccaagtagctgcttctattattggagtagttcacccttaaccaatccttctttcaagccatgttattttatgagagcatgtgaggcctattttcaggattgagcttggtagaacgtgttaggtttgagccgacaagagtagtatctcatgtagttccaatccgtatatttggacttagtaggactaggtgggaacttatttggggatagggattgagtgtgaaaagaaaaagaaagaaaaaatgggttagagtctttaggagaaggaagctaaaaatcatattgaggtctagtaaatgtttgggaagcataaaattgttaagatatgctctaaaaaaaagagatggcagcaaaaacagaaaagaaaaaaataaaaataaatgataagagccataagagtttaagaaaaatccaattcattagactagactcatagagtttaagaaaagcttctccttaagaacaagagctaaagaaaagaaaaggaaacattgatccaagaaaaaaatcgaaatatgcctttggtgcaaaagggtagacttaggatcatcattgggtttagagataggaccatcttcttgttattcacggtttatgtcattgggtagatgggatgctattcttgtatgcataggttggcacttacctttagcattcttctaaagctcggtcctttttcattgagagtcccctgctataaaaatctgaaccacttaaaagggactatctttgtctcataacctgtcactagccaaatgcgttcactagcgatgcatatcttgattcatgtttttgacgcattgtgcatttgagtgtaggtttggatcataacagagaatggctaaagtttttatgtaaaagtcgatcacctcgcatcttagaactgttagctggtacattgatcttaattgtcatatctcatgctttggttctgaatccccaacttcaaacctctccttccgcttatgtcttcttgtttgcttgagggcaagcaaagactaagtttgggggagttgatatgtctatactttgcatgatttaggcattcattcttcaccactttgtcattgtttcgtccacatttaatctcattaggagtagttttagtgtgttctgcatactaaggacgattttgcattaggattgcatgtgcattgcatatttggttgttttcaggtactttggatgcgttttgagttcaaacagaggagaaacataacagaaagtcagaaagcccaatgacaccttcggcaaaagtactctatcgcagcctcggagccgtgccagggcaaatcactctatcgcaaccccggagaagctagcagctcagtttcactcaatcgcgaagccggaggaatcaccccatcagaaccactcgatcaccacctcatgacattcactcgatcgcactcgatcacagggtcgttggaccattcaatctcgacttcactgcatctcactcgatcgcaaggcgaagcccctgaagcccagtttgatcaatgacatactcgatcacatggaagctcatttcagcccatcagatgccaatgacacattcggtcgcagggtcatgacgtgaagattcgctatatatctagtttccttatttgtttcatttctcgcttacataaactgcctcttagggttttcccgaaggcatccgttattatcttgtcttttttgcaactttcatagccgcagtgttttcctgcgactttgtattttcactttcaagtatttgatattcagttttcgtctaagtctttcatcatttctgttataatgttttcaatcgttgttttgctattgtctttgattatgtctgagtagtgaactgtatttctgaggatggaatagattagttgtggtttacttggtcgttttaggtggttgagtttagaatactagaatcccttctggcgtttaatgggcgttggatcctattaattccagagatatctgactctaccccaagggattggttgtagatagggtattggctttaacatgttgattcgataatacctacttagttagagatcgctaatgggaattagatcagtgtctagctttgcttgaggatttctatcacgggagtgaattaatttgttgttgaacttattgtctagggataaccgtgaaattttgtcaaccacctaaatagattaaggagaccatactattcgattaccccatccttaagaatcgtatatccatttgattgccagttatcatttctgctttgttatttacctgcctactattgccatttctgcttttagtttcatttcatttctgttattgcatactaggactgttagaaccaaccgactctctacttggcttgacttagagctttctaatcatatctcatctgtttgcatcacaccggattggattgacatcttaaaatactacaacgacaggatagtgttttacgattaattgagaaaaatcctactatcatatcttctaacaaggaaacaatactttaacttttaggaaccggttgtgattctaggtcttatcctcaatcatataactgacatctagtcatagttgactacaaaacactaaccaagcttcttattgcttctcaaaacttttatggtgaagccaaagtccctatgagtatttggctttgtatcttctaacaaggaaacactacttgaacctttgggaaccggttccggttctagttcttatactcaatcatacacataacatatagtcatatttgaatccaaaacactaaccaagcttcttattgcttctcaaagctttgatggtgtagtcgaagtttgtatgagtctttggctttgtatcttctaacaaggaaacaatactttatctcttgggaaccagttgcggttctagttcttctactcaatcatacacatgacatatagtcatatttgactccgaaacactaaccaagcttcttattgcttctcaatattttcatggtgtagccgaagtccgtatgagtctttggctttgtatcttctaacaaggaaaaaatactttatcttttgggaaccgactgcgattccagttcttatactccatcatacacatgacatctagtcatatttgactctaaaacactatccaagcttcttcttgcttctcaaagctttgatggtgttgccaaagtaagtatgtgtctttggatttgtaacttcaaacaaggaaacactactttggcttttgggaaccagttgcgtttctagttcttatactcaatcatacacatgacaagtagtcatatctgacttcaaaacactaaccaagcttcttcttaattttcaaagctttgatgctgaagctgtagtccgtatgagtctttggtttgtgtcatgtaacaaggaaatatacttaggttttcaagaactagttgcgattctagttcttatacgcaatcatacacatgacatctagttatatttgaatcctaaacactaaacaagcttcttctagtttctcaaagatttgatggtgtagccgaagtccatatgagtctttggctttgtatcttctaataaggaaacactattttagcttttgggaaccggttgcggttatagttcttatactcaatcatacacatgccatataatcatatttgaatccaaagcacttaccaaatttcttattgcttctcaaagttttgatggtgtagccgaaatccgtatgagtctctatctttgtatcttctaacaaggaaacactactttagcttttgggaaccagttgcggttttagttcttatgctcaatcatacacatgacatcaagtcatatttgactccaaaacactaaccaagcttcttattgcttctcaaaactttgatggcttagccgaagtccgtatgagtctttggctttgtatcttctaacaggaaacaatacttttgcttttgggaaccggttacggttctagttcttataaacaatcatccacatgacatcaagtcatatttgactccaaaatactaaccaagcttcttattgctacgcaatactttgatggtgtagccgaagtttgtataagtctttggatttgtatcttttaacaaggaaacattactttagcttttgggaatcgatggcggttctagttcttatactcaatcataaacataacatctagtcatatttgacttcgaataactaaccaagtttcttattgcttctccaagctttgatggtgtagccgaagtccgtatgtgtatttagctttgtatcttcaaacaaggaaacattactttagcttttgggaatcagttgcggttctagttcttatactcaatcatacacacgacatattgtcttattttgactccataacactaactaggcttcttaatgcttcccaaaacttttatggtgtagccaaagtccgtataagtctttggatttgtatcttttataaaggaaacattactttcgcttttgggaattggttgcggttctagttcttatactcaatgattcacatgacatcatgtaatatttgacttcaaaatactaaccaagcttcttattgcttctcaaaatttcgatggtgtatccgaagaccgtatgagtctttggctttgtatcttctaacaaggaaacataactttagctattgggaatcggttgccgttcaagttcttatgctcaatcatacacatgacatctagtcattttgactccaaaacactaaccaagcttcttattgcttctaaatattttcatggtgtagccgaattccgtatgagtctttggctttgtatcttctaacaaggaaacaatactttatcttttgggaaccgactacgattctagttcttatactcaatcatacacatgacatctagtacactatccaagctttgactctaaaacactatccaagctttttcttgcttgtcaaagctttgttggtgttgccaaagtcagtatgagtctttggatttgtatcttcaaacaaggaaacactactttggcttttgggaaccagttgcgtttctagttcttatactcaatcatacacatgacaagtagtcgtatgtggcttcaaaacactaaccaagcttcttcttgcttttcaaagctttgatgctgaagctgtagtccgtatgagtctttggtttgtatcatgtaacaaggaaatatacttaggttttcaagaactagttgcggttctagttcttatacgcaatcatacacatgacatctagttgtatttgaatcctaaacactaaggtggtgttattcaattatggagttaaagtcaattcttaaagctttagacttgttttctgatattgcttttaagaatatgtttgtatgaattttaaaatctctgcaatatgtcttggattttgattctagtgatttactcatgaaactccaaagaggtttcatttcaaatgaattaatatacaaagattttacaagtcttttagtttttaataacgctggattttaatgaaatatttaaaatcttaattgaataacatcaaactttaaaatctattaagcatgatttacaaagatgagttccaataacactaaattttaaagttggatatagaatcattagttgaataacagtggattcggcttggatttcaattctattaaaatccattaacgaataacaccccctaaacaagcttcttctagcttctcaaagttttgatggtgtagccgaagtccgtatgagtctttggctttgtatcttctaataaggaaacactattttagcttttgggaaccggttgcggttatagttcttatactcaatcatacacatgacatatagtcatatttgaatccaaaacacttaccaaatttcttattgcttctcaaagttttgatggtgtagccgaaattcgtatgagtctctagctttgtatcttctaacaaggaaacactactttagcttttggcaaccggttgcggttctagttcttatactcaatcatacacatgacatctagtcatatttgactccaaaaaaataaccaagcttcttattgcttctcaaaacattaatggcttagccaaagtccgtatgagtttttagctttgtatcttctaacaaggaaacattaatttagcttttgggaattagttgcggttctagttcttatactcaatcatacacatgacatctagccatatttgattccgaaaaactaaccaagcttcttattgcctcacaaagctttgatggtgtagccgaagtcggtatgagtctttggctttgtatctacaaacaagaaacattactttagcttttgggaatcggttgcggttctagttcttatactcaatgatacacatgatatcctgtaatatttcactctaaaatactaaccaagcttcttattgcttctcaaaattttgatggtgtacacgaagtccgtatgagtctttggctttgtatcttctaacaaggaaacataactttagctattgggaatcggttgccattctagttcttatactcaatcatacacatgacatctagtcatatttgactccaaaacactaaccaagcttcttcttgcttctcaaaattttcatggtgtagccgaagtccgtatgagtctttggctttgtatcttctaacaaggaaacactacttttgcttttgggaaccagttgcggttctagtttttatactcaatactacacatgacatatagtcttttttgactccaaaacactaaccaaacttcttgttgcttcttaaagctttgatggtgtagccaaagtctgtatgaatttttggctttgtatcttctagaagggaaacacaactttagcttttgggaatcagttgtggttctagttcttatacttaatcaaacacataacatctagtcatatttgactccaaaaaactaacgaagcttcttattgcctcacaaagttttgatggtgtagccgaagtccgtatgagtctttgactttgtatcttcaaacaaggaaatattactttaggttttgggaaacggttgcggttctagttcttatactcaatcatacacatgacatctagtcatatttgactccaaaaaaaataaccaagcttcttattgcttctcaaaacattaatggcttagccggagtccgtatgagtttttagctttgtatcttctaacaaggaaacattaatttagcttttcggaattagttgcggttctagttcttatactcaatcatacacatgacatctagccatatttgattccgaaaaactaaccaagcttcttattgcctcacaaagctttgatggtgtcgccgaagtcggtatgagtctttggatttgtatctacaaacaagaaacattactttagcttttgggaatcggttgcggttctagttcttatactcaatgatacacatgatatcctataatatttcactctaaaatactaaccaagcttcttattgcttctcaaaattttgatggtgtacacgaagtccgtatgagtctttggctttgtatcttctaacaaggaaacataactttagctattgggaatcggttgccattctagttcttattctcaatcatacacatgacatctagtcatatttgactccaaaacactaaccaagcttcttatcgcttctcaaaattttcatggtgtagccgaagtccgtatgagtctttggctttgtatcttctaacaaggaaacactacttttgcttttgggaaccagttgcggttctagtttttatactcaatactacacatgagatatagtctttttttactccaaaacactaaccaaacttcttgttgcttcttaaagctttgatggtgtagccaaagtccgtatgagtttttggctttgtatcttctagaaaggaaacacaactttagcttttgggaagatgttgcggttctagttcttatactcaatcaaacacataacatcttgtcttattttactccaaaatactaaccaagcttcttattgcttctcaaaactttgatggtgtagccgaagtccgtatgagtctttggctttgtagcttctaacaaggaaacactactttagcttttgggaaacggttgcggttctagttcttatactcaatcatacacatgacatctagtcatatttgactccaaaacactaacaaggcttcttattgcttctcaaaattttgatggtgtacacgaagtccgtatgagtctttagctttgtatcttcaaacaaggaaacataactttagctattgggaatcggttgccattctagttcttatactcaatcatacacatgacatctagtcatatttgactccaaaacactaaccaagcttcttattgcttctcaaaattttcatggtgtagccgaagtccgtatgagtctttggctttgtatcttctaacaaggaaacataacttttgcttttgggaaccagttgcggttctagtttttatactcaatactacacatgacatatagtcttttttgactccaaaacactaaccaaacttcttgttgcttcttaaagctttgatggtgtagccaaagtccgtatgagtttttggctttgtatcttctagaagggaaacacaactttagcttttgggaagatgttgcggttctagttcttatactcaatcaaacacataacatcttgtcatatttgactccgaaaaactaacaaagcttcttattgcttctcaaagctttgatggtgtagctgaattccatatgattctttggctttgtaacttctaacaaggaaacactactttagcttttgggaaacggttgcggttctagttcttatactcaatcatacacatgacatctagtcatatttgactccaaaaaaataaccaagcttcttattgcttctcaaaacattaatggcttagccaaagtccgtatgagtttttagctttgtatcttctaacaaggaaacattaatttagcttttgggaattagttgcggttctagttcttatactcaatcatacacatgacatctagccatatttgattccgaaaaactaaccaagcttcttattgcctcacaaagctttgatggtgtagccgaagtcggtatgagtctttggctttgtatctacaaacaagaaacattactttagcttttgggaatcggttgcggttctagttcttatactcaatgatacacatgatatcctgtaatatttgactctaaaatactaaccaagcttcttattgcttctcaaaattttgatggtgtagccgaagtccgtatgagtctttggctttgtatcttctaacaaggaaacataactttagctattgggaatcggttgcggttctagtttttatactcaatactacacatgacatctagtcttttttgactccaaaacactaaccaaacttcttatcgcttctcaaaattttcatggtgtagccgaagtccgtatgagtctttagctttgtatcttctagaagggaaacacaactttagcttttgggaatcagttgtggttctagttcttatacttaatcaaacacataacatctagtcatatttgactccaaaaaactaacgaagcttcttattgcctcacaaagttttgatggtgtagccgaagtccgtatgagtctttgactttgtatcttcaaacaaggaaatattactttaggttttgggaaacggttgcggttctagttcttatactcaatcatacacatgacatctagtcatatttgactccaaaaaactaaccaagcttcttattacctcacaaagctttgatggtgtagccgatgtccgtatgagcctttggttttgtatcttcaaacaaggaaacattactttagcttttgggaattggttacggttctagttcttatactcaatgatacacatgacatcctgtaatatttgactctaaaatactaaccaagcttcttattgcttctcaaaattttgatggtgtatccgaagtccgtatgagtctttggctttgtatcttctaacaaggaaacataactttagctattggcaatcggttgccgttctagttcttatactcaatcatacacatgacatctagtcatatttgactccaaaacactaaccaagcttcttattgcttctcaaaattttcatggtgtacccaaagtctgtttgagtctttggctttgtatgttctaacaaggaaacactacttttgcttttgggaactggttgcggttctagttcttatactcaatactacacatgacatatacttttatttgactccaaaatactaaccaaacttcttgttgcttcttaaagctttgatggtgtagcagaagtctgtatgagtttttggctttttatcttcaagaagtgaaacactattttagcttttgggaagatgttgcggttctagttcttatgctcaatcaaacacataacatattgtcttatttgactccaaaatactaagcaagcttcttattgcttctcaaagctttgatggtgtagccgaagtccgtatgagtctttggctttgtatcttctaacaaggaaacactactttagcccttgggaaccagttgcggttttagttcttatactcaatcatccacattacatctagtcatatttgactccaaaaagctgacatagcttcttattgcttctcaaagctttgatggtgtagctgaagtccttatgattctctggctttgtatcttctaacaaggaaacactactttagcttttgggaaacggttgcggttctagttcttatactcaatcatacacatgacatctagtcatatttgactccaaaacattaaccaagcttcttattgcttctcagaacttggatggcttagccgaagtccgtatgagtttttagatttgtatcttctaacaaagaaacattactttagtttttaggaatcagttgcggttctagttcttatactcaatcgtacacatgacatctagtcatatttgactccgaaaaactaaccaagcttcctattgcgtcacaaagctttgatggtgtagccgaagtccgtatgagtctttggctttgtatctttgaacaaggaaacattactttagcttttgggaatcggttgcggttctaattcttatagtcaatgatacacataacatcctgtaatatttgactttaaaatactaaccaatcttcttattgcttctcaaaattttgatggtgtatccgaagtctgtatgagtttttggctttgtatcttctaatagggaaacataactttagcaattgggaatcggttgccgttctagttcttatactcaatcatacacatgacatctagtcatatttgattccaaaacactaaccaagcttcttattgcttctcaaaactttcatggtgtagccgaagtccgtatgagtctttggctttgtatcttctgacaaggaaacactacttttgcttttgggaaccggttgcggttctagttcttatactcaatactacacatgacatatagtcttatttgactccaaaatactaaccaaacttcttgttgcttcttaaagctttgatggtgtagcagaagtctgtatgagtttttggctttttatcttcaagaagtgaaacactattttagcttttgggaagatgttgcggttatagttcttatgctcaatcaaacacataacatattgtcttatttgactccagaatactaagcaagcttcttattgcttctcaaagctttgatggtgtagccgaagtctgtatgagtctttggctttgtatcttctaacactactttagcccttgggaaccagttgcggttttagttcttatactcaatcatccacatgacatctagtcatatttgactccaaaaagctgacatagcttcttattgcttctcaaagctttgatggtgtggctgaagtccatatgattcttttgctttgtatcttctaagaaggaaacactactttagcttttggaaaatgggttcgattctagttcttatactcaatcatacacatgacatctagtcatatttgactccaaaacactcaccaaacttcttattgcttctcaaagctttgatggtgtagctgaagtccttatgattctttggctttgtatcttctaacaaggaaacactactttagcttttgggaaacggttgcgattctagttcttatactcaatcatacacatgacatctagtcatatttgactccgaaaaactaaccaagcttcttatagcctcacaaagctttgatggtgtagccaaagtccgtatgagtctttggctttgtatcttccaacaaggaaacattactttagcttttgggaatcggttgaggttctatttcttatactcaatgatacatatgacatcctgtaatatttgactccaaaatactaaccaagcttcttattgcttctcaaaatgttgatggtgtatccgaagtccgtatgagtctttggctttgtatcttctaacaagaaaacataactttagctattgggaatcggttgccgttctaattcttatactcaatcatacacatgacatctagtcatatttgactccaaaaaactaaccaagcttcttattgccttacaaagctttgatggtgtagccgatgtccgtatgactctttggttttgtatcttcaaacaaggaaacattactttagcttttgggaattggttgcggttctagttcttatactcaatgatacacatgacatcctgtaatatttgactctaaaatactaaccaagcttcttattgcttctcaaaattttgatggtgtatccgaagtccgtatgagtttttggctttgtatcttctaacagggaaacataactttagctattgggaatcggttgccgttctagttcttatactcaatcatacacattacatctagtcatatttgattccaaaacactaaccaagcttcttattgcttctcaaaactttcatggtgtagccgaagtccgtatgagtctttggctttgtatcttttgacaaggaaacactacttttgcttttgggaaccggttgcggttctagttcttatactcaatactacacatgacatatagtcttatttgactccaaattactaaccaaacttcttgttgcttcttaaagctttgatggtgtagtagatgtctctatgagtttttggctttctatcctctagaagtgaaacactattttagcttttgggaagatgttgcggttctagttcttatgctcaatcaaacacataacatcttgtcttatttgactccaaaatactaagcaagcttcttattacttctcaaagctttgatggtgtagccgaagtccgtatgagtctttggctttgtatcttgtaacaaggaaacactactttagcctttggaaaccggttgcggttctagttcttatactcaatcatccacatgacatctagtcatatttgactccaaaaaactaaccaagcttcctattgcctcacaaagctttgattgtgtagccaaagtctgtatgagtctttggctttgttcttcaaacaaggaaacattactttagcttttgggaatcggttgcggttctagttcttatactcaatcatacacatgacatctagtcgtatttgactccaaaacactaaccaagcttcttattgcttctcaaaattttcatggtgtaggcgaagaccgtatgagcctttggctttgtttcttctaacaaggaaacactactttaccttttgggaaccagttgcggttctagttcttatactcaatactacacatgacatatagtctttttttgaatccaaaacactaaccaaacttcttgttgcttcttaaagctttgattgtgtacccaaagtccgtatgaggtttttgttttgtatcttctagaagggaaacattactttagcttttggaaaaatgttgcggttctagttcttatactcaatcaaacacataacatcttgtcttatttgactccaaaatactaaccaagcttcttattgcttctcaaaactttgatggtgtagccgaagtccgtatgagtctttggctttaaatcttctaacaaggaaacattactttagctttcgggaaccggttgcggttctagttcttatacttaatcatccacatgacatctagtcatatttgactccaaaaaactaacaaagcttcttattgcttctcaaagctttgatggtgtagctgaattccatatgattctttggctttgtaacttctaacaaggaaacactactttagcttttgggaaacgattgcggttctagttcttatactcaatcatacacatgacatttagtcatatttgactccaaaaaaataaccaaacttcttattgcttctcaaaacattattggcttagccgaagtccgtatgagtttttagctttgtatcttctaacaaggaaacattaatttagcttttgggaattagttgcggttctagttcttatactcaatcatacacatgacatctagccatatttgattccgaaaaactaaccaagcttcttattgcctcacaaagctttgatggtgtagccgaagtcggtatgagtctttggctttgtatctacaaacaagaaacattactttagcttttgggaatcggttgcggttctagttcttatactcaatgatacacatgatatcctgtaatatttcactctaaagtactaaccaagcttcttattgattctcaaaattttgatggtgtacacgaagtccgtatgagtctttggctttgtatcttctaacaaggaaacataactttagctattgggaatcggttgccattctagttcttatactcaatcatacacatgacatctagtcatatttgactccaaaacactaaccaagcttcttattgcttctcaaaattttcatggtgtagccgaagtccgtatgtgtctttggctttgtatcttctaacaaggaaacactaaatttgcttttgggaaccagttgcggttctagttttaatactcaatactacacatgacatatagtcttttttgactccaaaacactaacgaaacttcttgttgcttcttaaagctttgatggtgtagccaaagtccgtatgagtttttggctttgtatcttctagaagggaaacacaactttagcttttgggaagatgttgcggttctagttcttatactcaatcaaacacataacatcttgtcatatttgactccaaaaaactaacaaagcttcttattgcttctcaaagctttgatggtgtagctgaattccatatgattctttggctttgtaacttctaacaaggaaacactaccttagcttttgggaaacggttgcggttctagttcttatactcaatcatacacatgacatctagtcatatttgactccaaaaaaataaccaagcttcttattgcttctcaaaacattaatggcttagccgaagtccatatgagtttttagctttgtatcttctaacaaggaaacattaatttagcttttgggaattagttgcggttctagttcttatactcaatcatacacatgacatctagccatatttgattccgaaaaactaaccaagcttcttattgcctcacaaagctttgatggtgtagccgaagtcggtatgagtctttggctttgtatctacaaacaagaaacattactttagcttttgggaatcggttgcggttctacttcttatactcaatgatacacatgatatctagtcatatttgactccaaaacactaaccaagcttcttattgcttctcaaaattttcatggtgtagccgaagtccgtatgagtctttggctttgtatcttctaacaaggaaacactacttttgcttttgggaaccagttgcggttctaggttttatactcaatactacacatgacatatagtcttttttgactccaaaacactaaccaaacttcttgttgcttcttaaagctttgatggtgtagccaaagtccgtatgagtttttggctttgtatcttctagaagggaaacacaactttagcttttgggaagatgttgcggttatagttcttatactcaatcaaacacatatcatcttgtcttatttgactccaaaatactaaccaagcttcttattgcttctcaaaactttgatggtgtagccgaagtccgtatgagtctttggctttgtagcttctaacaaggaaacactactttagcttttgggaaacggttgcggttctagttcttatactcaatcatacacatgacatctagtcatatttgactccaaaacactaaccaagcttcttattgcttctcaaaattttgatggcttagccgaagtccgtatgagtttttagctttgtatcttctaacaaggaaacattaatttagcttttgggaattagttgcggttctagttcttatactcaatcatacacatgacatctagccatatttgattccgaaaaactaactaagcttcttattgcctcacaatgctttgatggtgtagccgaagtcggtatgagtctttggctttgtatctacaaacaagaaacattactttagcttttgggaatcggttgcggttctagttcttatactcaatgatacacatgatatcctgtaatatttgactctaaaatactaaccaagcttcttattgcttctcaaaattttgatggtgtacacgaagtccgtatgagtctttggctttgtatcttctaacaaggaaacataactttagctattgggaatcggttgccattctagttcttatattcaatcatacacatgacatctagtcatatttgactccaaaacacttaccaagcttcttactgcttctcaaaattttcatggtgtagccgaagtccgtatgagtctttggctttgtatcttctaacaaggaaacactacttttgcttttgggaaccagttgcggttctagtttttatactcaatactacacacgacatatagtcttttttgaccccaaaacactaacgaaacttcttgttgcttcttaaagctttgatggtgtagccaaagtccgtatgagtttttggctttgtatcttctagaagggaaacacaactttagcttttgggaaaatgttgcggttctagttcttatactcaatcaaacacataacatcttgtcttatttgactccaaaatactaaccaagcttcttatttcttctcaaaactttgatggtgtagccgaagtccgtatgagtctttgcctttgtatctgctaacaaggaaacactacttttgcttttgggaaccaattgcggttatagtttttatactcaatactacacatgacatatagtctttttttactccaaaacactaaccaagcttcttattgcttctcaaaactttgatggtgtagctgaagtccgtatgagtctttggctttgtagcttctaacaaagaaacactactttagcttttgggaaacggttgcggttctagttcttatactcaatcatacacatgacatctagtcatatttgactccaaaacactaaccaagcttcttattgcttctcaaaattttgatggcttagccgaagtccgtatgagtttttagctttgtatcttctaacaaggaaacattactttagcttttgggaatcagttgtggttaaagttcttatacttaatcatacacataacatcttgtcttatttgacaccaaaatactaaccaagctacttattgcttctcaaaactttgatggtgtagccaaagtccgtatgagtctttggctttgtatcttctaacaaggaaacactactttttcttttgggaaccagttgcggttctagtttttatactcaatactacacatgacatatagtcttttttgactccaaaacactaaccaaacttcttgttgcttcttaaagctttgatggtgtagccaaagtccgtatgagtttttggctttgtatcttctagaagggaaacacaactttagcttttgggaagatgttgcggttatagttcttatactcaatcaaacacatatcatcttgtcttatttgactccaaaatactaaccaagcttcttattgcttctcaaaactttgatggtgtagccgaagtccgtatgagtctttggctttgtagcttctaacaaggaaacactactttagcttttgggaaacggttgcggttctagttcttatactcaatcatacacatgacatctagtcatatttgactccaaaacactaaccaagcttcttattgcttctcaaaattttgatggcttagccgaagtccgtatgagtttttagctttgtatcttctaacaaggaaacattactttagcttttgggaatcagttatggttctagttcttatacttaatcatacacatgacatctagtcatatttgactccaaaaaactaacaaagcttcttattgcctcacaaagttttgatggtgtagccgaagtccgtatgagtctttgactttgtgtcttcaaacaaggaaacattactttagcttttgggaatcggttgcggttctagttcttatactcaatcatacacatgacatctagtcatatttgactccaaaaaaataaccaagcttcctattgcttctcaaaacattaatggcttagccgaagtccgtatgagtttttagctttgtatcttctaacaaggcaacattaatttagcttttgggaattagttacggttctagttcttatactcaatcatacacatgacatctagccatatttgattccgaaaaactaaccaggcttcttattgcctcacaaagctttgatggtgtagccgaagtcggtatgagtctttggctttgtatctacaaacaagaaacattactttagcttttgggaatcggttgcggttctagttcttatactcaatatacacatgatatcctgtaatatttgactctaaaatactaaccaagcttcttattgcttctcaaaattttgatggtgtacacgaagtccgtatgagtctttggctttgtatcttcaaacaaggaaacataactttagctattgggaatcggttgccattctagttcttatactcaatcatacacatgacatctagtcatatttgactccaaaacactaaccaagcttcttattgcttctcaaaattttcatggtgtagccgaagtccgtatgagtctttggctttgtatcttctaacaaggaaacactactttttcttttgggaaccagttgcggttctagtttttatactcaatactacacatgacatatagtcttttttgactccaaaacactaaccaaacttcttgttgcttcttaaagctttgatggtgtagccaaagtccgtatgagtttttggctttgtatcttctagaagggaaacacaactttagcttttgggaagatgttgcggttatagttcttatactcaatcaaacacataacatcttgtcttatttgactccaaaatactaaccaagcttcttattgcttctcaaaactttgatggtgtagccgaagtccgtatgagtctttggctttgtagcttctaacaaggaaacactactttagctttttggaaacggttgcggttctagttcttatactcaatcatacacatgacatctagtcatatttgactccaaaacactaaccaagcttcttattgcttctcaaaattttgatggcttagccgaagtccgtatgagtttttagctttgtatcttctaacaaggaaacattactttagcttttgggaatcagttatggttctagttcttatacttaatcatacacatgacatctagtcatatttgactccaaaaaactaacaaagcttcttattgcctcacaaagttttgatggtgtagccgaagtccgtatgagtctttgactttgtgtcttcaaacaaggaaacattactttagcttttgggaatcggttgcggttctagttcttatactcaatcatacacatgacatctagtcatatttgactccaaaaaaataaccaagcttcctattgcttctcaaaacattaatggcttagccgaagtccgtatgagtttttagctttgtatcttctaacaaggaaacattaatttagcttttgggaattagttgtggttctagttcttatactcaatcatacacatgacatctagccatatttgattccgaaaaactaaccaagcttcttattgcctcacaaagctttgatggtgtagccgaagtcggtatgagtctttggctttgtatctacaaacaagaaacattactttagcttttgggaatcggttgcggttctagttcttatactcaatatacacatgatatcctgtaatatttgactctaaaatactaaccaagcttcttattgcttctcaaaattttgatggtgtacacgaagtccgtatgagtctttggctttgtatcttcaaacaaggaaacataactttagctattgggaatcggttgccattctagttcttatactcaatcatacacatgacatctagtcatatttgactccaaaacactaaccaagcttcttattgcttctcaaaattttcatggtgtagccgaagtccgtatgagtctttggctttgtatcttctaacaaggaaacactactttttcttttgggaaccagttgcggttctagtttttatactcaatactacacatgacatatagtcttttttgactccaaaacactaaccaaacttcttgttgcttcttaaagctttgatggtgtagccaaagtccgtatgagtttttggctttgtatcttctagaagggaaacacaactttagcttttgggaagatgttgcggttatagttcttatactcaatcaaacacataacatcttgtcttatttgactccaaaatactaaccaagctacttattgcttctcaaaactttgatggtgtagccaaagtccgtatgagtctttggctttgtatcttctaacaaggaaacactacttttgcttttgggaaccagttgcggttctagtttttatactcaatactacccatgacatatagtcttttttgactccaaaacactaaccaaacttcttgttgcttcttaaagctttgatggtgtagccaaagtccgtatgagtttttggctttgtatcttctagaagggaaacacaactttagcttttgggaagatgttgcggttatagttcttatactcaatcaaacacatatcatcttgtcttatttgactccaaaatactaaccaagcttcttattgcttctcaaaactttgatggtgtagccgaagtccgtatgagtctttggctttgtagcttctaacaaggaaacactactttagcttttgggaaacggttgcggttctagttcttatactcaatcatacacatgacatctagtcatatttgactccaaaaaaataaccaagcttcctattgcttctcaaaacattaatggcttagccgaagtccgtatgagtctttagctttgtatcttctaacaaggaaacattaatttagcttttgggaattagttgcggttctagttcttatactcaatcatacacatgacatctagccatatttgattccgaaaaactaaccaagcttcttattgcctcacaaagctttgatggtgtagccgaagtcggtatgagtctttggctttgtatctacaaacaagaacattactttagcttttgggaatcggttgcggttctagttcttatactcaatgatacacatgatatcctgtaatatttcactctaaaatactaaccaagcttcttattgctactcaaaattttgacggtgtacacgaagtccgtatgagtctttggctttgtatcttctaacaaggaaacataactttagctattgggaatcggttgccatgctagttcttatactcaatcatacacatgacatctagtcatatttgactccaaaacactaaccaagcttcttattgcttctcaaaattttcatggtgttgccgaagtccgtatgtgtctttggctttgtatcttctaacaaggaaacactaaatttgcttttgggaaccagttgcggttctagtttttatactcaatactacacatgacatatagtctttttttactccaaaacactaacgaaacttcttgttgcttcttaaagctttgatggtgtagccaaagtccgtatgagtttttggctttgtatcttctagaagggaaacacaactttagcttttgggaagatgttgcggttctagttcttatactcaatcaaacccataacatctagtcatatttgactcccaaaaactaacgaagcttcttattgcctcacaaagttttgatggtgtagccgaagtccgtatgagtctttgactttgtatcttcaaacaaggaaacattactttagcttttgggaatcggttgcggttctagttcttatactcaatcatacacatgacatctagtcatatttgactccaaaaaaataaccaagcttcctattgcttctcaaaacattaatggcttagccgaagtccgtatgagtttttagctttgtatcttctaacaaggaaacattaatttagcttttgggaattagttgcggttctagttcttatactcaatcatacacatgacatctagccatatttgattccgaaaaactaaccaagcttcttattgcctcacaaagctttgatggtgtagccgaagtcggtatgagtctttggctttgtatctacaaacaagaaacattactttagcttttgggaatcggttgcggttctagttcttatactcaatgatacacatgatatcctgtaatatttgactctaaaatactaaccaagcttcttattgcttctcaaaattttgatggtgtacacgaagtccgtatgagtctttggctttgtatcttctaacaaggaaacataactttagctattgggaatcggttgccattctagttcttatactcaatcatacacatgacatctagtcatatttgactccaaaacactaaccaagcttcatattgcttctcaaaattttcatggtgtagccgaagtccgtatgagtctttggctttgtatcttctaacaaggaaacactacttttgcttttgggaaccagttgcggttctagtttttatactcaatactacacatgagatatagtcgttttttactccaaaacactaaccaaacttcttgttgcttcttaaagctttgatggtgtagccaaagtccgtatgagtttttggctttgtatcttctagaagggaaacacaactttagcttttgggaagatgttgcggttctagttcttatactcaatcaaacacataacatcttgtcttatttgactccaaaatactaaccaagcttcttattgcttctcaaaactttgatggtgtagccgaagtccgtatgagtctttggctttgtagcttctaacaaggaaacactactttagcttttgggaaacggttgcggttctagttcttatactcaatcatacacatgacatctagtcatatttgactccaaaacactaaccaagcttcttattgcttctcaaaattttgatggcttagccgaagtccgtatgagtttttagctttgtatcttctaacaaggaaacattactttagcttttgggaatcagttatggttctagttcttatacttaatcatacacatgacatctagtcatatttgactccaaaaaactaacgaagcttcttattgcctcacaaagttttgatggtgtagccgaagtccgtatgagtctttgactttgtatcttcaaacaaggaaatattactttaggttttgggaatcggttgcggttctagttcttatactcaatcatacacatgacatctagtcatatttgactccaaaaaaaataaccaagcttcttattgcttctcaaaacattaatggcttagccggagtccgtatgagtttttagctttgtatcttctaacaaggaaacattaatttagcttttgggaattagttgcggttctagttcttatactcaatcatacacatgacatctagccatatttgattccgaaaaactaaccaagcttcttattgcctcacaaagctttgatggtgtagccgaagtcggtatgagtctttggatttgtatctacaaacaagaaacattactttagcttttgggaatcggttgcggttctagttcttatactcaatgatacacatgatatcctgtaatatttcactctaaaatactaaccaagcttcttattgcttctcaaaattttgatggtgtacacgaagtccgtatgagtctttggctttgtatcttctaacaaggaaacataactttagctatagggaatcggttgccattctagttcttattctcaatcatacacatgacatctagtcatatttgactccaaaacactaaccaagcttcttattgcttctcaaaattttcatggtgtagccgaagtccgtatgagtctttggctttgtatcttctaacaaggaaacactacttttgcttttgggaaccagttgcggttctagtttttatactcaatactacacatgagatatagtcgttttttactccaaaacactaaccaaacttcttgttgcttcttaaagctttgatggtgtagccaaagtccgtatgagtttttggctttgtatcttctagaagggaaacacaactttagcttttgggaagatgttgcggttctagttcttatactcaatcaaacacataacatcttgtcttatttgactccaaaatactaaccaagcttcttattgcttctcaaaactttgatggtgtagccgaagtccgtatgagtctttggctttgtagcttctaacaaggaaacactactttagcttttgggaaacggttgcggttctagttcttatactcaatcatacacatgacatctagtcatatttgactccaaaacactaaccaagcttcatattgcttctcaaaattttcatggtgtagccgaagtccgtatgagtctttggctttgtatcttctaacaaggaaacactacttttgcttttgggaaccagttgcggttctagtttttatactcaatactacacatgacatatagtcttttttgactccaaaacactaaccaaacttcttgttgcttcttaaagctttgatggtgtagccaaagtccgtatgaatttttggctttgtatcttctagaagggaaacacaactttagcttttgggaagatgttgcggttatagttcttatactcaatcaaacacataacatcttgtcttatttgactccaaaatactaaccaagcttcttattgcttctcaaaactttgatggtgtagccgaaatccgtatgagtctttggctttgtagcttctaacaaggaaacactactttagcttttgggaaacggttgcggttctagttcttatactcaatcatacacatgacatctagtcatatttgactccaaaacactaaccaagcttcttattgcttctcaaaattttgatggcttagccgaagtccgtatgagtttttagcattgtatcttctaacaaggaaacattactttagcttttgggaatcagttatggttctagttcttatacttaatcatacacatgacatctagtcatatttgactccaaaaaactaacgaagcttcttattgcctcacaaagttttgatggtgtagccaaagtccgtatgagtctttgactttgtgtcttcaaacaaggaaacattactttagcttttgggaatcggttgcggttctagttcttatactcaatcatacacatgacatctagtcatatttgactccaaaaaaataaccaagcttcctattgcttctcaaaacattaatggcttagccgaagtccgtatgagtttttagctttgtatcttctaacaaggaaacattaatttagcttttgggaattagttacggttctagttcttatactcaatcatacacatgacatctagccatatttgattccgaaaaactaaccaagcttcttattgcctcacaaagctttgatggtgtagccgaagtcggtatgagtctttggctttgtatctacaaacaagaaacattactttagcttttgggaatcggttgcggttctagttcttatactcaatatacacatgatatcctgtaatatttgactctaaaatactaaccaagcttcttattgcttctcaaaattttgatggtgtacacgaagtccgtatgagtctttggctttgtatcttcaaacaaggaaacataactttagctattgggaatcggttgccattctagttcttatactcaatcatacacatgacatctagtcatatttgactccaaaacactaaccaagcttcttattgcttctcaaaattttcatggtgtagccgaagtccgtatgagtctttggctttgtatcttctaacaaggaaacactacttttgcttttgggaaccagttgcggttctagtttttatactcaatactacacatgacatatagtcttttttgactccaaaacactaacgaaacttcttgttgcttcttaaagctttgatggtgtagccaaagtccgtatgagtttttggctttgtatcttctagaagggaaacacaactttagcttttgggaagatgttgcggttctagttcttatactcaatcaaacacataacatcttgtcatatttgactccaaaaaactaacaaagcttcttattgcttctcaaagctttgatggtgtagctgaattccatatgattctttggctttgtaacttctaacaaggaaacactactttagcttttgggaaaaggttgcggttctagttgttatactcaatcatacacatgacatctagtcatatttgactccaaaaaaataaccaagcttcttattgcttctcaaaacattaatggcttagccaaagtccgtatgagtttttagctttgtatcttctaacaaggaaacattaatttagcttttgggaattagttgcggttctagttcttatactcaatcatacacatgacatctagccatatttgattccgaaaaactaaccaagcttcttattgcctcacaaagctttgatggtgtagccgaagtcggtatgagtctttggctttgtatctacaaacaagaaacattactttagcttttgggaatcggttgcggttctagttcttatactcaatgatacacatgatatcctgtaatatttgactctaaaatactaaccaagcttcttattgcttctcaaaattttgatggtgtacacgaagtccgtatgagtctttggctttgtatcttctaacaaggaaacataactttagctattgggaatcggttgccattctagttcttatactcaatcatacacatgacatctagtcatatttgactccaaaacactaaccaagcttcttattgcttctcaaaattttcatggtgtagccgaagtccgtatgagtctttggctttgtatcttctaacaaggaaacactacttttgcttttgggaaccagttgcggttctagtttttatactcaatactacacatgacatatagtcttttttgactccaaaacactaaccaaacttcttgttgcttcttaaagctttgatggtgtagccaaagtccgtatgagtttttggctttgtatcttctagaagggaaacacaactttagcttttgggaagatgttgcggttctagttcttatactcaatcaaacacataacatcttgtcttatttgactccaaaatactaaccaagcttcttattgcttctcaaaactttgatggtgtagccgaagtccgtatgagtctttggctttgtagcttctaacaaggaaacactactttagcttttgggaaacggttgcggttctagttcttatactcaatcatacacatgacatctagtcatatttgactccaaaacactaaccaagcttcttattgcttctcaaaattttgatggcttagccgaagtccgtatgagtttttagctttgtatcttctaacaaggaaacattactttagcttttgggaatcagttatggttctagttcttatacttaatcatacacatgacatctagtcatatttgactccaaaaaactaacgaagcttcttattgcctcacaaagttttgatggtgtagccgaagtccgtatgagtctttgactttgtgtcttcaaacaaggaaacattactttagcttttgggaatcggttgcggttctagttcttatactcaatcatacacatgacatctagtcatatttgactccaaaaaaataaccaagcttcctattgcttctcaaaacattaatggcttagccgaagtccgtatgagtttttagctttgtatcttctaacaaggcaacattaatttagcttttgggaattagttacggttctagttcttatactcaatcatacacatgacatctagccatatttgattccgaaaaactaaccaagcttcttattgcctcacaaagctttgatggtgtagccgaagtcggtatgagtctttggctttgtatctacaaacaagaaacattactttagcttttgggaatcggttgcggttctagttcttatactcaatatacacatgatatcctgtaatatttgactctaaaatactaaccaagcttcttattgcttctcaaaattttgatggtgtacacgaagtccgtatgagtctttggctttgtatcttcaaacaaggaaacataactttagctattgggaatcggttgccattctagttcttatactcaatcatacacatgacatctagtcatatttgactccaaaacactaaccaagcttcttattgcttctcaaaattttcatggtgtagccgaagtccgtatgagtctttggctttgtatcttctaacaaggaaacactactttttcttttgggaaccagttgcggttctagtttttatactcaatactacacatgagatatagtcgttttttactccaaaacactaaccaaacttcttgttgcttcttaaagctttgatggtgtagccaaagtccgtatgagtttttggctttgtatcttctagaagggaaacacaactttagcttttgggaagatgttgcggttctagttcttatactcaatcaaacacataacatcttgtcttatttgactccaaaatactaaccaagcttcttattgcttctcaaaactttgatggtgtagccgaagtccgtatgagtctttggctttgtagcttctaacaaggaaacactactttagcttttgggaaacggttgcggttctagttcttatactcaatcatacacatgacatctagtcatatttgactccaaaacactaaccaagcttcttattgcttctcaaaattttgatggcttagccgaagtccgtatgagtttttagctttgtatcttctaacaaggaaacattactttagcttttgggaatcagttatggttctagttcttatacttaatcatacacatgacatctagtcgtatttgactccaaaaaactaacgaagcttcttattgcctcacaaagttttgatggtgtagccgaagtccgtatgagtctttgactttgtgtcttcaaacaaggaaacattactttagcttttgggaatcggttgcggttctagttcttatacttaatcatacacatgacatctagtcatatttgactccaaaaaaataactaagcttcctattgcttctcaaaacattaatggcttagccgaagtccgtatgagtttttagctttgtatcttctaacaaggaaacattaatttagcttttgggaattagttgcggttctagttcttatactcaatcatacacatgacatctagccatatttgattccgaaaaactaaccaagcttcttattgcctcacaaagctttgatggtgtagccgaagtcggtatgagtctttggatttgtatctacaaacaagaaacattactttagcttttgggaatcggttgcggttctagttcttatactcaatgatacacatgatatcctgtaatatttcactctaaaatactaaccaagcttcttattgcttctcaaaattttgatggtgtacacgaagtccgtatgagtctttggctttgtatcttctaacaaggaaacataactttagctattgggaatcggttgccattctagttcttattctcaatcatacacatgacatctagtcatatttgactccaaaacactaaccaagcttcttattgcttctcaaaattttcatggtgtagccgaagtccgtatgagtctttggctttgtatcttctaacaaggaaacactacttttgcttttgggaaccagttgcggttctagtttttatactcaatactacacatgagatatagtctttttttactccaaaacactaaccaaacttcttgttgcttcttaaagctttgatggtgtagccaaagtccgtatgagtttttggctttgtatcttctagaagggaaacacaactttagcttttgggaagatgttgcggttctagttcttatactcaatcaaacacataacatcttgtcttattttactccaaaatactaaccaagcttcttattgcttctcaaaactttgatggtgtagccgaagtccgtatgagtctttggctttgtagcttctaacaaggaaacactactttagcttttgggaaacggttgcggttctagttcttatactcaatcatacacatgacatctagtcatatttgactccaaaacactaacaaggcttcttattgcttctcaaaattttgatggtgtacacgaagtccgtatgagtctttagctttgtatcttcaaacaaggaaacataactttagctattgggaatcggttgccattctagttcttatactcaatcatacacatgacatctagtcatatttgactccaaaacactaaccaagcttcttattgcttctcaaaattttcatggtgtagccgaagtccgtatgagtctttggctttgtatcttctaacaaggaaacataacttttgcttttgggaaccagttgcggttctagtttttatactcaatactacacatgacatatagtgttttttgactccaaaacactaaccaaacttcttgttgcttcttaaagctttgatggtgtagccaaagtccgtacgagtttttggctttgtatcttctagaagggaaacacaatcaaacacataacatcttgtcatatttgactccaaaaaactaacaaagcttcttattgcttctcaaagctttgatggtgtagctgaattccatatgattctttggctttgtaacttctaacaaggaaacactactttagcttttgggaaacggttgcggttctagttgttatactcaatcatacacatgacatctagtcatatttgactccaaaaaaataaccaagcttcttattgcttctcaaaacattaatggcttagccaaagtccgtatgagtttttagctttgtatcttctaacaaggaaacattaatttagcttttgggaattagttgcggttctagttcttatactcaatcatacacatgacatctagccatatttgattccgaaaaactaaccaagcttcttattgcctcacaaagctttgatggtgtagccgaagtcggtatgagtctttggctttgtatctacaaacaagaaacattactttagcttttgggaatcggttgcggttctagttcttatactcaatgatacacatgatatcctgtaatatttgactctaaaatactaaccaagcttcttattgcttctcaaaattttgatggtgtacacgaagtccgtattagtctttggctttgtatcttctaacaaggaaacataactttagctattgggaatcggttgccattctagttcttatactcaatcatacacatgacatctagtcatatttgactccaaaacactaaccaagcttcttattgcttctcaaaattttcatggtgtagccgaagtccgtatgagtctttggctttgtatcttctaacaaggaaacactacttttgcttttgggaaccagttgcggttctagtttttatactcaatactacacatgacatatagtcttttttgactccaaaacactaaccaaacttcttgttgcttcttaaagctttgatggtgtagccaaagtccgtatgagtttttggctttgtatcttctagaagggaaacacaactttagcttttgggaagatgttgcggttctagttcttatactcaatcaaacacataacatcttgtcttatttgactccaaaatactaaccaagcttctaattgcttctcaaaactttgatggtgtagccgaagtccgtatgagtctttggctttgtagcttctaacaaggaaacactactttagcttttgggaaatggttgcggttctagttcttatactcaatcatacacatgacatctagtcatatttgactctaaaacactaaccaagcttcttattgcttctcaaaattttgatggcttagccgaagtccgtatgagtttttagctttgtatcttctaacaaggaaacattactttagcttttgggaatcagttgtggttctagttcttatacttaatcatacacatgacatctagtcatatttgactccaaaaaactaacgaagcttcttattgcctcacaaagttttgatggtgtagccgaagtccgtatgagtctttgactttgtatcttcaaacaaggaaatattactttaggttttgggaatcggttgcggttctagttcttatactcaatcatacacatgacatctagtcatatttgactccaaaaaaaataaccaagcttcttattgcttctcaaaacattaatggcttagccggagtccgtatgagtttttagctttgtatcttctaacaaggaaacattaatttagcttttcggaattagttgcggttctagttcttatactcaatcatacacatgacatctagccatatttgattccgaaaaactaaccaagcttcttattgcctcacaaagctttgatggtgtagccgaagtcggtatgagtctttggatttgtatctacaaacaagaaacattactttagcttttgggaatcggttgcggttctagttcttatactcaatgatacacatgatatcctgtaatatttcactctaaaatactaaccaagcttcttattgcttctcaaaattttgatggtgtacacgaagtccgtatgagtctttggctttgtagcttctaacaaggaaacactactttagcttttgggaaacggttgcggttctagttcttatactcaatcatacacatgacatctagtcatatttgactccaaaacactaaccaagcttcttattgcttctcaaaattttcatggtgtagccgaagtccgtatgagtctttggctttgtatcttctaacaaggaaacataacttttgcttttgggaaccagttgcggttctagtttttatactcaatactacacatgacatatagtcttttttgacttcaaaacactaaccaaacttcttgttgcttcttaaatctttgatggtgtagccaaagtccgtatgagtttttggctttgtatcttctagaagggaaacacaactttagcttttcggaagatgttgcggttctagttcttatactcaatcaaacacataacatcttgtcttatttgactccaaaatactaaccaagcttattattgcttctcaaaactttgatggtgtagccgaagtctgtatgagtctttggctttgtagcttctaacaaggaaacactactttagctttcgggaaacggttgcggttctagttcttatactcaatcatacacatgacatctagtcatatttgactccaaaacactaaccaagcttcttattgcttctcaaaattttgatggcttagccgaagtccgtatgagtttttagctttgtatcttccaacaaggaaacattactttagcttttgggaatcagttgtggttctagttcttatacttaatcatacacatgacatctagtcatatttgactctaaaaataacgaagcttcttattgcctcacaaagttttgatggtgtagccgaagtccgtatgagtctttgactttgtatcttcaaacaaggaaacattactttagcttttgggaatcggttgcggttctacttcttatactcaatcatacacatgacatcagtcatatttgactccaaaaaaataaccaagcttcctattgcttctcaaaacatgaatggcttagccgaagtccgtatgagtttttagctttgtatcttctaacaaagaaacattaatatagcttttgggaattagttgcggttctagttcttatactcaatcatacacatgacatctagtcatatttgactccaaaacactaaccaagcttcttattgcttctcaaaattttcatggtgtagccgaagtccgtatgagtctttgcctttgtatcttctaacaaggaaacactacttttgcttttgggatccagttgtggttctagtttttatactcaatactacacatgacatataatcttttttgactccaaaacactaaccaaacttcttgttgcttcttaaagctttgatggtgtagccaaagtccgtatgagtttttggctttgtatcttctagaagggaaacacaactttagcttttgggaagatgttgcggttctagttcttatactcaatcaaacacataacatcttgtcttatttgactccaaaatactaaccaagcttcttattgcttcttaaaactttgatggtgtagccgaagtctgtatgagtctttggctttgtagcttctaacaaggaaacactactttagcttttgggaaacggttgcggttctagttcttatactcaatcatacacatgacatctagtcatatttgactccaaaacactaaccaaacttcttattgcttctcaaaattttgatggcttagccgaagtccgtatgagtttttagctttgtatcttctaacaaggaaacattactttagcttttgggaatcagttgtggttaaagttcttatacttaatcatacacataacatcttgtcttatttgacaccaaaatactaaccaagctacttattgcttctcaaaactttgatggtgtagccaaagtccgtatgagtctttggctttgtatcttctaactaggaaacattactttagcttttgggaaccagttgcagttctagttcttatactcaatcatccacatgacctctagtcatatgtgactccaaaaccataacaaagcttttcttattgttcctcaaagctttgatggtgtagctgaagtccatatgattcttttgctttgtatgttctaacaaggaaacactactttagcttttgggaaacggttgcggttctaattcttatactcaatcatacacatgacatcagtcatatttgactccaaaaaaataaccaagcttcctattgcttctcaaaacatgaatggcttagccgaagtccgtatgagtttttagctttgtatcttctaacaaggaaacattaatttagcttttgggaattagttgcggttctagttcttatactcaatcatacacatgacatctagccatatttgattccgaaaaactaaccaagcttcttattgcctcacaaagctttgatggtgtagccgaagtcggtatgagtctttggctttgtatcttcaaacaagaaacattactttagcttttgggaatcggttgcggttctagttcttatactcaatgatacacatgatatcctgtaatatttgactctaaaatactaaccaagcttcttattgcttctcaaaattttgatggtgtacacgaagtccgtatgattctttggctttgtatcttctaacagggaaacataactttagctattgggaatcggttgccattctagttcttatactcaatcatacacatgacatctagtcatatttgactccaaaacactaaccaagcttcttattgcttctcaaaattttcatggtgtagccgaagtccgtatgagtctttgcctttgtatcttctaacaaggaaacactacttttgcttttgggatccagttgtggttctagtttttatactcaatactacacatgacatataatcttttttgactccaaaacactaaccaaacttcttgttgcttcttaaagctttgatggtgtagccaaagtccgtatgagtttttggctttgtatcttctagaagggaaacacaactttagcttttgggaagatgttgcggttctagttcttatactcaatcaaacacataacatcttgtcttatttgactccaaaatactaaccaagcttcttattgcttctcaaaactttgatggtgtagccgaagtctgtatgagtctttggctttgtagcttctaacaaggaaacactactttagcttttgggaaacggttgcggttctagttcttatactcaatcatacacatgacatctagtcatatttgactccaaaacactaaccaaacttcttattgcttctcaaaattttgatggcttagccgaagtccgtatgagtttttagctttgtatcttctaacaaggaaacattactttagcttttgggaatcagttgtggttaaagttcttatacttaatcatacacataacatcttgtcttatttgacaccaaaatactaaccaagctacttattgcttctcaaaactttgatggtgtagccaaagtccgtatgagtctttggctttgtatcttctaactaggaaacattactttagcttttgggaaccagttgcagttctagttcttatactcaatcatccacatgacctctagtcatatgtgactccaaaaccataacaaagcttttcttattgttcctcaaagctttgatggtgtagctgaagtccatatgattcttttgctttgtatgttctaacaaggaaacactactttagcttttgggaaacggttgcggttctaattcttatactcaatcatacacatgacatcagtcatatttgactccaaaaaaataaccaagcttcctattgcttctcaaaacatgaatggcttagccgaagtccgtatgagtttttagctttgtatcttctaacaaggaaacattaatttagcttttgggaattagttgcggttctagttcttatactcaatcatacacatgacatctagccatatttgattccgaaaaactaaccaagcttcttattgcctcacaaagctttgatggtgtagccgaagtcggtatgagtctttggctttgtatctacaaacaagaaacattactttagcttttgggaatcggttgcggtcctagttcttatactcaatgatacacatgatatcctgtaatatttgactctaaaatactaaccaagcttcttattgcttctcaaaattttgatggtgtacacgaagtccgtatgagtctttagctttgtatcttcaaacaaggaaacataactttagctattgggaatcggttgccattctagttcttatactcaatcatacacatgacatctagtcatatttgactccaaaacactaaccaagcttcttattgcttctcaaaattttcatggtgtagccgaagtccgtatgagtctttgcctttgtatcttctaacaaggaaacactacttttgcttttgggatccagttgtggttctagtttttatactcaatactacacatgacatataatcttttttgactccaaaacactaaccaaacttcttgttgcttcttaaagctttgatggtgtagccaaagtccgtatgagtttttggctttgtatcttctagaagggaaacacaactttagcttttgggaagatgttgcggttctagttcttatactcaatcaaacacataacatcttgtcttatttgactccaaaatactaaccaagcttcttattgcttctcaaaactttgatggtgtagccgaagtctgtatgagtctttggctttgtagcttctaacaaggaaacactactttagcttttgggaaacggttgcggttctagttcttatactcaatcatacacatgacatctagtcatatttgactccaaaacactaaccaaacttcttattgcttctcaaaattttgatggcttagccgaagtccgtatgagtttttagctttgtatcttctaacaaggaaacattactttagcttttgggaatcagttgtggttaaagttcttatacttaatcatacacatgacatctagtcttatttgacaccaaaatactaaccaagctacttattgcttctcaaaactttgatggtgtagccaaagtccgtatgagtctttggctttgtatcttctaactaggaaacattactttagcttttgggaaccagttgcagttctagttcttatactcaatcatccacatgacctctagtcatatgtgactccaaaaccataacaaagcttttcttattgttcctcaaagctttgatggtgtagctgaagtccatatgattcttttgctttgtatgttctaacaaggaaacactactttagcttttgggaaacggttgcggttctagttcttatactcaatcatacacatgacatcagtcatatttgactccaaaaaaataaccaagcttcctattgcttctcaaaacatgaatggcttagccgaagtccgtatgagtttttagctttgtatcttctaacaaggaaacattaatttagcttttgggaattagttgcggttctagttcttatactcaatcatacacatgacatctagccatatttgattccgaaaaactaaccaagcttcttattgcctcacaaagctttgatggtgtagccaaagtcggtatgagtctttggctttgtatctacaaacaagaaacattactttagcttttgggaatcggttgcggtcctagttcttatactcaatgatacacatgatatcctgtaatatttgactctaaaatactaaccaagcttcttattgcttctcaaaattttgatggtgtacacgaagtccgtatgagtctttagctttgtatcttcaaacaaggaaacataactttagctattgggaatcggttgccattctagttcttatactcaatcatacacatgacatctagtcatatttgactccaaaacactaaccaagcttcttattgcttctcaaaattttcatggtgtagccgaagtccgtatgagtctttggctttgtatcttctaacaaggaaacactacttttgcttttgggatccagttgtggttctagtttttatactcaatactacacatgacatataatcttttttgactccaaaacactaaccaaacttcttgttgcttcttaaagctttgatggtgtagccaaagtccgtatgagtttttggctttgtatcttctagaagggaaacacaactttagcttttcggaagatgttgcggttctagttcttatactcaatcaaacacataacatcttgtcttatttgactccaaaatactaaccaagcttattattgcttctcaaaactttgatggtgtagccgaagtctgtatgagtctttggctttgtagcttctaacaaggaaacactactttagctttcgggaaacggttgcggttctagttcttatactcaatcatacacatgacatctagtcatatttgactccaaaacactaaccaaacttcttattgcttctcaaaattttgatggcttagccgaagtccgtatgagtttttagctttgtatcttctaacaaggaaacattactttagcttttgggaatcagttgtggttaaagttcttatacttaatcatacacatgacatctagtcttatttgacaccaaaatactaaccaagctacttattgcttctcaaaactttgatggtgtagccaaagtccgtatgagtctttggctttgtatcttctaactaggaaacattactttagcttttgggaaccagttgcagttctagttcttatactcaatcatccacatgacctctagtcatatgtgactccaaaaccataacaaagcttttcttattgttcctcaaagctttgatggtgtagctgaagtccatatgattcttttgctttgtatgttctaacaaggaaacactactttagcttttgggaaacggttgcggttctagttcttatactcaatcatacacatgacatcagtcatatttgactccaaaaaaataaccaagcttcctattgcttctcaaaacatgaatggcttagccgaagtccgtatgagtttttagctttgtatcttctaacaaggaaacattaatttagcttttgggaattagttgcggttctagttcttatactcaatcatacacatgacatctagccatatttgattccgaaaaactaaccaagcttcttattgcctcacaaagctttgatggtgtagccgaagtcggtatgagtctttggctttgtatcttcaaacaagaaacattactttagcttttgggaatcggttgcggttctagttcttatactcaatgatacacatgatatcctgtaaaatttgactctaaaatactaaccaagcttcttattgcctctcaaaattttgatggtgtacacgaagtccgtatgattctttggctttgtatcttctaacagggaaacataactttagctattgggaatcggttgccattctagttcttatactcaatcatacacatgacatctagtcatatttgactccaaaacactaaccaagcttcttattgcttctcaaaattttcatggtgtagccgaagtccgtatgagtctttgcctttgtatcttctaacaaggaaacactacttttgcttttgggatccagttgtggttctagtttttatactcaatactacacatgacatataatcttttttgactccaaaacactaaccaaacttcttgttgcttcttaaagctttgatggtgtagccaaagtccgtatgagtttttggctttgtatcttctagaagggaaacacaactttagcttttgggaagatgttgcggttctagttcttatactcaatcaaacacataacatcttgtcttatttgactccaaaatactaaccaagcttcttattgcttctcaaaactttgatggtgtagccgaagtctgtatgagtgtttggctttgtagcttctaacaaggaaacactactttagcttttgggaaacggttgcggttctagttcttatactcaatcatacacatgacatctagtcatatttgactccaaaacactaaccaaacttcttattgcttctcaaaattttgatggcttagccgaagtccgtatgagtttttagctttgtatcttctaacaaggaaacattactttagcttttgggaatcagttgtggttaaagttcttatacttaatcatacacataacatcttgtcttatttgacaccaaaatactaaccaagctacttattgcttctcaaaactttgatggtgtagccaaagtccgtatgagtctttggctttgtatcttctaactaggaaacattactttagcttttgggaaccagttgcagttctagttcttatactcaatcatccacatgacctctagtcatatgtgactccaaaaccataacaaagcttttcttattgttcctcaaagctttgatggtgtagctgaagtccatatgattcttttgctttgtatgttctaacaaggaaacactactttagcttttgggaaacggttgcggttctagttcttatactcaatcatacacatgacatcaatcatatttgactccaaaaaaataaccaagcttcctattgcttctcaaaacatgaatggcttagccgaagtccgtatgagtttttagctttgtatcttctaacaaggaaacattaatttagcttttgggaattagttgcggttctagttcttatactcaatcatacacatgacatctagccatatttgattccgaaaaactaaccaagcttcttattgcctcacaaagctttgatggtgtagccgaagtcggtatgagtctttggctttgtatctacaaacaagaaacattactttagcttttgggaatcggttgcggtcctagttcttatactcaatgatacacatgatatcctgtaatatttgactctaaaatactaaccaagcttcttattgcttctcaaaattttgatggtgtacacgaagtccgtatgagtctttagcttggtatcttcaaacaaggaaacataactttagctattgggaatcggttgccattctagttcttatactcaatcatacacatgacatctagtcatatttgactccaaaacactaaccaagcttcttattgcttctcaaaattttcatggtgtagccgaagtccgtatgagtctttggctttgtatcttctaacaaggaaacataacttttgcttttgggaaccagttgcggttctagtttttatactcaatactacacatgacatatagtcttttttgactccaaaacactaaccaaacttcttgttgcttcttaaagctttgatggtgtagccaaagtccgtatgagtttttggctttgtatcttctagaagggaaacacaactttagcttttgggaagatgttgcggttctagttcttatactcaatcaaacacataacatcttgtcttatttgactccaaatactaaccaagcttattattgcttctcaaaactttgatggtgtagccgaagtccgtatgagtctttggctttgtagcttctaacaaggaaacactactttagctttcgggaaacggttgcagttctagttcttatactcaatcatacacatgacatctagtcatatttgactccaaaacactaaccaagcttcttattgcctcacaaagttttgatggtgtagccgaagtccgtatgagtctttggctttgtatctactaacaaggaaacactactttaggttttgggaatcggttgcggttctagttcttatactcaatcatacacatgacatctagtcatatttgactccaaaaaaataaccaagcttcttattgcttctcaaaacattaatggcttagccgaagtccgtatgagtttttagctttgtatcttctaacaaggaaacattaatttagcttttgggaattagttgcggttctagttcttatactcaatcatacacatgacatctagccatatttgattccgaaaaactaaccaagcttcttattgcctcacaaagctttgatggtgtagccgaagtcggtatgagtctttggctttgtatctacaaacaagaacattactttagcttttgggaatcggttgcggttctagttcttatactcaatgatgcacatgatatcctgtaatatttcactctaaaatactaaccaagcttcttattgctactcataattttgatggtgtacacgaagtccgtatgagtctttggctttgtatcttctaacaaggaaacataactttagctattgggaatcggttgccatgctagttcttatactcaatcatacacatgacatctagtcatatttgactccaaaacactaaccaagcttcttattgcttctcaaaattttcatggtgttgccgaagtccgtatgtgtctttggctttgtatcttctaacaaggaaacactaaatttgcttttgggaaccagttgcggttctagtttttatactcaatactacacaggacatatagtctttttttactccaaaacactaacgaaacttcttgttgcttcttaaagctttgatggtgtagccaaagtccgtatgagtttttggctttgtatcttctagaagggaaacacaactttagcttttgggaagatgttgcggttctagttcttatactcaatcaaacacataacatctagtcatatttgactcccaaaaactaacgacgcttcttattgcctcacaaagttttgatggtgtagccgaagtccgtatgagtctttgactttgtatcttcaaacaaggaaacattactttagcttttgggaatcggttgcggttctagttcttatactcaatcatacacatgacatctagtcatatttgactccaaaaaaataaccaagcttcttattgcttctcaaaacattaatggcttagccgaagtccgtatgagtttttagctttgtatcttctaacaaggaaacattaatatagcttttgggaattagttgcggttctagttcttatactcaatcatacacatgacatctagccatatttgattctgaaaaactaaccaagcttcttattgcctcacaaagctttgatggtgtagctgaagtcggtatgagtctttggctttgtatctacaaacaagaaacattactttagcttttgggaatcggttgcggttctagttcttatactcaatgatacacatgatatcctgtaatatttgaccctaaaatactaaccaagcttcttattgcttctcaaaattttgatggtgtacacgaagtccgtatgagtctttggctttgtatcttctaacaaggaaacataactttagctattgggaatcggttgcaattctagttcttatactcaatcatacacatgacatctagtcatatttgactccaaaacactaaccaagcttcttattgcttctcaaaattttcatggtgcagccgaagtccgtatgagtctttggctttgtatcttctaacaaggaaacactacttttgcttttgggaacaagttgcggttctagtttttatactcaatacaacacatgacatatagtcttttttgactccaaaacactaaccaaacttcttgttgcttcttaaagctttgatggtgtagccaaagtccgtatgagtttttggctttgtatcttctataagggaaacacaactttagcttttgagaagctgttgcggttctagttcttatactcaatcaaacacataacatcttgtgttatttgactccaaaatactaaccaagcttcttattgcttcttaaaactttgatggtgtagccgaagtccgtatgagtctttggctttgtagcttctaacaaggaaacactactttagcttttgggaaacggttgcggttctagttcttatactcaatcatacacatgacatctagtcatatttgactccaaaacactaaccaagcttcttattgcttctcaaaattttgatggcttagccgaagtccgtatgagtttttagctttctatcttctaacaaggaaacattactttagcttttgggaatcagttatggttctagttcttatacttaatcatacacatgacatctagtcatatttgactccaaaaaactaacgaagcttcttattgcctcacaaagttttgatggtgtagccgaagtccgtatgagtctttgactttgtatcttcaaacaaggaaatattactttaggttttgggaatcggtcgcggttctagttcttatactcaatcatacacatgacatctagtcatatttgactccaaaaaaaataaccaagcttcttattgcttctcaaaacattaatgtcttagccggagtccgtatgagtttttagctttgtatcttctaacaaggaaacattaatttagcttttcggaattagttgcggttctagttcttatactcaatcatacacatgacatctagccatatttgattccgaaaaactaaccaagcttcttattgcctcacaaagctttgatggtgtagccgaagtcggtatgagtctttggatttgtatctacaaacaagaaacattactttagcttttgggaatcggttgcggttctagttcttatactcaatgatacacatgatatcctgtaatatttgaccctaaaatactaaccaagcttcttattgcttctcaaaattttgatggtgtacacgaagtccgtatgagtctttggctttgtatcttctaacaaggaaacataactttagctattgggaacggttgccattctagttcttattctcaatcatacacatgacatctagtcatatttgactccaaaacactaaccaagcttcttattgcttctcaaaattttcatggtgtagccgaagtccgtatgagtctttggctttgtatcttctaacaaggaaacactacttttgcttttgggaaccagttgcggttctagtttttatactcaatactacacatgagatatagtctttttttactccaaaacactaaccaaacttcttgttgcttcttaaagctttgatggtgtagccaaagtccgtatgagtttttggctttgtatcttctagaagggaaacacaactttagcttttgggaagatgttgcggttctagttcttatactcaatcaaacacataacatcttgtcttatttgactccaaaatactaaccaagcttcttattgcttctcaaaactttgatggtgtagccgaagtccgtatgagtctttggctttgtagcttctaacaaggaaacactactttagcttttgggaaacggttgcggttctagttcttatactcaatcatacacatgacatctagtcatatttgactccaaaacactaaccaagcttcttattgcttctcaaaattttgatggcttagccgaagtccgtatgagtttttagctttgtatcttctaacaaggaaacattactttagcttttgggaatcagttgtggttctagttcttatacttaatcatacacatgacatctagtcatatttgactccaaaaaactaacgaagcttcttattgcctcacaaagttttgatggtgtagccgaagtccgtatgagtctttgactttgtatcttcaaacaaggaaacattactttagcttttgggaatcggttgcggttctagttcttatactcaatcatacacatgacatctagtcatatttgactccaaaaaaataaccaagcttcttattgcttctcaaaacattaatggcttagccgaagtccgtatgagtttttagctttgtatcttctaacaaggaaacattaatttagcttttgggaattagttgcggttctagttcttatactcaatcatacacatgacatctagccatatttgattccgaaaaactaaacaagcttcttattgcctcacaaaactttgatggtgtagccgaagtcggtatgagtctttggctttgtatctacaaacaagaaacattactttagcttttgggaatcggttgcggttctagttcttatactcaatgatacacatgatatcctgtaatatttcactctaaaatacttaccaagcttcttattgcttctcaaaattttgatggtgtaaacgaagtccgtatgagtctttggctttgtatcttctaacaaggaaacataactttagctatagggaatcggttgccattctagttcttattctcaatcatacacatgacatctagtcatatttgactccaaaacactaaccaagcttcttattgcttctcaaaattttcatggtgtagccgaagtccgtatgagtctttggctttgtatcttctaacaaggaaacactacttttgcttttgggaaccagttgcggttctagtttttatactcaatactacacatgagatatagtctttttttactccaaaacactaaccaaacttcttgttgcttcttaaagctttgatggtgtagccaaagtccgtatgagtttttggctttgtatcttctagaagggaaacacaactttagcttttgggaagatgttgcggttctagttcttatactcaatcaaacacataacatcttgtcttatttgactccaaaatactaaccaagcttcttattgcttctcaaaactttgatggtgtagccgaagtccgtatgagtctttggctttgtagcttctaacaaggaaatactactttagcttttgggaaacggttgcggttctagttcttatactcaatcatacacatgacatctagtcatatttgactccaaaacactaaccaagcttcttattgcttctcaaaattttgatggcttagccgaagtccgtatgagtttttagctttgtatcttctaacaaggaaacattactttagcttttgggaatcagttatggttctagttcttatactcaatcatccacatgacctctagtcatatgtgactccaaaaccataacaaagcttttcttattgttcctcaaagctttgatggtgtagcagaagtccatatgattcttttgctttgtatgttctaacaaggaaacactactttagcttttgggaaacggttgcggttctagttcttatactcaatcatacacatgacatcaagtcatatttgactccaaaaaaaataaccaagcttcctattgcttctcaaaacatgaatggcttagccgaagtccgtatgagtttttagctttgtatcttctaacaaggaaacattaatttagcttttgggaattagttgcggttcttgttcttatactcaatcatacacatgacatctagccatatttgattccgaaaaactaaccaagcttcttattgcctcacaaagctttgatggtgtagccgaagtcggtatgagtctttggctttgtatctacaaacaagaaacattactttagcttttgggaatcggttgcggtcctagttcttatactcaatgatacacatgatatcctgtaatatttgactctaaaatactagccaagcttcttattgcttctcaaaattttgatggtgtacacgaagtccgtatgagtctttggctttgtatcttctaacaaggaaacataactttagctattgggaatcggttgccattctagttcttatactcaatcatacacatgacatctagtcatatttgactccaaaaaactaaccaagcttcttattgcttctcaaaattttcatggtgtagccgaagtccgtatgagtctttggctttgtatcttctaacaaggaaacataactttagctattgggaatcggttgccattctagttcttatactcaatcatacacatgacatctagtcatatttgactccaaaacactaaccaagcttcttattgcttctcaaaattttcatggtgtagccgaagtccgtatgagtctttggctttgtatcttctaacaaggaaacactacttttgcttttgggatccagttgtggttctagtttttatactcaatactacacatgacatatattcttttttgacttcaaaacactaaccaaacttcttgttgcttcttaaagctttgatggtgtagccaaagtccgtatgagtttttggctttgtatcttctagaagggaaacacaactttagcttttgggaagatgttgcggttctagttcttatactcaatcaaacacataacatcttgtcttatttgactccaaaatactaaccaagcttcttattgcttctcaaaactttgatggtgtagccgaagtccgtatgagtctttggctttgtagcttctaacaaggaaacactactttagcttttgggaaacggttgcggttctagttcttatactcaatcatacacatgacatctagtcatatttgactccaaaacacaaaccaagcttcttattgcttctcaaaattttgatggcttagccgaagtccgtatgagtttttagctttgtatcttctaacaaggaaacattactttagcttttgggaatcagttgtggttaaagttcttatacttaatcatacacataacatcttgtcttatttgacaccaaaatactaaccaagctacttattgcttctcaaaactttgatggtgtagccaaagtccgtatgagtctttggctttgtatcttctaactaggaaacattactttagcttttgggaaccagttgcagttctagttcttatactcaatcatccacatgacatctagtcatatgtgactccaaaacactaacaaagcttttcttattgcttctcaaaactttgatggtgtagccgaagtccgtatgagtctttggctttgtagcttctaacaaggaaacactactttagcttttgggaaacagttgcggttctagttcttatactcaatcatacacatgacaactagtcatatttgactccaaaacactaaccaaacttcttattgcttttcaaaacattgatggcttagtcgaagtccgtatgagtttttagctttgtatctttcaacaaggaaacattaatttagcttttgggaattagttgcggttctagttcttatactcaatcataaacatgacatctagtcatatttgactcccaaaaactaaccaagcttcttattgtctcacaaaactttgatggtgtagccaaagtccgtatgagtttttggctttgtatcttcaaagaaggaaacattactttagcttttgggaatcaattgcgtgtctttttcttatactcaatgatacatatgacatcctgtaatatttgactccaaaatactaactaaggttcttattgcttctcaaaatgttgatggtgtatccgaagtccgtatgagtctttggctttgtatcttttaacaagaaaacactactttagcctttgggaaccggttgcggttctagttcttatactcaattatccacttgacatctagtcatatttgactctaaaacactatcaaaacttcttattgcttctcaaagctttgatggtgtagctgaagtccatatgattttgtggctttgtatcttctaacaaggaaacacacctttagcttttgggaaacggttgcggttctagttctaatactcaatcatacacatgacatctagtcatatttgactccaaaacactatccaatcttcttattgcttctcaaaactttgatgccttagccgaagtccgtatgcgtttttagctttgtatcttctaacaaggaaacattactttagcttttaagaatcagttgcggttctagttcttatactcaatcatacacatgacatctagtcatatttgactccaaaaaactaaccaagcttcttattgcctcacaaagctttgatgatgtagcctaagtccgtatgagtctttcactttgtatcttcaaacaaggaaacattactttatcttttggaaatcggttgcggttctacttcttatacttaatgatacacatgacatcttgtaatatttgactctaaaatactaaccaagcttcgtattgcttctcaaaattttggtggtgtatccgaagtccgtatgagtctttggctttgtatcttctaacaaggaaacataacttcggctattgggaatcggttgccgttctagttcttatactcaatcatacacatgacatctagtcatatttgactccaaaacactaaccaagcttcttattgcttctcaatattttcatggtgttgccgaagtccgtaagagtctttggctttgtatcttctaacaaggaaacacaactttagcttttgggaaccggttgcggttctagttcttatactcaatactacatattacatacatcacctgaagtatacagggtctctactggtgggcaaaactcgatgttgccgcaatctctgatcgaagtggaggcggaatttagaaggagaaaaatagattgtcctgctgcagggtgatcgaacctatatttatataggtaattcttctgctgcgacaaaaattgtttggaatttatgaggtgttgcatatcaatccatctcggaggaatctgttttgaatgtagaggtacattgcatgctctgagaattagggtcgcaactcctcccatagccattcttcctggtttcttaagtcccttagtccatcctctgtagctcagcagatgttcgattaggtagaatgaaactgaagcttctgtctgatctcctgctagaacggtaccatctgatgctaaaccaagtagctcctgtagcgctgtctccaacaattctagctctccattgtcaaaggtcccattcctctctcttgcaaatagtgcactggctaaagacctatgaaagtacctaaccaccggactccttattcgttgctcttggtcctagaggatgaaaacccatgtttagacccaagcatggccaagaatgactgaagctctctcttgtcaaaacgatgactcgtgtctttttcgcttgggaacccatacatatgctctaaatgatcgattggaagccgatactctacgtcatagacacagaactccaagtatcccaaacttccgtctggcctgattccatcgtcctctgactctccatatatgaacaattctacagatgaaagaaaattgacggtctcttcctcatacccatccattggccgaaacatgtgaatattctggctgcactgcttaaacatgtactctacatcatcatatatgccgagtctctccatggtctcaggatgagggtatcgagttcctaaaaactcgttgcgtttcagtagtttgtagtactcgtttcgagttgcgcacttctctgattccaaatcatcaccacctccattctctgtttgatctgcttcctcaggtgaagccatttcttcctcggagtcttcatctaccagttccaaccttctccccacgggcttctttcatcgagtgatatcttccttgttccttgagaactcccttgtagaggccttactcgaccttcgggatcgagtgttttcggcgggggagttgaaagtttgttcttcttgcatgcatcctcgtcttggcttgattcgctgtgattgatctcgaaacttgctcgttctctcctgctcgaccctatgggtgatggttcagaaagtcttcgagctgctgcatgtgaagaacgtgttgggtacctcttcgatggggagagagctatgtttcggatccttgacaggagcgtgcgcttgtttgtcattgagaacgagagactcaaaggttaggagatcgagtgatgaagaaaatagatggattatgttgagtttttgataaaaagaggaagtgcaagagaaagggatagagagaggtataagaattcgagattgctttggtatggaggtggagagatgagtttgtagtgttcgggaattgcaatggggggaccaaaattattatgaggggacaagaagacaaggaggtatgatggaattcaatggaggcgggtcacgaggcgtcggaatccacaaggtggtctctttggtttcttcactcaatcagacggtggagagtgcttcgctattaatcactcgatcaaacggaccataataaacctcaagaagtcactcgatcaaaacggtgatgatgcttttctcatttgatcattcaatccaacgacttagagcactcctcctcaatttactcgaatggttgagatcatctcttgactaggtttgattttactcgaacgttgacttcctcaaggtcaatgaaataaacctgaaacacttaaacaaaaacatcaaaaataacaagaaaaatataaagttatatacatggatagacatgggacttcccccccaagtgagcttgttttaagtcactaagcttgactcttacaaagcttagtcagaaaaaggttgaggagaggaacagagaagtcctcatcttcagtggttgaattttcagtgtctgaatcatacgttgcatcctttcttgacatatggtaggatgagtactcatttgatttttcttcaaaataagcttctttttgatcagcagagtagtcttcttcttctgaaccaggctcctttgaccaatcctcaagttcaaaactggggtagcctttaaccatttcttgaagttccagaatggtgctatttaactcttccatcttatgaattaactttccaattgtatcctcctgagctttatacccaatccaaagctccaggagttcttcagcaatagaatcaagaatcaagtgttcttcttcagaagagggtttagtgggcggtttaggtacctctggagaataagtcggaataatttcctcctcactcaacaacttgctctccaagcttctttcctctaagtgaactcctttctgatcttctggtgcaaaccattctattgcgaaatcttttgtcctctttgatagctagtgtagtttccatcttctctggatcaatactcattgaaaacttattaaatcttttttcaaacatccatagttgatctttcagcttcatcactattggagctggattttcctccaggaatccacctgcaaaaataccaggccaacccaccaagcccaccaagtagaagacctgcgcaactgatgagcccacgtacgcaaatcggtacttgggcctgataagcccggtcacctgatgaagggagataagcgaataacaacctaggaactaacagggagatattcgcagaatggacctgatatcttggaattgacctgccgaatatctaagagaatctccgcagatcccggacgaagctaccacgtgcgtagatctatataagaaagcaaggacgacttggaagacattaaattcagctttacattcacacttacacttttacacttgtaatctcctttcacattgtaaaagctctgtgataatcaatacacaagtccattggttcttagcaatataaatctcaatgttcctgtgaagatctagccctcctttctcataatctcaattacaaatctgtactgtggatttcagaacccacatttggcgccgtctgtggggaccgaaatagatccttccaacaccgaaactaacacatcaattgtgaccaacgatcatggatcctaattcatccgattcaatgagatctagcgtaccaagtcagatcgcaaacgataacgtcgccgacgggcacgaatgcatctagcatagatcgagtgatcgaagaaaccaggcgcaccccattcacggataggatcgcccattgtcacatcttagacgccgggagactccgtttcctggagtacgatggaacgagtgacccaaaggctcatctgagagccttctgtctggctataacacgagcgtacctgatagacaaagaaaatgaagcaggtcattgccgtttctttgcagagaacctcgtatgtgacgcactcaaatggtttgctagtctcaaagggaactctattgataccttcgaccagcttgcccccgccttctaaaaacagtactcggtactcatcgtaaacaggacgtctgaagccgtcctctgggtgtcacccaacttcagaacgaatttttgcgatcttacgtcgaaaaattcaaagcaatcaaatcaaagattgcgaacctaaacgaggaggtagccatagccgcccttcgcaacggcttgtggttttcctctaggttccgtgaggaactcaccgttaggcaactggtctctttagacgatgcccttcacaaagctctccacttcgccaaagccggagtccggagaggagctcgccgtttcggccctaagattcaaagaatctaaagcacaaaacgcttcccttgcaactaaaaaacccttcaaaaaggaaaaccaaatactagggtagcataccttatttgcaatagaagaggcagccgaggacgagagtccagaacttgaccacgaaaaatattacaagtaccacaaaaagagaggacattccatcgaggaatgtcgcggcgttaaaaaattaatcgcagccgggggcaaaactaaaaaaggttcaaacgctaatgccgacacccctcctcccgacgagcaggaggaggagcaaactcccaaacgaaagaaacgggactgaacaccgaaaggaggtgagtctcctccacctgctaggaaagagcgcacagacctactctttgcaggacttgatctggaaggtaggacagaaatatcagtcactacacctcctctcgccccgcaaaagaaaaacatgaggttcccattatgcctcccgaaattctgtagaaacgcaaccgagcacctctccctgaaacgcatcgatttcatcatgggagaatctcggctctgcaacgactcaatcaatttgatcaaacacatcagaggaaggcagattcctacacaaaaggcaaaagcccgatgatgtgagaccccgttccggacgtctcggcgtccggcgacgttggactcaagttcgcgcctcttcccggccgaacctcttaattttttgcgattcaacatagaattgcctttacgaggcttaattctataatcgctctcttattacacagcggaagtctttctaaccttggtttaattctaaccaactcttgtaccggtttcatcgtctttgtcccttagacttagatcaatcctttactcggtcaagacatgcatattgttcggtaaccattctaggcctaacaatcgcatattcctttatcctattttcacggtcgattcccaaacgtctatcctaactagtaagctagatcgttacataccttggccaatatgcggatttgattccctagcccatttgtcgccttattctattcgttcaacgattcgtatgcgatcgtgaattgatgaaccaatccctatcgttacttagccatacaaccaaccaaccacactggtctaagtacaacgatagagattggggatcgtacgattcccttggttcacgatggccgaatcaagctcttggattggtccatctgtcctccaaacgtacgccccttcggttccatggtggacgattgagcccttggcttatcgaatcatccatgtttccgatccggtcgtttaacactacgaccgcccacggtttactaaccgtttacccgtcgataaagctttcgccttaatgatccatccatgcggtctgaacgatatccttatcacacccaagggtccgtggattcatccaccggagtatcgtaggctagcccatgaaatccttcttccatcggccttaggtttgctcgcgggtccaacatccgttttgtccatcggttccaactgtggactttcccgttggttatccgtcgagtcaccctttggtcttaccgatctccgatcggtttcaccatggctgaggagatagatacatgaaggcagccgcgatattgatcctatatggtgaatcacgttccttacccattcttggtgctttctccctttaccagtaagattgcatccatgggcgacccttgggtgtgttcggatgcacttatccttgtccttcctcaaacacttttcttgatccatcccatccgacgatcggtctgtccgactcgttccgtctgacgatcagtctatcccatccgacccgtccgaagatcggtctgtccaatccgatccgtctggccgatccgatccgtccgacgatcggtttggccgatccgatacgacgatcggtctaccagatccgatttgtctctaagacgaacggtctaccctctccatcctctacactccatcaaaccgttggaccgagaggtggtatgcgcatcagttcggtcgacttatactcgccgagccgcaccccctttctgaccaacaacttcaggatgtgttgggactgttttgagaatattttgtggtgtatggatgttgtatgagatgctctaaagaccttgggcgtcctcccttatatagggggcgaatggatgcttcctgaagcatcccatccgttccttgcacccttccgaaaggtcacatcccttccttgcatccttccgaaaagtcacatccgttccttgcattctatgggcgatgcaaacgttcattggtacccgctcgaccttgcaccttttggccgagacacctcttcacccatgagttaccacagtccaccagctcgagtgtcagctgaccggaccacccatctgggtcagtactccgctcaccgagcttagtcgagctgttggtcagctcaactagctgagctagctagtcttccagctggtttagctcacatagcttagctagctagttcatccagcttgtccagctcacctagctggtttagcttgaactttctctttcttcctacttagtattttggttcgttcctcgaccatgatctagttttctcctaaaacaaaccggcctcgatcaccagatcacattctgggaaaatgaaaccactgacctcaataaacctcacattgacgctcttgatatccgaatcgacgtaggcaactacgaactctctcgtataatgatcgacacgagaagctcagttgacgtactcttctacgacgccttcaaaaaaatggggcacctcgattccgagttgcaaggcagaaaaacgccacttaccgggtttgatggagatacgaccttttccctaggaaccatccagctcccaaccgtcgcacggggagtaagacaactcacgaacttcctcgtggtcgataagaaagctcctttcaacgcaatactgggaagaccatggctacacgccatgaaagccgtcccatcgacctactaccaatacattaaattcccctccgacaaggggataacagtcgtatacggcagccagcgcagctcccgaaaatgttatatgggtggttacgagcatatcaaaaaagccgaccccgtggtaataatgatagaggacaaactcgcagaaatgaaaacagtcaggtcctccgacccttctcaacgtggacctcaaaaatcgctgataacgcaggtctgcatagacgaatcagatcctaaacgatgcgttaggataggtcacgacctcgacccaacaatatgagaggatctcgtaacctttctcaaggaaaacaaagacagctttgcctggtcaagcgcaaacattcgaggaataagcctcgaggtaacctcacacgaactcaacgtcgatccgacctaccgacctataaagcagaaacgtcgcaagctaggtcctgaaagggctaaggctatgaacgatgatgtcgactgattgctcaaatttggatcgataagggaagtaaaataccctgactggctcgccaacccagtcgtcgttaaaaagaaaaacgggaagtggagagtatgcatcgactttacggacctgaataaagcatgtcctaaagacagtttcccactcccgcatatcgaccgacttgtcgaagccattgtaggacacgaactactgtccttcatggacgcattctccgggtataaccaaatacttatgcgcctagatgaccaagaaaaaacagcttttattactgaccgaggcacctacttttttaaagtaatgccctttggtttaaaaaatgctggagccacctaccaacgattggtgaacaaaatgttcgctgaccagataggtaaaacgatggaggtctacatcgacgacatgctggacaaatcagctcacaaaaaggaccacgttccaccattaaaataatgcttcaaaatcctaaacaaatttgaaatgaagctaaatcctgagaaatgctctttcggagttccatcaggagaattcctcggatacctagtaaccgaaagaggcatcgaggtcagtcctaagcagattgcagccttcatcaaaatgttatcactaaaaaaggcacgagaggtccaacggctaaacggttgtattgctgccctgaacaagttcatatccaggtccaccgacaaatgcgtccctttctaccagctcctctgaaaggagaaaaagtttgacttgaatgaggactgcgaacaagccttcaagcaattgaaagcatacctgaccgaaccacccatactcgcaaaacctgaagaaggagaacagctgtacctgtacacggcagtctcccgaaccgcgataagcagtgtcctggtgagagaagatcacgagggataaaaaacgatctattacgtgagtaaaacgttgatagacgctgaaacccgttatccagcaatgaaaaaacgggcactggccgtagtcatgtcagctcgcaaactgagaccatatttccaatcacaccccatagtagtgatgacgtcccaaccaatccaaaccattttgcatagcccgacctaatcaggacaacatgcaaaatgggccatagaattaacttaacgtctttgaaccatattttataaactttctcagattgttatgtgttgttggaaatcgttattatcccaacggacaaaaaaagaactatatttatttatacttttatagtgtttgacacattaactttttcattagagctttttgggtatgtcctttttaattttatcagttaaatatctttgaactatgttttatgttttgttttttcaggttaccgtatttgttagtggcattgatattattgcaaaaaaaaaagacaaagtgaattatcatgattcataatatttaggaaaaaattaactatatctatttgttgacaaaaaaaaagaactatatttactaatggtgtttagcacaacacttttttcattggagctttgtgtgtatgtattttcttattttattatctaaatatccttaaaccatgttttatattttctttaggttacgtgtttcttaatggtgttaatactattgcaacacaaattcctctttttgtttaggtagtgaagctagaacagaatgtaaacaattatgtaatccgtggatgttgatgtatcttattttctttacataaacaatttccgttaacataagtttaattgagtgtcttttttttctagactcaagtgtcttaaaaaatggttatgagtaaagttactacattttttatatccaaccaaaattcagagtaaaaaatgaatttatttgagtttattttcatcatcaaaatttaaaataccattttcacttggattcaaagatctaaagaagcaaatatatgatggtggggcaatgcgattgcatttttttttaactcacccaaaagtaagaaaatgttatgttttttatttggttcatttttttttaactaaattttatttgttgtattttgtgatctttcaaaagtaatcgtattttgaaataccataaaaattattgttttagatctttttgtctacgcattgtaagacttttgaacataatcgattagtaaggttttcaaaatctttcgatgtgtaactaatcaagtgttacttattttataatatattttaaaagttgtacctaatttgtaaaatattgataaattagaaatattagaagacaaccacaaggtacgaaaactaaaaactaaataattaaaacaagtgaatgataatgtgactgacattttctattttcatgtaagaagaaaatagaaacatgttatagattacaagtgaatgataatgtgaaaagtctgtttttggatctaagggtgagtactcttactctattatgaattgttctctatgttttctctttgttcattctttgttgagtttgtctaagttatcgatgacattttgaaattgtttgattattatgaatgatttttcttttaatgacatgaatgtccaactaccaataatgcattagttatatgcttaaatatagaagatacaatgtctaaggatataacaaattatatgaaaagcatgtattaatttaaaaatataataaagatatcgaagatgcctattaacacaaggttaaaaacttgtgtaaaagaatcgaaattaatatattttacaatatgtggtcttaattttatttttatggagacaaaaacaacattttcttagagattttgtatggtttaatttatcatattttaattcataaatactaaagcaaaaatttaagtaagaaaataaatttaattaatttgatatgtatgcttagccacaaaatgttgcatgatttattatattaattcaaagttgcgtgagattttctctagtaataagatatatttcattcatgatctaatttaaaaacatctactctgcctgattgttagcttccatcttgtttgatctctttggttttgaattaagaaaacaatactggtcgggttagtgtagttggattttgtcgtacttttaaaagaaatgggtttgatgtacctatatatgaatgaacttttccaaagggtgcttcatcgcaaagtagtcgacgtatatgcaattattccaacaacacctctataggtggaaaacaatgatatatagattattagccacacttggtctcaggatgttcttgagattgaaaaataaaagactagtaaacacagagtctttttccttgccttttctcaagaatatgtacttaaaaggtggtatatttcctacgtatgtagttgttattacaagcttaaaagattcttcaggataatcagtgtgagttatacaattatagtactcacaccagtatttcactttctaactataacataaacaattaacaacccaaaaaaagatttgggtatggaaacaaaaccaagccttgacatgataatatttttgaatgaatctgcaagaaagatggggtttttaataaaaaccgcaaatcttcatcttcatcattcttttgcaacaatagaatttgcttcatatacataatcgtgcctgcaatccacacatatcaatgtcaaaacagagacaaacaccaatggtgaagttagaaacccatgattcaagtcataaccaaactatatatgttccttagttaaagaaggtgttcttttttcccattgctaatcaaagcaaagcacttctgtacatcttactttattttacgagtaagttggtatatccctgtcacagccataccaagactcacgctaaagagattccagtttttctgtaaacaaaaagctagaccaacataagaagaaaccagtaatcatctaacaaataagtacaagagaaaagcaaaatgtactctgtaaatgacaacaatatgattcacagaatacataccggagtaattacagtgctgtaacgtgaccaaacaagtccagtacctgtgatcactgatacaatgacagccatacgaggcatcatataaacattaaagttcacacatcgatacataaccgcaatatgtgcagaataaagatagctaagaccaatagtgagtataataccaatttgttgagggtatgaaagtgtctctggaggtttttgaaagtctgcaatattggcaatgcttataccccacttgaacgtcggcgcccaaaaatgaactgacaaatacaaaaatgattttacagttcaggtttttgtagcaagtttgatcaagctaccaaatgcacttgtttgattaaacttatattagtctattggagaaaacagagcatgttaagcaaactaatctaaaccaaactttaacaaatctaaaccgaatatgaatcttatgcataaactgataaaccattttcagagacacaaaaatcaaccaaactaagaaggatctgttacggagtcactcaagaattggaattaggtttgaaacaaagcaaatcgaggaacaaaagatgaaattctacaaatactgattgttcaataataaaaatactatgatcaatctcaccgtgtgaaaagtcaaaagtgaagaaaaaaacattcatggatatcgaagactcacttgtcttaggtccagctggatgattccaaagagcttgaagcttcgaagttgccatcaatttttctctgtaatattcccaaagttctctcaagaaataatattctctattgtaacattgctagtcaaacaaaaaaaaagttattcgttctgattacttgttccgtgtggttgggtgttattgattacgacggtgtttaatagtattgtatttgatatcgctacaaaatgattggaggaatcttctaaagactaaaccttaatttactcatctataatataatacaacgaatcaaagtattacttgattgtcacttaagttaaaaaggaattaagaaaagcaaattggttgtcacatattcacattttaaggtaaagataaatcaaagtaatttcctttcctaaacgaaaatatagatcgaaattcgtcaacccaaaataaaaatgaattctagcaagaatttttattttattttttataaagtagtctgaactgcatccaattaagaaattgaaccgaagaaaaccaaaaatcactaaatcactaaattaattagttatttatattttatttttgggtaaataatattagttatttaggttcatttatttatattttatgtaaatccaaacaaaaccaaccggccgagcaaaatctcaaactgaaccaaaccaaaatctgaaaattctaaaccgaataaccgtacgcacaaggcaaaatgatattattatagataagaaaaaaacattctcttctaagaaaaactccaagtgatatctatttatattgtatatgatgattataatttgataaactttatagatagaaggtttattgatgacataatttggagaagaagcataaaaaaaaactcaatgaccaaacaaagaagattttaaagggactgacactactaattaccatccaaatatcatttagtttttgtttttataaatactttttgtgggggaagatatcatttggaatttatgtgagtcgttagatcatcgacccatgatgaataatggaggggcatatgaatcatgatgagtgaatatgaaatgtgagggaattgaagatttgaaattgcatgtgcatgctctttttttagttctcctttggttcttgtttcatacccacaatttttctcttttgtgagtaccacaacataccttttcattacataaaacattatactaaacattagatattaaccgtagtacaccacgggcctatattattatttcaaaaaaaatcttctataaatatatgctattttgttttttaatttaaatatatggtacaccgcgagacgatataatctaactaaaaatttaagttgtatttcttttgttaatattgtttattttgtttagtgtttaagagtgaaaaattgtacatgattgtttattttacgcgtagtatacaagtatgtattaatatcgacctaaatccgtcaattttaggatttcacccgtagtataaagttgaaatgtttataatgtttaaacttcttataaaataatcaaaatgtgttttttaaaaaatgaaatttaagttgtatgtttttgttaatattgttcgtttttttgtgtagtgtttaaaattgtatacttatattttgattgttaatcttaagatttcacctgtagtataacgtcccatattgttatcgaccaaaatccattaattctaagatattatctttagtacaaagcttaaatatctataatatttaaaatttctataaaataattgagatgcatttaaaaaaaaatattagttgtatttgttttgttaatgttttttgttttgtttattatttaagattgtataattatatattgattattaattctaggctttcacccgtcctatatcgtcatgtattattatcaacctaaacccgtcaattctaggattttacctgtagtataaagtttaaatttttaatattttgaaactttttaagagtttccattctttgaaataaataactagagtaaatcgaacaattctagttttggacgtttgagaactcaagtttcttgttcattgtattcggaatcattttggtcatttttactctaaactattggccacatttttttaagcaatgtaggacattgtacacatattatttcctcatcgattggataatatatgtccattttaaaaaatttgaatcgcatcatatacaaaaaaagaaaattttctaaactatatgtattttatataaattcaaattaaattaaatataagatcaaatcaaagtgaaaaatcatagatttatttttaaataagttagagaggttttaggaaattatttaaggtaagtaacatatatgcttagtttagagatattatatttattaaatttggtaattcaataattaatttcgtttttaattaattgttttagagaaaatggtaacttttttcaagaattaatgttatccaggatccgtacactattaaatcgggtaataacccaatcgattaaagttattcaagattggaacataattaaaccggataatatcctatccaagtaaattaaaagggattaaaaggaattaaggctcaaaatcccctaccaaaaatgtatatctagatttggagtttgtaacatcatacgtcatgactagcaccagctcaatcatttaaatcaacacacgtgcggatatatatctcttaggatattaaaaggatcaattcgaaactgacatgttgttggagttagcttgaagaagacttaaggaggaatcaaaccgaaacctagttatggttcaaaccgagttatggtttagaaaattagataaattctaatgaatctagaagatatttacgatatctaaatatgtatttctaatagtattaggactagattcttttacatataaggacatgttgagttgtaacatggtccttaagagagtttgtgagatttgagagaacttgaaagctttagttttgtgtaagtttctaaagcataataagagagtcattcttattgatcttgtgttcttacatacaaactttaaacacatgaattggtatgagagcttacaagatcttaagaccgtatagggagaacttgtaagatcaagagagagagatgagtgaaatagttgcgtcaacaccgaaatcaaaagaaggagggtcttcttcgattcaatatcccaatcttactcaaaccaattatacagcttgggctatgaagatgcagatcgttctccaagtgaaacagagtcaaccgatccaagcgatgaagataagatcttggccatagccttgttagttcaatccatacatgaatctctaacttagtagattggagaattcaaggtagcaaagaaagcttgggaagctatcaaggctaggaacgtaggtgcataacgattaaagaagctagactacagacactaatgaacgaatttaataaccttaagatgaaggacaccgaaaaaattgatgactttgtaggcaagctagctgaaattgcgtctaaatcagcggcactaagaaagaaaatcgaagaatcaaaatgataaacttgacagttcactcgagaatgtaacaagaagaaataggagggagatagtattgcgccagatgcggcggagaggaaagagagagagattagaaaatagtaatgtttttggtaggtaatgattgaggaggccctaaacgggaaaccctcctttaaatacagagtgtatcaaaacccttacataaaacgcaacacttgaattaaaagacaacaatattaaagtgaaccctctttctccttcagtgtctcttgtgcactctagccactcttgagtatcttcttcagaagcttctcccagactcttgccttcttccctccagctctcagtcttcttctcatacaagctaggggaatcatgagtcttctaagagtatctatttgagctgctagcatttccctaatgagcttctctatctcatttttctgttcataagagtatctataaggtctcaagttgattggtgaggtacctttttccaatgtaatcgcatgttccctgtttctcttgggaggcaaggcctgtggcatttaaaaaacagtctggtgttgatccagaacacgttgcagaaccggcgtcacttcctttggtttctgctgttcatcactctcaaacagtgtagccaattccagcaaataggcttcatctgcatgtttgatctccttttccatggtgcggaatgatacttgttctctgcacaactccgggtctccatggatagtcacccacgtgcgcccaatctgccagctgagtctcaatcttccccaattcgctcttgtttcacccaacttagcaagccaagcaaaccctaacactatgtctagatctcccaagtcaaagagcaggaaatcctccatgattcgataccttgaatctccagaggtaccttaacacacatgcctctgcctttaatcactctacctcctcccactttaacgcagaaccctctagtctcagtactcggccagcccctttcatgaaccaagctctcatctataaagttactagtagcgcccgaatctaccaacaccaccactttagctcttcccacatagcctttgagcttcatagacctttctctttcaacatcaaatagtgatcccaatgtatgagtcgccaaggtttcttcttcagcttgctcttcttcatcattctgctctacatattcttcttcaggtgggtcttcctggtcctcttcaccagcagttaccaaacttttcaacctttgctgcttgcagtgatggccagggaaccatctatcgccacagttcctgcagggattggtgttctttggttctccacttcctgaagcacggttcaggtcgttactgggatcatatggacgtttagactgcgtcctctccattgctctggatccggatggcgtttggctagctgagaacgatggtctctgttggggtctaacttgataactttggttagtcctctcctgtgcttcaataagtcttgctatctccacaatgtcattcaagttgacaggacgacatctgaccacctggtctttaagacttctcttcaatccattcaagaacgctgactccactatgtcaatagggacatgaggcaactccaccaaaagctcttcgaatctgcctcgatactcatcgacagtgcttgtctgtctaatgttcagcaagtgatccaccactgagcttcctctgctcggtctgaaccttattttaaacttgtcttggaagtccttccatgtgtaaatcccttctctttctttagcacatctccaccacgttacagctggaccagtcaaacaagatatcaccttttcgagcttgatgtcttctggtgtgttatgagttaagaaacactgctccacgcggaaaatccagtcatctaggttttctcctttgtacagcggtagctcgaggggtctcaccggagcctcgtgcctctgtctcggtgaataaccctgttgttccaacgctggcggtaggaaacgagtctccacttgtctcatttgcaggttctggagtcgggaaaggcagaatagcctctctgtttccacgctcggagtttggaggtggtgtcgcttggaaagctgggccaggagaaggactagcgaacgcagctggtaagtttccttgaccttcacgaggtggaccaaagatctggttccttaagatctgggttaaagcttcccttatgtaaaggagctctttttccaccatttctactctgttatccagcggcggtaaggttgcagcgggagggttacttggttctggtgatcctgactgagaatcttcaccggcggccattgtgtttatgggggactctaacaactgaaagcaccaatgataaacttgacagttaactcgagagtgtaacaagaagaaataggagggagatagtattgcgccagatgcggccgagaggaaagagagagagattagaaaatagtaatgtttttggtaggtaatgattgaggaggccctaaacgggaaaccctcctttaaatacagagtgtatcaaaacccttacataaaacgcaacacttgaattaaaagacaacaatattaaagtgaaccctctttctccttcagtgtctcttgtgcactctagccactcttgagtatcttcttcagaagcttctcccagactcttgccttcttccctccagctctcagtcttcttctcatacaagctaggggaatcctgagtctatcacaaaactagtgaagaaatttcttaagagtcttcctcgaaaaaaattcattcacatagttccatcaatcttaacactaacatgttcgaggatattttaggacgactgaaagtttatgaagagtgagtcatagaagaagaagaaccgcaagaagatcaaggcaagcttctatactcaaaccaggattatcaatcgaatcaagaatacaacagaggaagaggtcgcagaggacggaacagaggtagaggttgtggaggacgttttaacaatggtggaagagatacatcaaaagtaacgtgttatcgatgtgataagttaggtcactacgcctctaattgtcctgactaattacttaagttgcaagaagctctagaaacagagaacagtgacacccgagaagccgatgaccttatgatgcatgaagtagtgtacttgaatgaaaagaattgcgtgccgagcaagtatgagaagaacacagtggatgagtacatttgttaccttgataatggagatagcaaccacatgataggggatcgaagatacttcaataaaattgatagctctatcacaggaaaggtcagatttggtgatgactcatgcattgatattaagggaaagggctcaatctcgttcattgatatcaatggtaaagcaaggatcatgatcatgacttgaagagtaacattatcagtttgggacaggctacagaatcagggtgtgacataagaatgagaggagatcacttaacaatgcacgattacgagggtaaacttctcgtcaaagaagacagatcaagagatcggctttacaaagtgcatatgaggatgatgaatacggctgcatctctaaacctttcaaagataagcgagagtagcaggtagcatgctagaatggggcatataaatttcgatacaataaagtcaatgatacaaagaaagcttgttaatggagtatcatgtgtcgagatacaaaaggaaatatgcatctcgtgcttactcggaaagcaaacttggagagtattcccgcaagcaacgttatatcgaacaactcaagttctagagttaattcacttagacctttgtggtcctacaacaccgagtactacagctggaaataagtacgtctttgtcctcatatatgatcactctcgatatatgtggacaatactattgaaagaaatgggagaagcctttgagaggttcaagaaatttaaacaatcggtggaaaaagacttagaagttaccataaaaacatttaaaactgatagaggaaaagagttcttatcacaagatttcaatagtttttgcaaagatgttggtatacaagggcatctcacggcaccctacacaccacaacagaacggtgtggttgaaagatgtaatagaacactaatggagatggctcggagtgttccaaaacatgtaaaatgcacacttatcaactcccccaaatttagtatttgcttgccataaagcaaacaattaagaacaagctggaggtgaggtttgaaagcggagactcagagccaaagcaccagataaattagatgaaatcaatgttcaagttggtagttctaagctgcgatatgatcgaattctacttaaaacgttagccatgccttgttatcaatcaatccgactcttatgctctacctacacatgttttcaaatctaccaatctctttaacattcattagttctagaacgtgaatcaagcaatgcatcatcaatgaactcatttggttaaggtaaaggtcaagagacaaagatgatcccttacagaataggcttcagtaacaggggatctctaaaaaatgattaagctttagtagaatgctaaaggtaagtccgaagctatgcatacagagataagatcccatctacccagagtataacaaatgaagctctaatggtaatcccatctccaatcccaatataagaacttaactctactctttgcattcatgaatcttttaagacatttttctaatcattcttttcttttctcttaactctaggagaagctttctcaacactgatacatctagcgaatttggatttctttaacaactaagggttcctgtttttaaaatttaaaattaagggcttttgcccttcttcattagctaacaagaactcttttctttacaaatcccaaaacatttattagactttttctgcttctttagcttacttcacctagagtcttttaccttttttatcaatgaatcaacccttttttttttttagacacatcccaacccaaagtataagcgcttacctagtcctatctagtccagaaaatgcgatgtagaactacatgagacactatctctgtcgttacaaacctaacactttctaccaatctaaatcggaataaaacctcacaaacactcacaagtgatatagggcttgaaagaaagtttatgtttgggttcgggttaactgatctaataacgagagtcagttacttggattaacaagagtgatcaaaatgaataagaatgcaacacacacttcctgagccctcccccaaacttaaatcacacagtccactgtgtgactaaacttggaagagagtactcaggacaaatcaaatcacagaaacaaaataaagaacaaatcacaagagatgatataatacaatggagaagtgaggcgcttacctcagtcgaagaatgaacgaagttggtcgtcaatggttgcatgtgattgctccgaggccatagaagaatcgccctgttctgtatcagctctagcatgtgggtactcgatctcatcagctctgtggcggccagcaccgcttgaggatactcgacctctcttcttctaccgcggtcgcgtaaactacgagattgcagaagtcgtctgttcctgctgctagatcgagtaagtttggtcctcctctttctcccaaattcacgaggctcgaatgatgaatgcctcgcagggacatgcataatctcttgctcagtaggctcaggcctgcgccgacttgtctcaggcgcatcatatctcctcgagggcatgtcctgagggagctgtccatgcggaatagctgtagtggtagaggagcagcttagcttgtccttcagaaacttgatagctttgaggcacttggcaagtaacttatcatgtttcttacaccacttctgcaacttgttgttgttcctgtgagcttcactcaaactcttgctttccctcgctggaggtacatgctcactgaaatgagacatgctcgtgtcaaactccgcttcatctatttcatctgtctcatcaacttcttctattgtagctccttccgtgtgactgatctcctcagttggcggactgcccttgaaataaagatcttcaagcgtaggctagaagtcaatattcctgccctcgagaatcctggtagcgtcaatgtaggggagaaaaatgttggcgattctgatcgatgaatgcttgaacctgtagctgtggaagttgccaaccatgtcatgctccaagaactcacatcggcgtaaatgatccaaatctatcattctcggctctaacccctgtttcttgagcggtactccacaagcttcgagaatcggcgtcacaacgccacctacgcatagtgttcctctcactttcttcttgcagtttgtcaacgcccatttcctgtatccacacaggtggatcaacagaagcattactggtggcgcgtcattgagatcacctctcaggaccttctttccctttgtacggtggagaatgcttgtaagtgcggaatctatc

SEQ ID NO: 538 - DNA, 94905 bp, Arabidopsis thaliana
gaattctccaccgttcgatcgagtaatgcgtaattctagaagatgcttgatcctttactcgagcttgaattatttggagaccaaggagtgaagttgtgtgaccccacttattcccccaacactcctttactcgatggacaaagaaattacccatgctcctcaccatttccaatcaacgtttctatctcttccaaaaacaaaccaaagaccattctcctccacccattgaattgaattcgccaaacccttttgaaactctctctttcatcatctcatttttgcaattctctatctctcacaaagcttcaaaagtttcatcccaaactctccctatcactcttcaagaattcgttctcaccttcaccaatacttcaccaaagttactcgatcactcccaagtctatcctcacacatttaatcggttttaagcacaaaatttcatcaccaaagaaaccgaatccattccactttgataccccttggagagttgttcttgtttgccctgttgaagctcaccaccaatctccatggattcaaggagaaagagttcatctcggggtagaagatcctccgttgataacgaagaagttgaggcgtttgacatgagtggcatgactgaacgccaaatttgccaagatcgttgtgctcaaagatcaagcttgattctaggtggaagctcaagccgctcagccatgttaagagaagaagtagctcggggaaagagggttgttgaggttgaggaagtacaccgtgaagaggcagtcttcgaagaagcggtcatgaggaagaggttgagatcatcggggatgatacactagccccggttggcaaaagaaaccgaccaaggaggaagagagagccaaccccaagtgagtactatcaatacttgaaggagttaaagtttgagcttggtatttgtggtgatgtggaatacttcatggaattggccaatcttgcaacgttcatgagctgccaatgtggaggatttaaagaggagagctgccaactcctttcaaccctcaaggttcacttttgtgttgatgattcggagaaagaagaaagaggagggcttggttacataaatttcaaggttgggggtgtcgagcttgatattagccaccttgataccatttttgggtttccaagtggagaaagaatccgccaagactatgaccaagatgagataaaatctctttggacaacaattgccggtccaaagccctactcgcccgccaagagcaagagttcttcaattcgaagtctcgtgattagatacctccaccaatgtatcgccattacccttttcccaaagaagactaccagattcgtttatgaaggagagctattcatgattgctcaagctttggtcttcattctgagagagaccgaggatgggaggaagatggcgggtgatagagtagacacttcgttgactgtcgttcttttggaccacctactgagctatagagagtatgttgcaaccatccatctctcggggatttgcggaagtctttgtgttggtggtctcttaacaccaatcttaggagcttcaaggatacaatttggaacccctgacgtgttccccaagttcatcgacctcaactatctcaaggggaaggattttcttgaaaagaagactccggcggatcattatatcttcaagttcaaccatccaaagcttggaccttctttgttacctctaccttgcgagaaccggacttcattgaagacaaggcacaacatcaacttcatgccatctccctcttccctgaacatcgacatcgaaggagctagagaagatgaacaagagtatactcaagctgactatgagcaacaagaatattatactcaagctgactatgagcagcaagtcgagttcgagcaacttagcgaacaaccggagcaagagaccaaagaattcaagcaagctcattatgaagcagatgctgatcaaggaggagatgagataactgaagtttacaagaagctccgtgtgcttgaagagcttgggaaccttcacagcaaaacgatgaagggtttcaagaagaagatgagaacaatgaagaaatcactaaagagtatggctagtcaaatcaaagacttctagagcaagccaaggccaccgtctcccacccccgaagtaagaagaagcggttccacaaggagggctgaaaggagggctgaaaggattgatcaaccccgagcttcatcactcgagcctcgggaagtgatctccgagttgagagagccaaggagtaggcagagacgaggttctacacgctcgaccaactactcgaccagacagaacgagcaaaatcctcccgcgtcaacatctgccccttcttatattctatagagtatggacgattaagttttcatctacttcacctgaccgctgaggtaacaccaccaccaccattgtacataccatagcatttttatttttctatgtgtgttttgtgttttggtcttgaattctttctccgatttttattacacaagggactgtgtaatttaagtttcattttaggattgtatacagagtgtttgcatttaggattgctaatttgcataggggataatgatgatttcaaaccgttaagtatgttttgattcaatgaagtaagttcaatgccgaggttgttagttttcttttgcataaccgattggttctctgaagtaagaccgctccctgctttgaatttacaacttgactatactgctttgattcgaaactcgcttatctgatgtcattccctatctattagaacctgaactaaatttgcaattatcatgtatatgcattgtttgtgaactcatggctaccatatacatacttggattatcttattcacttcaccaccctttggtaatccaagtagttgactctcatttttagagcagtttccaataccttgagcctagcctaatttcaagctaaagatcatttgtgtgtgattgtgaggtctttttcgattgagcttggtataacgtgttaggtatgagccgacaagaccagtctttcatgtagacctagccgacgctttttgagttagctaggactaggtggtgacttgtatttgggattgggatgatgtatggaatgattggaaaagagaatgggaatgaaaaaaaaagaaaaaaaaaagagagtaaaagtttagagttcttaagggggatacaaaaagtgttagtgtagtaaagggtttggaattcaaagaagttaggcattgtaattcaaagaaaagggtaaacgccctatatgctaagattagaagaaaagccttaagtgtgtcaaagtttaaaaccaaacccgctagactcttgaatcgttttaaagaagaaccccttacaacttgaaccaaaaagagaaagaatgagaaaaagggtagagttaggacacctataggactgggatcatcttctgagctatcatacgatatcattgggtagatgggagtctattcttgtatgtttccattggattttacctttagcattctactaaagctcaatcttttctctgagtgtctcctgttactcgaccaatcattagaggaaccatttttgtctcttagcctaagcctgaaaccaattgagttcataaccattgcattgcttgatccattgttcgtgcttaatgaatgttaaagggaattggttaaggcaggttgttaggttgcattgtgacgagtatggctaaagtttttaagtaagggtctatcatcttgcaacctagaattagctacctgaacatttagcttaccagttctatatgcatgcttcggtttttgaatccccaccttcaaacctcttcttcaatttaagattttttgtttgcttgagggcaagcaagagataagtttgggggagttgataacactgtaatttactcattttaggtgtgtatttatcatcatttagcttagtgatcactcattatatcaaatcattttgcatcacatttagcttattttgcacacttaggcaattaggatcatcttgcatacatattgcatgttttggtgtgttttcaggtgcagaaagagcttacaaggcattctactcgaccctctactctatcaaaccaggagggaagcataagagcattctactcgaccggtttactcgatctaggcagccatggaggaggcagcagactttactcgaccctccttctcaatcctctaatcgaccagtttactcgagcaagggcaacctactctacaagacttgttgatcattcaaagcgtcttctgattctcctgattcccaacaagacatttgagcataagaataggagaggaagaagcaactacttgaccaattgatcactcggagcatggacacaaaggcgcagactttgcagcaccctctttactcgatccccaagatcgagcactcgcccaaacatcctcaagtctcttgtcttctagtaaatctagggttttcaatactttagtataaatagatcactttgggatttgtccaaaggatctagcttttatctcttagtttttctttgtgttcttgaatcttcaaaacttaattactcttaatctatttcgtttttgcatttggttctttaagtaatgtcgtttagcttgtttagatctacattttgatatgatttcaataatttctgggtttgtgttcttgagtatgttgcttgagtagtgattagggttcttgaggatgaataagattagggtaatctctaggttagtcaggtggttaagattaggttagatcccttctggattcgttggcccctatgcggttttcgctggctaatgtagacattcgaccataggtatccagcgtccaaaagacgttcaaatggattccggatctacgaataccagagatttgtagactctagacaaggagtttggctagactgcttattgaatttggttgattggttctaaaccctgttttgctatgtttcatcaacgaaagttgagattaggaagttgtagagttacgggggtctcggtcacgagaatggattgacccggtttctgaatctatcgtctagggtatctccctttcacctgttagccacctcatgaaccctaaagttgctcttatcaatgaatccatccttaggacttctattgttcttagatttatatgtattcaccccctgattgcactttgatttacctgtaatttgtgtcacctgttgattgcattttagttcttaaatttgttgcctattggtattactcgacccaatgatcgagtagggcttttaagttcatatttttgcttgtttgaatcctcacctaggattgttactagaaaccaatcatttctataatttggcttgacttagttgattctgtacaaattttgatagctagcaataacagtggactggattgacaccccctatagctgcatcgacatgttagtgtttaaagggaattgaactgaacacaccacacttctgcaaataactaggcataaaaacctagttatcacggactttggctacactatcaaagcttcgaaaagcaataagaagcttggttaatatttcagagtcaaatatgactagatgtcatgtgtatgattgagtataagaactaaaaccgcaactggtttccataagctaaactagtggttccttattagaagatacaatgccaaagactcatacggacttcggctacaccatcaaagctttgagaagcaataaaaagcttggttagtgtttcagagtcaaatatgacgatatgtcctgtgtatggttgagtataagaactagaatctcaactggatcttgaaagcctaagtagtatctccttgtcagaagatacaacgcaaaagactcatacaaagttcggctacaccatcaaagctttgagaagcaagaagaagctttcttagtgttttggagacaaatatgactagatgtcaagtgtatgattgagtataaaaactagaaccgcaaccggttccgaaaagctaaagtaatgcttccttgttagaagatacaaagccaaagactcatacggacttcggctacaccatcaaagcttggaaaagcaataagaagcttggttagtattttggactcaaatatgactagatgtcatgtgtatgattgagtataagaactaaaaccgcaactggtttccataagcagaagtagtggttccttattagaagatacaaagccaaagactcatacggacttcggctccaccatcaaagctttgagaagcaataaaaagcttggttcgtgtttcagagtcaaatatgactacatgtcatgtgtacgattaagtataagaactggaatctcaactagatcttgaaagcttaagtagtatctccttgttagaagatacaaagcaaaagattcatacggcgtttggctacaccatcaaagctttgagaagcaataagaagcttggttagtgttttggagtgaaatatgaatagatgtcatttgtatgatgagtataagaactagaaccgcaatcggttcccaatagctaaagtagtgtttccttgttagaagatacaaagccaaagactcatacggacttcggctacacaatcaaagcttggaaaagcaataagaagcttggttagtattttggagtcaaatctgactagatgttatgtgtatgattgagtataagaactaaaaccgcaactggtttccataagctaaagtagtggttccttactagaagatacaaagccaaagactcatacggacttcggctaacccatgaaagctttgagaagctattaaaaagcttggttattgtttcagagtcaaatatgactacatgtcatgtgtatgattgagtataagaactagaatatcaacttgatcttgaaagcctaagtagtatctccttgttagaagatacaaagcaaaagactcatacagagttcgactacaccatcaaagctttgagaagcaataagaagcttggttagtgttttggagacaaatatgaatagatgtcatttgtatgattgagtataagaactagaaccggaaccggttcccaaaagctaaagtagtatttccttgttagaagatacatagccaaagactcatacggagttcagttacaccaataaagtttggaaaagcaataagaagcttggttagtattttggagtcaaatatgactagatgtaatgtgtatgattgagtataagaactagaactgcaactggttcctaaaagctaaagtagtggttccttattagaagatacaatgccaaacactcatacgaacttcggctacactatcaaagctttgagaagcaataaaaagcttggttagtgtttcagagtcaaatatgactatatgtcatgtgtatgattgagtataagaactagaatctcaactagatcttgaaagcctaagtagtatctccttgttagaagatacaaagcaaaagactcatacggagttcggctacaccatcaaagcgttgagaagcaagaagaagatttgttagtgtttcggagacaaatatgactagatgtcatgtctatgattgagtataaggactagaaccacaaccagttccaaaaagctaaagtagtgcttccttgttagaagatacaaagcaaaagactcatacagacttcggctacaccatcaaagcttggaaaagcaataagaagcttggttagtattttggagtcaaatatgactagatgtcatgagtatgatcgaatataagaactaaaaccgcaactagtttccataagctaaattagtggttccttattagaagatacaaagccaaagactcatatggacttcagctacaccattaaagctttcagaagcaataataagcttggttaatgtttcatagtcaaatatgactacatgtcatgtgtatgattgagtataagaactagaatctcaactggatcttgaaagcctaaataatatctccttgttagaagatacaaagcaaaagattcatacagagttcagctacaccatcaaatctttgagaagcaataagaagcttggttagttttttggagtcaaatatgaatagatgtcatttgtatgattgagtataagaactagaaccggaaccggtcccaaaacctaaagtattgtttccttgttagaagatacaaagcaaaagactcatacggacttcggctacaccatcaaagcttggaaaagcaataagaagcttggttagtattttggagtcaaatatgactatatgtcatgtgtttgattgagtataagaactacaaccgtaattggattccataagctaacgtagtggttccttattagaaaatacaaagccaaagactcatacggacttcggctacactattaaagctttgagaagctataaaaaagcttggttattgtttaagagtcaaatatgactacatatcatgtgtatgattgaatataagaactagaatctcaactggatcttgaaagcctaagtagtatctccttgttagaaggtacaaagcaaaagactcatatagagttcggctacaccatcaaagctttgagaagcaataagaagcttggttagtgttttggagtgaaatatgaatagatgtcatttgtatgattgagtattagaactagaaccgcaaccggttcccaaaagctaaagtagtatttccttgttagaagatacaaagccaaagactcatacggacttcggttacaccaataaagttaggaaaagcaaaaagaagcttggttagtattttggagtcaaatatgactagatgtcatgtgtatgatggagtataagaactagaaccgcaactggtttccaaaagctaaagtagtggttccttattagaagatacaacgcctaagactcatacggacttcggctacactatcaaagctttgagaagcaataaaaagcttggttagtgtttcagagtcaaatatgactatatgtcatgtgtatgattgagtataagaactagaatctcaactggatcttgaaagcctaagtagtatctccttgttagaagatacaaagcaatagactcatacggagtttggtacaccatcaaagctttgagaagcaagaggaagttttgttagtgtcttgggacaaatatgacgagatttcatgtgtatgattgagtataaggactagaaccgcaaccggttccgaaaagctaaagtattgcttccttgttagaggaaacaaagccaaagactcatacggacttctgctacaccatcaaagctttgaaaagcaaaaagaagcttggttagtattttggagtcaaatatgactagatgtcatgtgtaattttgagtataagaactaaaaccgcaattggtttccataagctaaagtagtggttccgtattagaagatacaaagccagagactcatatggacttcggctacaccatcaaatctttgagaagctataaaaaagcttggttattgtttcatagtcaaatatgactacatgtcatgtgtttgagtgagtataagaaatagaatcttaactggatcttgaaagcctaagtagtatctccttgttagaagatacaaagcaaaagactcatatagagttcggctacaccatcaaagctttgagaagcaaaaataagcttggttagtattttggagtcaaatatgactagatgtcatgtgtatgatggagtataagaactagaaccgcaactggtttacaaaagctaaagtagtggttccttattagaagatacaaagcctaagactcatacggacttcggctacaccatcaaagctttgagaagcaataaaaagcttggttagtgtttcagagtcaaatatgactatatgtcatgtgtatgattgagtattagaactagaatcttaactggatctggaaagcctaagtagtatctccttgttagaagatacaaagcaaaagactcatacggagtttggtacaccatcaaagctttgagaagcaggaggaagttttgttagtgtcttgggacaaatatgacgagatgtcatgtgtatgattgagtataaggaatagaaccgcaaccggttccgaaaagctaaagtattgcttcgttgttaaaggatacaaagccaaagactcatacggacttctgctacaccatcaaagctttgaaaagcaaaaagaagcttggttagtattttggagtcaaatatgactagatgtcatgtgtattattgagtataagaactaaaaccgcaattggtttccataagctaaagtagtggttccgtattagaagatacaaagccagagactcatattgacttcggctacaccaacaaatctttgagaagctataaaaaagctggttattgtttcagagtcaaatatgacgacatgtcatgtgtttgagtgagtataagaagtagaatcttaactagatcttgaaagcctaagtagtatctccttgttagaagatacaaagcaaaagactcatatagagttcggctacaccatcaaagctttgagaagcaataagaagcttggttagtgttttggagtcaaatatgagtagatgtcatttatatgattgagtataagaactagaaccgcaaccaattcccaaaagctaaagtagtatttccttgttagaagatacatagccaaagactcaaacggacttcggttacaccaataaagtttggaaaagcaataagaagcttggttagtattttggagtcaaatatgactagatgtcatgtgtatcattgaatataagaactaaaaccgcaactagtttccataagctaaagtagtggttccttattagaagatacaaagccaaagactcatacgaacttcagctacaccatcaaagctttgagaagcaataaaaagcttggttaatgtttcagagtgaaatatgactacatgtcatgtgtatgattgagtataagaactagaatctcaactggatcttgaaagcctaaatagtatctccttgtaagaagatacaaagcaaaagattcatacagagttcggctacaccattaaatctttgagaagcaataagaaggttggttagttttttggagtcaaatatgaatagatgtcatttgtatgattgagtataagaactagaaccggaaccggtcccaaaacctaaagtattgtttccttgttagaaagcaaaagactcatacgaacttcggctacaccatcaaagcttagaaacgcaataagaagcttggttagtattttggagtcaaatataactatatgtcatgtgtatgattgtgtataggaactacaaccgtaattggattccgtaagctaaagtagtggttccttattaggagatacaaagccaaagactcatacggacttcggctacactaagctaaagtagtggttccttattaggagatacaaagccaaagactcatacggacttcggctacactatcaaagctttgagaagctataaaatagcttggttattgtttaagagtcaaatatgactacatatcatgtgtatgattgaatataagaactagaatctcaactggatcttgaaagcctaagtagtatctccttgttagaaggtacaaagcaaaagactcatatagagttcggctacaccatcaaagctttgagaagcaataagaagcttggttagtgttttggagtgaaatatgaatagatgtcatttgtatgattgagtattagaactagaaccgcaaccagttcccaaaagctaaagtaatatttccttgttagaagatacaaagccaaagactcatatggacttcggttacaccaataaagttaggaaaagcaaaaagaagcttggttagtattttggagtcaaatatgactagatgtcatgtctatgatggagtataagaactagaaccgcaactggtttccaaaagctaaagtagtggttccttattagaagatacaaagcctaagactcatacggacttcggctacaccatcaaagctttgagaagcaataaaaagcttggttagtgtttcagagtcaaatatgactatatgtcatgtgtatgattgagtataggaactagaaccgcagccgattcctaaaagctagagtaatgtttccttgttagaagatacaaagccaaagagtcttacggagtttggtacaccatcaaggctttgagaagcaagaggaagtttaagaactagaactgcaaccagtttccaaaagctaaattaatggttttcggctaaagatacggatttttggctacaccatcaaagctttgaaaagcaataaaaagcttgcttagtgttttagcgtaaaatataactatatgtcaagtgtataattgagtataagaactagaatctaacttggatcttgaaagcttaagtaatgtttccttgttagaagatacaaagccaaagactcgtacggacttcggcttcaccatcaaagctttgagaagcaataagaagcttgataggtgttgtggagtcaaatatgactatatgtcatgtgtatgattgagtataagaactagaaccgcaaccggttcccaaaagctaaagtaatgtttccttgttagaaaatacaaagccaaagactcttacggatttcggctacaccatcaaagctttgagaagcaataagaagcttggttagttttttggactcaaatatgactagatgtcatgtgttcgattgagtataagaactagaaccgcaacaggttcccaatagctaaagtagtgtttccaagttagaagatacaaagcaaaagactcatacggacttcggctataccatcaaagtttatgagcaataagaagattggttagtgttttggagttaaatatgactagatgtcatgtgtacgattgagtttaacagctaggactgcaactggttcccaaaagctaaagtagtgttttcttgttagaagatacaaagccaaagacgcatacggacttcggctacaccatcaaatttttgagaagcaataaggatcttggttagttttttggagtcaaatatgactagatgtcatgtgtatgattgagtataagaactagaaccgcaaacggttccaaaagctaaagtagtgtttccttgttagacgatacgaagacaatgactcatacggacttcggcttcaccatcaaagctttgagaagcaggaagaatcttggttagtgtatgggagtcaaacatgactagatgtcatgtatatgatttagtataagaactagaacatgaatctgttcccaaaagcaaaaataatgttttcttgttagtataccatcaaagtgtatgagcaataagaagcttggttagtgttttggagttaaatatgactagatatcatctgtatgattgagtataaggaaacagtactactttagcttttaggaactaattgtggttctagttcttatatagaatcatagacatgacatctagtcatatttgactccaaaacactaaccaggctttttattgcttttcaaagatttgatggtgtagccgaaatccgtatgagtctttggctttgtatctttaacaaggaaccactactttagcttttgagaaccgattgcggttctatttcttatactcagtcatacacaggacatctagttatatttgactccaaaacactaaccaaccttcttattttttctcagagctttgatgggtagccgttcgtatgagtctcatggtttgtattttctaacaaggaaacagtactactttagcttttcgtaaccgattgcggttctagttcttatatagaatcatacatatgacctctagccatatttgactccaaaacactaacaaagattctattgcttctaaaagctttgatggtgtagcagaagtacgtatgagtctttggctttgtatcttctaacttggaaacactactttagcctttgggaaccagttgcgattctatttctgttactcaatcgaacacatgacatctagtcatatttgactccaaaagaccaaccaagcttcttattgcttctcaaagctttgatggtgtagccaaaatccgtaagactctttggctttgtatcttctaacaaggaaacattactctagcttttaggaatcggctgcggttctagttcctatactcaatcatacacatgacatctagtcatatttgactccaaaacactaactaagcttcttattgcttctcaaagctttaatggtgtagccgaagtcagtatgagtctttggctttgtatcttttagaagggaaactctactttagcttttgggaaccgattgcggttctagttcttatactcaatcatacacatgacatctagtcatatttgactccaaaaccctaaccaaacttttaattgcttttcaaagatttgatggtgtaaccgaagtccgtatgaagcttttgttttgtatcgctaacatggaaccactacttgagcttttgggaaccggttgcagttcaagttcttatactctgtcatacacatgacatctggtcgtatttaactctcagacactaaccaagcttcttattgcttctcaaagttatgatggtgtagccattcgtatggttctttgggtttgtatcttctaacaaggaaactctattttagcttttgggaaccagttgcagttctagttcctctactcaatcatacacatgacatctagttttattttattccaaaacgctaaccaagcttcttattgtttctcaaagaattgatggtgtagccgaagtccgtatgactctttggatttgtatcttctaacaaggaaacattactttagctttttggaaccactacaagaatatggattatttatagcactataatatagcagttaaccatgttgtgctataatttataaccggctaaacttttatagcgtttggtaatttcacaacgctataatctcgtacccggtaaataaaaaatgacgcgggtcatgtttttgaatttagggttattgttctatagcattaccattaattaaacgctacctaatgtaatagcgcggattaattttgttgccgccgaaacaaaaaaattagcctaaaaatattctaagtgaaaaaactatttgtgttctttctcgactgtttccctccctattcgtgttcttccctattcatgttctgctctaatcgattcttcttctctctgtctcactttgtgttcgtgttcttgctcaacgactctattcaatctctcttgacgactctcgctactccttagcttctcagtcacagatctgtttctaatttgagaaggttatgtgccttttctaatcgatttagggattgcatgtccaaattctcttgtttgagcatcgatttggggttttaatcagttttagggtttcgttttcaggttctcagaagcttttggtagccgtgtctcgaagatttcaatggtttctatttgacaggtatgttattttgacttagtttgaatagatttctgtagttcttagtttgcatatatcgatttgagtttctttcagaattgaacttgaggattcacttgtattgatttgagtttctaatagaattgaacttgagtattcacttagcttgtatcgattttgaatgtcatatagctttgaacttgagtattcacttgtatcgatttgtgtttcttataaaattgaccttgagtattcacttgtatcgattttgaacttgagtattgattttgaatttgaacttgagtaataacacagaacttgaattgatagtgaacttgagtttatgaaatttctcattttgtctttgctctttgagttttgtttgcttatatagctgaatgctaatatatatatatatatatatataagtaatatcatatatatggggttggagcttggtggtcttttaaaaatggataagtcatgggtatggctgccaaggaatagcattgagtatgagaaaggagcaacaacttttgtttacgcatcatcgagaagtctgggagatcatgctgaaatgttttgtccatgtattgattgccggaatctgtgtcatcaaccaattgagactattttggagcatctagttattaagggaatggaccataaatacaagagaaatagttgttggagtaagcatggggagatacgagctgataagttagaagttgagcctagtagtactactagtgaatgtgaagcttatgagctgattagaacagtttattttgatggagacgtccattctgattctcagaatcagaatgaagatgatagtaaggagccagaaacaaaagaagaagctgattttagggagaagttaaaggaagctgaaactccactatatcatggctgtccgaagtacactaaggtgtctgcaattatggggctttaccgcatcaaagtgaagagtgggatgtcagagaattattttgatcaacttttgagcttagtgcacgacatactaccaggagagaatgtgctgccaacatcaacaaatgagatcactaagatcaaatgagcttagtgatcaaacatcctgaagatgtttggttttgggtatgatatcattcacgcctgtcagaatgattgcatcttatacagaaaggagtatgagctgagggatacttgtccaagatgcaatgcttccagatgggaaagggataaacacacaggtgaagagaagaaggggattccagctaaggtactgaggtattttccaatcaaggatagatttaagagaatgtttagatccaagaaaatggccgaggatctacggtggcatttcagtaatgctagtgatgatggtacaatgcgaaatcctgtagactctttggcttgggctcaagtgaatgataaatggccacaatttgctgctgaagctagaaacctgagattgggactttctactgatgggatgaatccgttctctattcaaaacactaagtatagcacctggccagttttgattgttaactacaacatggctccaacgatgtgtattaaaccaaggttagaaagacttccgctgtgtaataagaaagcaaatatagaatttagcctcgtaaaggcaattctatggttaatcgcaaaaaattaagaggttcggccgggagaaggcgcaaacttgagtacacggtcgccggacgccgagacgtccgggactgggtctcacagcccttggttctagttcttacactcaatcatacccattacatctagctataattgtctcctaaatattaaccaagcttcttcttgcttctcaaacctttgatggtgaagccaaaggctgtatgagtctttggctttgtattttctaacaaggaaacactactttagcatttgggatcatattgcggttcttgttcttatactcaatcatacacatgaaatctagtcatttttgactccaaagcactacccaagcttcttcttgcttcactaagctttgatggtgtagccgaagtccgtatgtgtgttccgctttgtattttctaacaaggaaacacttcttggggttttatgatccggttgcggttctagtgcttatactcaatgatacacaaaacatctagtcatatttcactccaaaacagtaaccaagcttcttcttgcttctcaatgctttgacggtgttaccaaagtccgtgtgaatcttcgtctttgtatcttcaaacaaggaaatacaagtttagcttctgggatccggttgcagttctagttcttatactcaatcatacacatgacctctagtcatatttgaatccaaaacagtaaccaagcttcttcttgcttcttaaagatttgatggtgtagccgaagtcggtataagtctttggatttacatcttctaacaaggaaacatttgtttggcttttaagacccggttgtggttctagttcttatactcaaatttgactctcaaacactaaacaagcttcttcttgcttctcaatgctttgatggtgtagccgaagtctgtataagtctagggtttgtattttctaacaaggaaacactactttagctttttggatccgattgcagttctagttcttatactcaatcctacacatcacatctagttataattgactccttaacactaaccaagctttttcatgcttctcaaatctttgatggtgaagtagaagtttttatgagtctttggctttgtattttctaacaaggaaacactactttagcttttgggatcagtttgcggttctagttcttatactcaatcatcacatgacctctagtcatatttgactccaaaacactaaacaagcttcttcttgcttctcaatgctttgatggtgtagcctaactccgtatgaggttttggttttggatcttctaatagggaaacactactttagcttttgggatccggttgaagttctagttcttatactcaatcatccacattacatctagttataattgactcttaatcacaaaccaagctacttcatgcttctcaaagcattgatgatgaagctgaaggcagtatgagtctttggctttgtattttctaacaatgaaatacaactttagtttttggtatccggttgcggttctagttcttatactcaatcatacacatgacatctagtcatttttactccaaaaacactatccaagcttctgcttgcttctcaaagctttgatggtgttgccgaattcagtatgtgtctttgggtttgtatcttctaacaaggaaacacttcttaaggttttaagatccggttgcggttctagttcttatacataatgttacacatgagatctagtcatattagataccaaaacattaaccaagcttcttcttgcttctcaaagctttgatggcgtttccacattccgtgtgaatcttcggctttgtatcttctaacaaggaaacactaatttagcttttgggatcttgttgcggttctagttcttttactcaatcatacaaatgacatcaagttatatttgactcccaaacactaaacaagcttcttcttgcttctcactgctttgatggtgtagccgaagtccgtatgagtctttggctttgtctcttctaacaaggaaacactactttaccttttgggatccggttgcggttctaattctcatactcaattatacaaatgacatctagtcatatttgactccaagacacatactaagcttattctagcttctcaaacctttgatggtgtatcaaaagtttgtatgagtcttttgctttgtatcctccaacaaggaaacactacttaggcttttaagatccagttgtggttctacttcttatactcaatcatacacatgacatctagtcatatttgacacaaaaacactaaccaagcttcttcttgcttctcaaagatttgatggtgtagccgaagtcaatatctatgaatactaaccgtttgaagaggtaatacgaagagctgtgagattagctccagccttagtggttgagttggaaactaggatatcctcaagtgtgttggtttgctatctagattttttaatagtcggattaagtggaacctgcagcattcgtcaactagacaataatctaaagaaatatagatcatgattccaaagggtagagattttttaatagtcggattaagtggaacctgcagtttttggagatttgaaacacttattgacgaaattaggaggtgagtagctttgccgtttcggaggtggagcaaagggtagaggtgcggtgggagacgtggctgtagtgcctggagtatcatcactaaactcaacccgaaaactagctctaacaaagaactccggcttagccatctctatagatcgattctcaacaacgaatctggagcttgcttcatgtggacgcttggtgttgttgagtacctgttctgagacaaccattatctttgtcttgtcatcttaattctctggagcatcatctcgtagcatatcactctgaagagggggtgataacttatctatatcaaccggaggcaactgaagtagagtctcatccatgatacccatgcaatgcatctcaggaatctcatgcttagacactcaaggcagtagacaaggaacttgtggtgtgtagacttgtctagtgacaggtggagatgcaaggcatataggtggtgtctgagtccattgtcgatcgacactaggtgagtgtcgaacgacaccactgtctggaatcaatcatgctctgtcaaatgtcaacactggcctgtctgtttggtgttggtgtgatcgacatgaggtgggtgtcgttcgataccatcgagaattagtgcctcctctacgaaattatcgattccactcgacaaagtcaaaacagagtcgtcaagattaattggtgtcgatcgacaccctgatgtatcgattaacagtgagacatttcctacaactggaatagatgaagtccgagctgaactttcgcgctgaagtattggattgagttgctttccgctgcgtagtgtgactgcattgatagaggctaatggaggtgatagctcggagatatgagagcgtagattgtcaaacttgctatttatatatgtgtagagagaatcatgtttgctttcaagctttgtggagagagaatcatatttgctatcaacctttgtgaagcctgcaagaagctgcgtaaacatagactccattctggtctctgatgagggaggagggggggggggcttgggaaggagcagaaattgctgaaacaagagtctctttgcttgcggtgtcaaattcatgtgtcgaaagactagttaaagcattggtaatgaggagtaatgcttcactagtagttcttgtcatgaagttacagtagcttgctgcatcaagttgagtctggtatggcatgattatccctctttagaagatattgatgagttggctctcttggaaaccatgataaggacattctctctgataggatttgaatctgatccaagctgccttcaaaccttctgttggagcttgagaaaaagaagagatcttctcctgcagtaattttgtcactgaatcatcaaggaagtggatcatgaatgcattcttcgtgtcagtccaattggttagtgaacctggttctagctgtcgcagccataatgttcctctacccgcgagagaatgtgggaagagtttgcaaagaagataatcagctggtacacctgctgctttgattgaggacactaagtcttcgaagacttccagatgatctagtggtgattcattagaatgtcctcgaaactttcatcgtgaaacaagagtatagtaggcatggtgaatagcaaagtcttctcttgcaaaaggaggtaggcggatcgctgatagattggagtagaaaagatcaactctgttgaagtcacctatggtagctggtctgttctgtagatggtgaatagcaaagtcttctcttgcaaaaggaggtagctggatcgctgatagattggagtagaaaagatcagctctgttgaagtcgcctatggtagctggtttgttctgcagatggtgtcgatcgacacctagttggtgtcggtcgacactatcgtcgaaatctgccagcagtttgttgcgttccatcttttaactcccttgtcacaggaaaaagaagaaagaaaacgcgtgagaaacaaaataaagaaaaataaaagctagtctaaattctacacctagtctaatggtgaataaaagagaacttcggcaacggcgccaaatttgatataggtcaaattaatcttaagaccactctctcaaataaagaggtcggttgcagcacttagggattgaattcacaaagttctcggatcacgcaatagactaatggcaaatcgaattatgctaagtaaaacactaaataaaataaagggaaacaaaattaagcaatagcaatcgattggatggttgtaaaacaagataataaaagcgtcagccttagggaattttcaggaaatagatgatagtagatctagaaataactaaattgttatcgaaccgttctcaaactcaaactatgattttagagtaaccggtggcattccgcgaaactctctatacttagagctaagataaccggagaagccgagaaatcctaaactaaagcatgcattattatcaagtttgattagttcacctagtatctaaagaagagcccttctatgagcctacatgttctttcttaaatgcctatgttcatctatgatggatcaaataacaagtacctatggcgggcatacctattatctaatatcaagttctagttagctactctagaattaacattaagcataatcaagatgaagaatcctacagataacctaacaagggggcaatctactaaatcatctaaatccctaatgagaaaccctaaacctaacaagtggataacttagacatgatcaaagaaacacaaatcatagtctgaataagaaatcaatgatgaaaataacaagagaaaagagtaagaaagatccaaagggagtttctacagggttttgctcccaaagtacaaaagagatataaaatagcctctccaagcttaggtctaaaacaatgacctaaaaactatataaatgtctttaaaacgtgttgggccttaattaaacataggagaaagttctgggccgaatttgaaaatcttcaaaacatcaataagttgcgtctcaaatacgtgcgttttcgtctccagattgcttctgcagcttaagttgtcagttgatttctaggatgctccataatatccaaatgcatcccaaacatgtaaagacctgaaaaggattagaaaagactctagaaataacaaatagactctaaaacctaaacctaaaacataattaaaaacggtaaaaatagggatatatcaattaagaacaactaatccagaagggatctataaatcaaactcaaccacatagcatactgcgaattctaactactctaacccatcctcagaaacctagtcactactcagacatcattgcataaagcataaacgatgataagaatgaaaacatgatagcaattgagtaatagcaagatgataacagaatgcaaggtctccaagtgcaacaaaaagttttcaaaaattttgcactccactggattgtgtactcgatctctaggccttttgtagagtaaagtctttatgagtctttggttatgtattttctaacaaggaaacactactttagcttttgggatccgtttgcggttctatatcttatactcaatcatacacatgacatcgagtcatctttgactccaaaacactaaacaagctacttcttgcttctcaatgctttgatgatgtagccgaaggccgtatgagtttttggttttggatcttctaataaggaaacactactttagcttttgggatccggttgcggttctagttcttatactcaatcatacacattacatctagttataattgactcttaaacactaaccaagcttcttcatgcttttcaaagcattgatggtgaagccaaagtccgtgtgaatcttcggctttgtatcttctaaccaggaaacactaatttagcttttgggatcttattgcggctctagttctaatactcaatcacacacatgacatctagtcatatgtgacaccaaaacactaaccaagcttcttcttgcttctcatagatttgatggtgtagccgaagtccgtataagtctttggatctgcatcttctaacaaggaaatacttcttaggcttttaagatccacatgatggtgtagcggttctagttcttatactcaatcatacacatgacatcaagttttgtttgactcccaaacactaaacaagcttcttcttgcttctcaatgctttgatggtgtagccgaagttcgtatgagtctttggctttgtctcttctaactacgaaacattactttaccttttggaatccgatagcggttctaattattatactcaatcatacaaatgacatctagtcatatttgactccaagacaccaactaagcttcttctagcttctcaaacatttgatggtgtagcaaaagtttgtatgagtctttggctctgtatcctcgaacaaggaaacactactaaggttttaagatccacttgtggttctacttcttatactcaatcatacacatgacatctagtcatatttcacaccaaaacactaaccaagcttcttcttgcatctcaaagatttgatggtctagcgaaagtgcgtataagtctttggatttacatcttctaacaaggaaacatttgtttggcttttcagatctggttaaggttcttgttcgtatactcaatcatacacatgacatctagacaaatttcactctcaaacactaaacaagcttcttcttgcttctcatagatttgatggtgtagccgaagtccgtatgagtctttggctttgtctcttctaactacgaaacattactttaccttttggaatccgatagcggttcaagttcttatactcaatcatacacatgatatctagtcatatttgactccaaaacgctaaacaagcttcttcttgcttctcaatgctttgatggtgtagacgaagtccttatgagtttttggttttggatattcgaatagggaaacactacttttacttaaccttttgggatcttgttgcggttctagttcttatactcaatcatacacatgacatctagtcattttttactctaaaacactatccaagcttcttctttcttctcaaagctttgatggtgtaggcgaagtccgtatgtgtctttggctttgtatcttttaacaaggaaacacttcttaggcttttaagatccggttgcgcttctagttcttatactcaatgatacacatgacatctagtcatatttgacaccaaaacactaaccaaacttcttctcgcttctcaaagatttgatgatgtttccaaagtccgtgtgaatcttccgctttgtatcttctaacaagggtacactaattaagattttgggatccggttgcgattttagttcttataatcaatcatacacatgacctccagtcatatttgaatccaaaacagtaaccaagcttcgtcttgcttctcaaagatttgatggtgtagccgaagtccgtataagtctttggatatgcatcttctaacaaggaaacacttctttcgcttttaaaatccggttgcgattctagttcttatacttaaacatacacattacattgactcccaaacactaaacaagctcgttcttgctttttaatgctttcatggtgtagccgaagtccgtatgagtctttggctttatatcttctaacaagaaatctctacttaggattttaagttcttgttggggttctagttctaatataaaatcatacacatgacatcaagttattttcactcccaaacactaaacaagcttcttatttcttctcaatgctttgatggtgtagccgaagtccgtatgagtttttggctttgtctcttctaacaaggaaacactactttaccttttcggatccgattgcggttctaattcttatactctatcatacaaatgacatctagtcatatttgactccaagacaccaactaagcttcttctagcctctcaaacatttgatggtgtagaagaagtgtgagaccttgttgcgggacacgggcgttacaagaagtttgtatgagtctttggctttgactcctctaacaaggaaacactacatagacttttaagatccagttgtggttctacttcttatactcattcatacacatgacatctagtcatatttgacaccaaaaccctaaccaagcttcttcttgcttctcaaagttttgatggtgttgccatagtccgtgtgaatcttcgtctttgtatcttctaacaaggaaacactactttagcttttaggatcttgttgcgattctagttcttatactcaatcatacacatgacctctagtcatatctgaatccaaaacagtaaccaagcttcttcttacttctcaaagatttgatggtgtagccgaagtccgtataagtctttggatctgcatcttctaacaaggaaacatttctttggcttttaagatccgcttccggttctaattcttatactcaaacatacacatgacatctagacatatttgactcccaaacactaaacaagcttaatcttgcttctcaatgctttgatggtgtaaccgaagtctgtatgagtctttggctttgtatcttctaacaagataacactacttaggattttaagatcttgctgggcttctagttctaatattcaatcatacgcatgacatcaagttattgtgattcccaaacactaaacaagcttcttcttgcttctcaaagctttgatagtgttgccatagtccgtgtgaatcttcggcttcgtatcttctaacaagtaaacactactttagcttttgggatccagttgtggttctacttcttatactcaatcatacacatgacctctagtcatatatgaatccaaaacactaaccaagcttcttcttgcttctcatagatttgatggtgtagccgaagtccgtattagtctttggatatgcatcttctaacaaggaaacacgtctttcgcttttaagatccggttgcgattctagttcatatactcaaacatacacatgatatctagacatatttgactcccaaacactaaacaagcttgttcttgcttcttaatgctttcatggtgtagccgaagtccgtatgagtctaaggctttgtatcttttaacaagaaaacactaatttacattttgggatccttttgcggttctagttcttatactcaatcatacaaatgacatctagtcatatttgactccaagacaccaactaagcttcttcttgattctcaaacctttgatggtgtagaagaagtttgtatgagtctttgtctttgtatcctctaacaaggaaacactacttagccttttaagatccgtttgtagttctagttcttatacttactcatacaaatgacctgaagtcatagttgactccaaaacattaaccaaacttcttcttgcttctcaaagctttgttggtgtagccaaagtccgtatgagtctttgactttgtatcttctaacaaggatacactacttgggcttttaagatccggttgtggttctagttcttatactcaatcatacacatgacatcaaattatatttaactccaaaaaactaaccaagcttttttttttgcgtcttatagttttgatggtgtagcagaagtttgtatgaatctttggctttgtatcttaaacaagaaaacactacttaggcttttaagatcttgttgcggttctagttctcatactcaatcatacacatgagatcaagttatatttgactcccaaacactaaacaagcttcttcttgctgctcaattctttgatagtgtagccgaagtttgtatgagtctttggctttgtctcgtctaacaaggaaactctactttaccttttgggatccggttgcggttctaattcttatactcaatcatacaaatgacatctagtcatatttgactccaacacaccaactaagcttcttctagcttatcaaacctttaatggtgtaacagatgtttttatgagtctttggctttgtatcctctaataagaaaacactacttaggcttttaagatccagttgtggttctacttcttatactcaatcatacacatgccatctagtcatatttgacaccaaaacactaaccaaacttcttcttgcttctcaaagctttgatggtgttgcgaaagtcagtatgaatcttcggctttatatcttctaacaaggaaacactaatttagcttttgggatctggttgcgattctagttcttatacttaatcatacacatgaactctagtcatatttgaatccaaaacagtaaccaagcttcttctttgttctcaaatatttaatggtgtagccaaagtccatataagtctttggatctgcatcttctaacaaggaaacacttttttgtcttttaagatccggttgcggttttagttcttatactaaaacatacacatgacatcaagttatatttgactcccaaacactaaacaagcttcttcattgtctcaatgctttgatggtgtagccgaagtccgtatgagtctttggtttgtctcttctaacaaggaaacattactttacatttttgggtccttttgcggttctagttcttatactctatcatacaaatgacatctagtcatatttgactccaagacaccaactaagcttcgtcttgattctcaaacctttgatggtgtagcagaagtttctatgtgtctttgtctttgtatcctctaacaaggacacactatgataataggtttttctggtcaattatcctaaaacaccaatcatgtcgttgtagtattttaggtgtcaatccaaatgggtgtgatgcaaacagatgaaatgtgatcagaagtcactaagtcaagccaagcaataacagttttggggtttctaacagtcctaagcgaacatgtagaaaacagaagcaataacagaattactaaaatcactcgaccacaacaggctgatgccagaagtaggatgtggtcgagtaacaggtcgagtaacagacaagatatgaaacagctatactcgactgcacagtctgttgccagacactaggtgtggtcgagtatactggtcgagtaacagacaggaaacaagacaatcttactcgactgcacagtctgttgcaagacactgggtgtggtcgagtaagatggtccagtgattgtaaaaactaagaaacaggcaatgagaacgattaagcgataacgataaaacagagaaataagatagacgaaaaattcctaaggatggggtaatcgagtagagtggtatcctagcctatttgaatggttaataagcgcaatcaagctatccctagacaacaggttcaacaacagatcaattcactcccgtgatagaaatcctcaagcaaagctagcccaaactaattcccattaacggaatctaactatgcaggcaataagaactgactgataaagtcaataaacgctctaaacggcaaatcccttgggatagagacgcatatctcaggaactagtggatcaagcattccatcgaacaccttctgggtgcgggaatgcttgggatcgaattccaattgatcagaaagaaataagcagtaaacgcaactagtcctaaagggattcaatcaattctaaaacttaaccattctacagactacggattccacaactactctatcctatccctaagaattctaagtcactacttagacaacatgctcaaagacataaacgcagataaacgataatattgcataagtaaagagagaaagagtagagaaacaagatgacaaatgaaatcaaatgcggaatctgaataacttggaaaaatctcgaattacaggttgtaaaagcaaaagcggcgcagtagagtaaaacagaaaataaaactaaagcaaaaactcaatgtcgactagatgtctcaggacagaaccctaagacatctatttatacaaaacgaaataaaatgatagtagacgggccaataacctaatcgctcggcccatagagagataatgggccgagatgggcttcgtgatccgatggaagtccaggccgcttccaaacactttgtcttctcctcttctcttccttgtgctcagcttgtctggttgagtgcggatttgagtagactgtgaagacgtgatcgagtgtccggtcgagtgatgctgatggtggtgagtgatgatactcgaccagggggtcgagtaacttggtagagtgaatggtcgagtgatggtgatggtgtggcgaagtgatacttgaccgtggggtcgagtggtgtggtagagtgaacggtcgagtgttgtcaggtggtgtggtgaactgatactcgaccagggggtcgagtagtgtcatcgagtggcctgacctgaggttactcgacctggtggtcgagtggatgggaagaatggctccaaagtcactcgacctgggggtcgagtatgtgggaagaatggctccaaagtcactcgacctgggggtcgagtatgtcttcttgttctggctcgtttcttccaatttgcttgcaaacagctccaaatcacctgaaaaaaactcagaaatgcaatatgtatgcaaagctatcctaatcatgcaaagtatgcaaggatgatgagaaatgatataaaacagtgatgaatgatacgaaactggactcaaaacgatgatgaatggacattgaaaacatgcaaattatagatatatcaactctcccaaacttagtctttgcttgccctcaagcaaataagaagacatagttgaaggagaggagtgaaggcggggactcagaaccaaagcatatgatagagcaaataaaatcaatgtccaagttggtagttttaagatgcgatatgattgaatattactcaaaaacgttagtcatgccttgttatcaatcaatccgtctcttatactcgacctacacatgctttcaaatctaccaatccctttaacattcattagttctggaatgtgaatcaagcagtgcatcatgaatgaactcatttggctaaggtgaaggtcaagagacaaagatggtccctaacagaataggcttaagtaacaggggatccctcaagaatgattgagctttggtagaatgctaaaggtaagtcccaggttatgcatacaaagataagatcccatctacccagagtataacaatgaagttctaatggtaatcccaactcttgtcccaacttaactctaccctttgcactcatgaatctttcaaactctttttcatatcattcttttcttttctcttaactcaaggagaagctttctcaacgctctgatacatctagcgggtttggatttctttaacaactaaggttcctgtttttttttttctttaaaaccaaaggcttttaacccttcttctttagctaacaagaacctcattcttttctttaacattcccaaaacctttactagattttttttctaacttctttagcttacttcccctagaattctttccctttcctcatcaacaatgaattccctcttttcttttaaacacatcccaacccatgatataagcgcccacctagtcctatctagtccgaagaacgcgaactagaactacatgagacactatctctgtcgttacgaacctaacactttctaccaagctcaatcgaaataagacctcacaaacactcacaagtgatatagggcttgaaagaaagttcaggtttgggtatgggttaactgctctaataaggagagtcagctacttggatcaacaagagtggttaaaatgagtaagaaaatccaagtattttagggtatccatgagttcaaattcgatgccaagacatgataattctaaatcagattcaagttcaaattgatagggaatcatatcagatcctaacagtgtggtcgagtagagcaatctaggcatggtgcagttttacttcaatttcaatgacaacgcatcaaacaactaacaacgagggcactgagcttatctggtgaaccaaaatgcttacaaggctatctcatcattatcccctatgcatatgcaacaatcctaaacgaaacactctagactcaatcctaaatgcaatgcaactacatgaacactctatttttgtgaaaccattttctgaaatttttcaatttttttagtttttctatgccttagatgaatgcagactcaagattatatacaatgcaacacacacttcctgagccctcccccaaacttaaatcacacagtccactgtgtgactaaatttggaagagagtactcaggacaaaacacatcacaaaaacaaaataaaaacaagagatggtatattacagtggtggagtgaggtgcatacctcagtggaagaaggagcggagttggtcgtcaatagctgcctgtgattgctcccaggccatcgaagaatctccctgttgtgtctcagcttccccctgggggtactcgacttttgctccttcgtcgcggccagcaccgctatgatgatactcgacctctcttcttctgctgcggccagcaccgcggtcgcgtaagctacgggactggagaagtcgtgactacatcattcgctatactcgaccacatcgtcattcggtctctatagggtgtggtcgagtgatttcctggtgtgaagaagccagaacaatgtcgagtttgattgctctgtggtcgagtgtattgctgttccttcaaagccagaatctatttccagcaactcttcaaacttatctcctgaaaacactaacaagatgcatcaaaaacaacaaggaaaatgaaagatatgtacaaaggtaggcttgggacttcctcccaagtgagcttgttttaggtctctagcttgactcctcatactcattaggcgtttaaaggctcctccaaaggaacagaggttccttctggaataaactgatctatcatgtatttcttgagccgctggccattgactgtgaagtctccattctttccagctagagtgataacaccataaggttggactgcagtaacagagaaaggaccagaccatctagacttgagcttgcctggaaaaagcctcaggcgagagttgaacagcaacacttgatcaccaaccttaaaatctcttgagactatcttcttgtcatggaaagacttggtttgctccttgtagattttggaactctcataggcttctaagcgaatctcgttgagatcgttcagttggatcaaccgcttctcctcggcggttttaatgtcgaagttcaggagtttaactgcccacatggctttatactcgagttcaacagacaaataacaggattttccatagaggaggttgaaaggagtcgtgccaataggggtcttgaaggctgttctgtaagcccatagtgcgtcatcgagcttagcagaccaatctttccttgtacttctcactgttttctctaaaattgcttttatctctctgttggagatttccacctgcccgctcgtcagtggatgataaggagtggctaccttgtgctttactccatgcttcttcaaaaggttctaaaaaaccttgttgataaaatgtttccctccgtcactgatcacaattctcgggactccaaatctagggaagataattgtcttgaacagctttagcacaactctagcatcattggtgcggctggctatggcttccacccattttgatacatagtctactgcgaccagtatgtacttgttcccgtaagaagaaggaaacggacccataaaatcaattccccaaacgttaaagatctcaacttctaagatcggattctgaggcatctcattccttctactgatgttccctcttatttgacatgaatcacatttcgagataaattcctgagcatccttaaacattgatggccaccaaaaaccagcttgcaggattttcgacactgtcttgaacgttgcaaagtggccaccataggcagacccatggcaatgcaatagggtgccttcgatttcgtcttctgagacacatctcctgtagatcttatctttgcagagtgtgtagagataaggttcgtcccagtagaaatggttaatgtccttgaagaacttcttcttctcatagctcgacagattcggaggctcttcaccactaaccaagtagttgacgtgatcagcataccacagaagcttttcttcaattgcacatacttgatcgagtgatttccgaatttgagcactctcgttaagttgctgaattgccattagctgttcttctggcatggagtcgtcaatagggacctcgtcttcaatcctcatcctagacagatgatcagctacaccgttttcaattcccttcttatcaactatctccatatcaaactcttggaacaataagatccatctcaacagcctaggtttggtatccttcttcgcgtatatatgcctcagagcagcatgatcagtgtagactgtcactttagaacccactaggtagcttctaaatttttcaaatgcaaataccacagctagcagttccttctctgtagtggcataccttacttgtgcatcatccatcgttctgctcgcgtagtagatcacatgcagctttttatcaatccgctggcccaagactgctcctactgcgtaatctgaagcatcgcacatgatctcgaatgggaagtcccagtttggaccttggactattggtgcagtgatcaaagcttccttgattaacttaaaggctgtcaaacattcatcatcaaatgcaaactcggtttccttgcacagcagtctggtgagcggtcttgccaacttggagaaatccttgatgaatcttctgtaaaatcctgcatgtccaagaaaactcctgatgtctttgacagtttttggtggctgtaactgcatcatcacgtcaaccttagccttatcaacctctattccctcctcagaaattttgtggcccaaaacgatgccttctctaaccatgaaatggcatttctcccagttcagcaccatgtttgtctcttcacatcttttaagtaccctacacaggttcaacaaacacgaggagaaggaacagccatacacagaaaaatcatccatgaatacctctaccatctcctctatcaaatccgagaaaatagaagtcatacaccgctgaaaagtagctggtgcattacatagaccgaaaggcatacgcttgtaagcaaaggtcccataaggacaagtgaaagtggttttttcttggtcatttgggtgaatagggatttgaaaaaatccgctataaccatacaaaaagcaatagtaaggatggtttgctaatctttctagtatctgatcaatgaagggcaatgggaaatggtcttttctagaggcagcatttaacttcctatagtcaatacacatcctatgtccagttatagtcctagtgggtatcagttcatctttagaatttttaacaactgtcatacctccttttttaggaacgcaatgaactggagatacccaagtgctatcagagatagggtagataaccccaacatctaatagattaagtatctcctttttcacaacctctttcaagttagggtttaatctcctttgaggttcaatgctagagtaggattcattttcaagatggattctatgggtgcataaggtgggtgaaatccccttaatatcatctaacgaatatcctatagctttcctatacttcttgagctcagttatcagcaggtttacttgatcagcagttagctcatcattcactatgacacgataagtagagtttagtccaagaaaaacgtaccttagcccttttggtagcggtttcaaatctactttgggtgccttgagttcagaccagtcatcggatactaagttggctcagagaaggtgttgtggtcgagtagctcggtcgagtacaccgaatgggctgttggtcgagtgatgtggtcgagtatatattcctcccttgctctttcacccaaatcttcatactctcctggattctcaactgctttgtgttcatctatcagcttctggtaccccaaagtctccaaatgtaaatctccttccttgctatcctttgttagagcactctgtagatgatctgtttctcccagctcttctagcatttcgtgagctaacatatccatctcttcaatccagaaaacatttccttctatcgtaggcttcttcatggtgttggtgatatcgaaggtcatcttgagatctctcccgaggttaagatcgatttttcccttcttaacatcaatgatagctccagctgtagctaaaaatggtcttcccagtatcaaagggtctttgggttcttcatccatttctaaaaccacaaagtttgtcggtacttcgaccatgcctatcatgactggtaagtcctccagcagaccatggggaatcctaacagatctgtcagctaggatcaaggatatattgtagggcttgtacttgttgaagcccagtttctttgccacagagagaggcatgagactcacagatgcacctagatcacagaggcacttgctgaaggctaaagggccaagagcgcaaggtaaggtgaaggaaccaggatctcctagtttttttggaatgatcttctgctgaatgatcgcactgcatttgtgacttagcaccaccattccttggacttctttgatcctctctgtaatcatgtctttcacatatttgttagagtctggtataagtgcaagacagtcgacaagaggcatcgtgacttcaagatttttcaattgtttctccaggagagctttgtacttttgtatcatgaccttcttgaatcgcccaggaaatgggagtgggggcttgtaaggtgggggaacgaagacgttgtctttggttttggcggcaactggtttttcaacaagaggaaatgctgcaggagctagtgatcgagtaggttggtcgagtataggctcttctattgctttttcagcggaatctccattctgacagaaatcctccccatcttgatctacactgtcctcagtgttctggttcggactctcttttgtgggtaattctttaccgcttctaagtgtgatagcatgagcgtactcctttggatttggcattgattttccggaaggtcctgtaaatttgggtgctgcggtcgacccagtttggccttctatgtatctgatcttagatgtcagtgcttcaaccttgatattgatatcattgtaactacagtcaaccttgttgtgaatttctgccatcttttgcacaaatccattgctcctgttgcttgcccttggagaatctgctgtaacatgttcttcaagtctgaatctggagttgttgaagctggttgttgttgctgctgtgtgaacccaggtggtggaagttgctgctgatagttgccctgatactgctgcttaggaacatacccttgaccttggttgtaaggaacaaagggcttgggttgattctgctgctgtgaagggtagacttggtcctgcgggtttacaacgtttgtacttctgtaagacagattgggatggttctgcttgaagttgttgaaacctttgttgtaacctccttggttctgcacatagctgacctcttctgactgcagagtctccccatcctgaacttggaacgtctcatcatcacccagaaaatgaatgtgcttctgttgcacaaggagtagcttgtccagtttgtcattcatggctttcatttccctgcggtgcttctcatcagaatcagagctggtgcggatgcgtctgtcataatcttcattatagttgccatccgactgagccaagttctctaccagctcccatccgtcttaacatcttttttgaggaagttcccgttagaagcggtatctagaagcatcctgatcttgggaaggacacctctgtagagagtgctgagaagtgaagctttggagaaaccatgatgaggacattgcgtctgataacctttgaagcgctcccatgcttcacagaaagtctcattattcgtctgagtgaaaccggagatatcattccttagtctcgcagtcctggagtttgagaaaaacttagccaagaaggctttcttgcagtcattccaggaggtgatagagccttgaggaagtgacttttcccactaatgtgctttgtctccaagagagaatggaaacaatctgagcttgaagccatcctcactgacaccgttgatctttgttaggctgcagagcctatcaaactcgtccaggtgatcgagtggatcctccatagggaggccgtggaacttgttattctgaaccatggcaatgagaccgctcttgatctcaaagttgttgttctgcataggtggaggcacgatgccattacgctgattgtggttgcgtggtgcatcgcctgcacctatgttgtttggttgcacctgctcatcaacaactgcagccattttgtctgtttctgtctgtgctctgagttggtgtgcaatacggtcgatgttatcgttgaacaggagattctgatttcctcgtgaccgtgtttgcatacaacgagtaccaactggtgaagctggtgattcgtagtacctgaatcaaaacagacaaacacaaagttagtaactttcagagaaaattaaaaagaacttgatcttaaatattctgaaatctcaaatatagcaaacaaacacccaattggcaacggcgccaaattgataataggttattatggtcaattatcataaaacaccaatcatgtcgttgtagtattttaggtgtcaatccaaatgggtgtgatgcaaatagatgaaatgtgatcagaagtcactaagtcaagccaagtaataacagttttggggtttctaacagtcctaagcgaacatgcagaaattagaagcaataacagaattactaaaatctctcgagtaacaggtcgagtaacagacaggatatgaaacagctatactcgactatacagtgtgttgccagacactgggtgtggtcgagtatactggtcgagtaatagacaggaaacaagataatcttactcgactgcacagtctgttgccagacactgggtgtggtcgagtaagatggtcgagtgattgtaaaaactaagaaacaggcaatgagaacgattaagcgataacgataaaacagagaaataagatagacgagaaatgcctaaggatagggtaatcgagtagagtggtatcctagcctattcgaatggttaacaagcgcaatcaagctatccctagacaacaggttcaacaacagatcaattcactcccgtgatagaaatcctcaagcaaagctagcccagactaattcccattaacggaatctaactatgcaggcaataagaacagactgataaagtcaataaacgctctaaacggccaatcccttgggatagagacgcatatctcaggaactagtggatcaagcattccatcaaacaccttctgggtgcgggaatgcttgggatcgaattccaattgatcagaaagaaataagcagtaaacgcaactagtcctaaagggattcaatcaattctaaaacttaaccattctacagactacggattccacaactactctatcctatccctaagaattctaagtcactactcagacaacatgctaaaagacataaatgcaaataaacgataatattgcataagtaaagagataaagagtagagaaacaagatgacagatgaaatcaaatgcggaatctgaataactttgaaaaatctcgaattacaggttgccgaagcaaaaccggcgcagtagagtaaaacagaaaataaaactgaagcaaaaactcaatgtcgactagatgtctcaggacagaaccctaagacatctatttatacaaaacgaaataaaatgataatagacgggccaataacctaatcgctcggcccatagagagataatgggccgagatgggcttcttgatccgatggaggtccaggccgcttccaaacactttgtcttctcctcttctcttccttgtgctcagcttgtctggttgagtgcggatttgagtagactgtgaagacgtgatcgagtgtccggtcgagtgatgctgatggtggtgagtgatgatactcgaccagggggtcgagtaacttggtagagtgaacggtcgagtgttgtcaggtagtgtggcgaagtgatactcgaccagggggtcgagtagtgtcatcgagtggcctgagctgaggttactcaacctggtggtcgagtggatgggaagaatggctccaaagtcactcgacctgggggtcgagtatgtgggaagaatggctctaaagtcactcgacctgggggtcgagtatgtcttctggttctggctcgtttcttccaatttgcttgcaaacagctccaaatcacctgaaaacaactcagaaatgcaatatgtatgcaaagttatcctaatcatgcaaagtatgcaagaatgatgagaaatgatataaactgtgatgaatgatacgaaactggactcaaaacgatgatgaatggacactgaaaacatgcaaattatagacatatcacactacttaggcttttaagacccggttgcagttctagttcttatactcaatcatacaaatgacatctactcatatttgactccaaaacactaaccaagcttcttcttgcttgtcaaagcgttgatggtgtagccgaattttatatgaatcttttgctttgtatcctctaacaaggaaacactacttagccttttaagattcgtttgtagttctagttcttatacttaatcatacaaatgacctgaagtcatagttgactccaaaacattaaccaaacttcttcttgcttctcaaagctttgatggtgtagccaaagtccgtatgagtctttgactttgtatcttctaacaaggaaacactacttgggcatttaagattcggttgtggttctaattcttatactcaatcatacacatgacatcaaattatatttaactccaaaacactaaccaagcttttttttttttgcgtcttatagctttgatagtgtagccgaagttcgtatgaatctttgtctttgtatcttctaacaaggaaacactacttaggcttttaagatccggttgcagttctagttcttatacataatcatacacatgactacaattcatatttgactccagaacactaaccaagatttttcttgcttctcaaagctttgatggtgtagccgaagtctgtatgagtctttggcttcgtatcttttaaacaaggaaacactacttaggcttttaagattcggttgcggttctagttttatattcaatcatacacatgacatcaaatcatatttgactccaaaacactaaccaagcttcttcttgcttctcaaagcattgatggtgtagccaaagtccgtatgaatctttggctttgtatctactaacaaggaaacactacctacgcatttaagatcaggttgcggttttgcttcttatactcttataagtagtttttttaggcctacttatgtgctgaagtgtggtgtgttcagttcaattacccttaaccactaacatgtcgatgcagctataggggctgtcaatcctgtccactgttattgctagcaatcaagatgtgtacagaagcaactaagtcaagccagattatagagatggttggtttctagtaacaatcctacgtcaagattcgaatagcaaaaataagaacttaagagccctactcgatcattgggtcgagtagaaccaacaggcaacaaatttaagaactaaaatgcaatcaacagaacatgtaaataaaagtgcaatcagggggtgaatacaaataaatctaagaagattagaagtcctaaggatgaattcattgataagggcaactctagggttcattaggtggctaacaggcgaaaggcagataccctagacgatagattcaaaaaccgggtcaatccactctcgtgacagagacccccataactctaccacttcctaatctcaactctcgttgatgaaacatagcagaacagggtttaagcaacaatttaccaaagccaataagcagtctagccaatctcttggtctagagtctacaaatctgtggaattcgtagatcaggcatccatttgaacgtcttttggacgctggatacctatggtcgaattttcacattagccagcgaaaaccgcataggggccaacgaatctagaagggatctaacctaatcttaaccacctgactaacctagacattaccctaatcttatccatcctcaagaaccctaatctctactcaagcatcataactaagaacacaaacccagaaattactgaaatcataccaaaatgcaatcaacagaacatgtaaataaaagtgcaatcaggggtgaatacaaataaatctaagaagattagaagtcctaaggatgaattcattgataagggcaactctagggttcattaggtggctaacaggcgaaaggcagataccttagacgatagattcaaaaaccgggtcaatccactctcgtgacagagaccaacaagctaaacaactttactcaaagaactaaatgcaaaaacaaaatagattaagagtaattaagttttgaatattcaagaacacaaagaaaaacaaagagataaaagctagatcctttggacacatcccaaagtgatctatgtatactaaaatgttgaaaacctagattcactagaagacaagagacttgaacggtttgggcgagtgctcgatcttggggatcgagtaaagagtgtgcggcaaagtctacgcctttctgtccatgctccgagtgatcaattggtcgagtagttgcttcttcctctcatattcttattcgcaatcaagatgtggatataagcaactaagtcaagccagattataatgatggtgggtttctagtaactatcctaggtcaggattcaaacaagtaaaaatgagagcttaagagccctactcgatcattgggtcgagtagaaccaacaggtgacgaattaaagtaactaaaatgcaatcaaaaggggatacaaataacaggtaaataaaagtgcaatcaacaaggaatacaaataaatctaatagaagttctaaggatggattcattgataagggcaactctagggttcattagatggctaataggtgaaaggtagatacccttgacgatagattcaaaaatcgggtcagtccactgtcgtgacagagacccccataactctaccacttcctaatctcaactgtcgttgatgaaacatagcagagcagggtttaagaaacaatctaccaaagccaataagcagacaagccaatgtcttggtcgagtctacaaatctctggaattcgtagatttgacatccatttgaacgtcttttggacgctaaacgtctatgatcgaatctccacattagccaacgaaaaccgcatatgggccaagcgaacccagaagggttctaacctaatcttaaccacctaacttacctagagattaccctaatctaatccatcctcaagaaccttaatcactactcaagcaacattctcaagaacacaaacccagaaattattaaaatcataccaaaatgtagatctaaacaagttaaacaaatttacttaaacaactaaatgcaaaaacgaaatagattaagagtaattaagttttgaagattcataaacacaaagaaaaactaaaggataaaagatagattctttggacaaaccccaaagtgatcaatttatagtaaaatgttgaaaccctagattcactagaagacaagagacttgaggcggtttgggaggatgctcgatcttggggatcgagtaaagagggtgctgcaaagtctgcgcctttgtgtctatgctccgagtaatcaattggtcgagtagatgttccttcctctcctatatatatgcttagatgtctggttgagtggggaatgaggaggatccaaagacgctttgatagatcaacaagtcttgtagagttggtcacccttggtcgagtaaatgggtcgagtagaggatcaagtaggaggggcgagtagataaatctgctgcttccactgaggctgccttgagcgactaaaggggtcgagttaattgcagtctcctctgtagctgcctggatcgagtaaagaggtcgagtgaattgatgcctcttctgtagctgcttggatcgagtaaatggatcgagtagagtccttttagctccttctgcacctgaaaacacaccaaaacatgcaatgcatatgcaagatgatcctaaatgcctaagaatgcaaaataagctaaaatggtgcaaaatgatatgatacaatgagcaaatgcacagctaaatgatgataatcatacacctaaaatgagtaaaatacagtgttatcaccttctatgctccttctgcacctgaaaacacaccaaacatgcaatatgtatgcaagatgatcctaaatgcctaagggtgcaaaataagctaaatgtgatgcaaaatgatatgatacaatgagtgatcaaaaagctaaatgatgataaatacacacctaaaatgagtaaaataaagtgttatcaaatcccccaaacttatatcttgcttgccctcaagcaaacaaaaaatcttaagttgaaggagatgtttgaaggtggggattcaaaaaccaaagcatgcatatagaatgggtaagctcactgtccaggtagctaattctaggttgcaagatgatagacccttacttaacaactttagccatactcgtcacaatgcaacctaacaacctgccttaatctattcaagcattcacatcaaccaattccctttaacattcattaagcacgaacagtggatcaatcaatgcaatggttatgaacttacttggtttcaggcttagggtaagagacaaaaatggtccctctaatgatttggtcgaataacaagggactctcagagaaaagattgagcttcagcagaatgctaaaggtaaaagccaacggacacatacaagaacagactcccatctattatgaaagctcagaagatgatcccactcccttagatgtcctaactctacccttattctcattctttctctcttttggttcaagttctcaagggtgcttctttaaaatgattcaagagtctagcgggtttggttttaaactttggtaaacttaaggcttttcttctaaacttatagcatagagggcgttttacccttttctttgaatcacaatgcctaacttcttactctcttttttttttcttttcttttcattcctattccctttcccattcaatccatacacaatcctaatcccaaatacaagtctccacctagtcctagctaacccaaaaagcgtgggctaggtctacatgaatgactgctcttgtcggctcatacctaacacgttataccaagctcaatcgaaaaagacctcacaatcacacacaaattatctttggcttgaaataaggctaggctcagggtatgggaaactgctctaaaaatgagagtcagctacttggattaacagggggtggtgaagtaaataagataatccaaatatgtatatgttagccatgagttcacaaacaatgcatagacatgataattgcaaattcagttcagcttctaatagatagggaatggcataagataagcgagtttcgaatcaaagcagtatagtcaagttgtaaattcaaagcagggtgcggtcttacttcagagaaacaatcggttatgcaacagagaactaacaacctgggcattgaacttacttcattgaatcaaaacatgcttaacggtttgaagtcatcattatcccctatgcaaatgagcaatcccaaaagcaaacactctatatacaatcctaagatgaaatgcaatctacatgacattatgtttttgtgaaatcatttcctgaaaattttcgaatttttgtggttttttctctaccttagatgatgcaaaatatgaaataagaaaagtgaacacaatgttaaacatgtcttcaaccctctccctaacttaaattacatagtcccttgtgtaataaaaatctgagaaagaattcaagaccaaaacacgaaacacacaaagaaaaataaaaatgctatggtatgtacaatggtggtggtggtgttaccttaggtgaagtaggtggagacaaggtcatccatgctctcctttgtgtagctccagggagcgggtcgtgctggacttggattagttgaaagaagtagtgaaaaaagaaattttgaaactgcttgatgttggtgtcatctaccctatctctgatagtacttgggtttctccagtgcattgcgtccctaaaaagggtggaatgactgttgtcaaaaatgaaaaggatgaactgatccctactagaactgtaactggtcatagaatgtgcattgactataggaagctaaatgttgcatctaggaaagatcattttcctttaccattcattgatcaaatgcttgaacgcttagctaatcacccatactattgctttcttgatggatatagtggtttctttcaaataccaattcaccctaatgatcaagagaaaactactttcacatgtccttatggaacttttgcttataaaagaatgtcattcggtttatgcaatgctcctgcaacatttcagaggtgtatgacctctatattttcaaattaactcgaggagatggtggaggtcttcaaggacgattttttggtctatggcccctctttttcctcatgtttgttgagtcttggcaggttattgagcaggtgtgaggagacgaatcttgttctcaattgggaaaagtgtcatttcatggtgaaggaaggcatagtgttgggtcacaagatatcagaaaagggtatagaggttgacaaagggaaaattgaagtgatgatgcagttgcagccaccagaaatggtgaaggacagaagaagtttccttggtcatgctgggttctacagaagatttattaaagacttctccaagatagccaggccgttaaccagactattgtgcaaggaaaccgaatttgaattcgatgaggactgcctcaaatcctttcacaccatcaaggatggtttggtatctgctcctgttgttcgagcgcctaattgggactatcaatttgagatcatgtgtgatgcatcagattacgcagtaggagctattttaggctagaaaatagacaagaagcttcatgtcatatattacgccagccgaacgttggatgaagctcaaggaagatatgcaacaactgagaaggagcttctagctgttgttttcgcatttgagaagttcagaagctatttggttggatcaaaggtcactatctatacagaccatgccgccttgaggcatctgtatgccaagaagaatactaaaccaagactgttcagatggatacttctattgcaagagtttgacatggagatagtagataagaaaggtattgaaaatggtgcagcttaccatctgtcaaggatgagaattgaagaacccattccaatagacgattcaatgggagctacagtgggaaagagtttcaccacttgaatgctgtttaaggaggatctccatggtatgttgatcacgtcaattacttggcatgcggagtagagcctcccaacctgaccagttatgaaaggaagaagtttttcagagacatccaccattactactgggatgagcattatctttacactctctgtaaagataagatctataggagatgcgtctcagaagatgaagtagaaggtatcctgctgcattgccatggctcagcatatgctagtcacttcgcgacgttcaagacaatgtcaaagattcttcaagcaggcttttggtggccaacaatatttaaggacgctcaggagtttgttccaaagtgtgattcatgccagagaaaaggcaacatcagaagaagaaatgagatgcctcagaatccaatcttggaagttgagatctttgatgtatgggggattgatttcatgggtccattcccatcttcatacggtaacaagtatatactggttaccgtagactacatatcaaagtgggtcgaagctattgctagtcctaccaacgatgcaaaagttgtgctgaagctgttcaagaccataatcttccagagatttggagttcccaaggtagtaatcagtgatggtgggaagcatttcatcaacaaagttttttagaacctcctgaggaatcatggagtaaagcacaaggtttccactccctatcatccacagacgagcgggcaggttgagatctccaacagggagataaaaacaattctggaaaagactgttgggattacaaggaatgactggtctgcaaagctcgatgacgcattatgggcttaactgacagctttcaagacccccattggtacaactcctttcaatcttctctatggaaaatcatgtcacctacctgttgagctcgagtacaaagcaatgtgggcggtaaaacttctaaactttgacataaaaactgctgaggagaagcgattgatccaacttagtgacctcgatgagatccgtttagaaacttatgagagctctaaaatctacaaggagagaactaagcttttccatgacaaaaagatcatcaccaaggatttccaagttggtgatcaggtgctgctattaaactctcgcttgaaactctttctaggaaaacttaaatccagatggtctggccccttctgtatcactgaggttcgtccttatggagcagtcactctagctggtaagagtggagatttcacagtaaatggtgacatcggttcatctctaggagcttcttgatgattaaaggagtaaaggagtcaagccaatgactttaaacaagctcacttgggaggaagtcccatgactatctctgtaaataattttttcttttcttgttatttttgatttgtcttagttgtgtttgtggttctcaagaacaaaggaacaacgtggagatagagtaaaaattcaaaactgttactctacagaagacctggagatcgagtgtattgcctggtggagtgcaaaattttgaaagttttctgttgcatcgggagcccctgaattcgagtacatcagtcaagtatatgtgatgtttaaaacccaaaaaaattttaatcatctttgtactcgaccaacaagagctacagagactttaaaggatttcctgcaatttacagtagattttctgcagtttttctcagtcaacagagtgtgaaccacgcactaaaaataagatggagagagaatgtcaaactcaacttccaccacatctttcgaaaatcactcgacctacctatcttcatttttcaaccactcgacctaattcaacctttcttcctcaacgcacctcaccacgattcactgtatcgcacttgaccccatcagattactcgaccactggaaaggcactcgaccgcttcgccgccgtcaccgagttcatttgcttctttactcgaccttctcaccttgctgttcaccgttactctgttctcaatctactcggatccctctgcgccgccgcagtcgagtccctacctcgttcaccatcgaagtcttagggactactcaattacaaagagaagactagaccgtcgacttgtagtttcgaccataccaattccggctcaccgaaggattactcgacctctggactttaccggctgaactcgacctcaacgtttcactcgacctcctggagccgaccactcgaccaagcttcacgtttcaagattccaggcttcaattccggttcactgaggaaccactccaccgctggtactagcaaatcggcagacccactcgacttcagaaaagttattcaaccgcggtctctacattactcgatccaattcgtgtaaaaggaactcgggaacagcttagtttactcgagtacaagattgtactcgtccaattcggtccatttcattgcctgttgataacaattttggtttcattgttatctttgagactaatatattgacatttgagttttgagttctaaatcttctacaggagaatcatgagtaattacagtggtagttcttcagttgatccagactacaacatggatgagatagagtcgtcatcttcgaggctagagagagaacagagaatatgatagcttcagaagaaaagctgagatagctcgagggaagagagcaatgacagagaggtatgagcttatagatgaggatcaggaagacgagtacatgcctgagcatactcactgagccaccaaacttctgcacaaacctgatgtatagcctgctgaggaatatatcaggctcttcaaacttagagttttgtagcacgagttatccatgcttgaccacacttgcacaacttggattgttggaggatgttcagcacctgtaccagagtttaagtctcaagtaacagaatctttgagaattagacgaccagttataagatggcatggtggaatgaaaggaaccggatcgagagaaaagatcgcggacttgccttgtcatgctcacgcgaagttcaatcgagaaggagaagaccttcaagattggcttgctggatccccacagaaaaagtgaaagttctaaccaagttaagaacgtcgacaatttatctcattgggaattcgggacgaattataatgagagggtgaatgtagtgacccggtcattgactataggggcggttgtggtaagaaattttgagtcggagttatatgccaaggggttgtaaggtcttgggaaaagacttataattggaatgctaagtaaaatcctcttacttgactaagtcagttttggtcatggaactggggaatgctgtgaccctcccatgtgagcgttccatggttgaggacggcctaacttgtggcctagatgattcttggaacggtcgaatttagagaaatatttgaagcataaattccgaaaatcgaggaaaaagcgtaagaaaagtaatcattggtcggagagagaaagtccaccttatttacaggatcgacacaatgattatatctctgccccaatcaaaagaaagatattgcccatggtataagttatcttccttgggcgaaatcaaggcaatatttcagttctgagcgaatcgttgggcaagttacctcttttggacaaaacgaggtaatgatgagcttcgccgcacaaacatcgagtcaatcatggagaacgagtgttgccatgagttgggcgacacaaactatgacccaatgacaaggtggcgtgtcccatagggttggacgacgcaaactccaagccaatcagaggaagagtgtccttgtgggttttgcgtcacctaagacacgacatttgtccatcatgggtcgaatctcctcctctataagtagaacaaaggctttggagctaaacagaaatcgtgagagagagagagatagattcaaaatcttcgtgaagtgacgaccgctcctgaagccgacggtagaggtggacgactgaattccaaacggtgtagcagtttccatgaaccatccgacgatcagtttccgaaggtagatgaagtcttcgcgatcaaccagaagttcccgatcgacgttgtcattccgctaagtgatcactctcatccgatccgcttaatcatagtgagttccgaagcatgtgtggtggcacatgagttaccttatgtgcttgctttgatgattatgtgcttgttgatgttgttgttgattgatcatagaattaataagaattatcatttacgtcatgtatgcttgatgcttcaagtacactttgtcgtagcttagttaaatgcatatagagtttgtggtgttcgagtgcgcttccctgttttgttcgactcagcgagactaggtcgctcccaaggggccgagtgttgcatgacgatgcaacgaggatacatgttgtggtagtcccatgtggtacatcgcttgtagacttggtggctaatagcggattgttcacttggtttgatgggaaggatcgttcacatggccatatgattgcattgttatcatttacccgtgcatccattatattgcattattattgcatattgattgcttgttgcttgttgcttaactaacgtttattgttatgggttgggttgtttagcttctgagattaggcgccgaactcattgagtacttatattcatgattccaccatttctgttgcaggtgaccttagggggaaaaaccatagagggtcgttgggacaataggttcttggtgtagattgttgggtataaatgtaaagactactattgtgtattatgtattgtgaaacgggatccccggaaaccttatatgattgtttgtgcgatttttatcatattatactatgtataaaaaggttttctaaaaacaaatggggatggttgatgatataaggttttgtctgaaccgcataactccctttcccggtaaaaggttggcaagccggatattgggatttggagggacggtactatgcgtgggcaggttggagggacgagtttggtgcttaaacctggatcggcccgtgcgaagtacttgtcacctgtacgattctacccaggctatttctaaaacggttcagaatcgctatagtcatggtatgtgtcatttgatttagaccgttaagcatgacaaaactaatttttacaaacatcgatttctttacaattctcatggttcttgcgcctacaatatgactctacttccgtattggtgatcccctaacgttatatcaatcaatctaagactctgtaacaaatattaatttgtttaaaaagccacaaagtgattattatgttttgtttaagcactttcgtttctgattcatgtgaagtgatatagttcaaattgccttaaaacctctctctcaaataacagattgagtacaatatttaaaggtcggattccacaaagttcttttgttcacacaatgagctaagtatcaagattaagctagaagagtgtaagaaaaaataaaaagaaagtaaagtaagcaaaaagcaggtttgttggttgtgaagtttagagtattttcaggaaccaatgattagtaggtctagatatcgttaggttgttatccaactgttcttaaactcaaactctaatatcagaataaccggtgatgttccatgaaactcactatgcctagagctaagatttccggtgatgtgccgtgaaatcctatacctaaacatgcatgctaaccgagtttgataagttcaccttagtagataggccgattcttattacacacctataaaccagcctcttcaaatagtagttctggtaacagatacctatggtgggtatatctattatctggaatcaagttctagttaattactctagaactagcattaagaacaactaaagatgaagaatcctacaaataaccaagcaaagggggcgatctactaaatcatatgaatccctagtgagaaaccctatccctaacaagcatactgctcagacatgatggatgaaatacacaacatatatgagtaagaaagcataaacaaatcagtagagaaaagagttagaaaagatttcttcacagttattgaaaatctgatgaaactctgaaaacatgggatgaatagcttggttgctaggaaacttgataaaaagcttgatagaaagcttgataaaaagcttgatatgtctaaacaatgacttttaaaactatatatatgaccttaaaaatgtgcagggactaataacgaaaataaggaagtcttctgggtcaaattttcaattcttcaaacttaaaagcatcatggatttctctgggccgcaactggtgttgatcgacaccaagagtgtgttgatcgatactctcgactggatttgaaagtgaattcgtccttaagcttcttttcttcatctttcgctccaaaatgtcttctcatctccattgtagtccctctcaatagaatacctgaaaagactctagaaataacaaaaagactcaaaaacctatatctaaaacatagttaaaacagtaaaaatagggttatctcaactccccagacttagcttttgcttgccctcaaacaaaacacaaaagccgaacccgtggaagaggttctaaaaacaaaggaactcccaacatagtctattgccatgatcattctaaccaaattcatatgcctagtaattctaatcaaatcctaaccaacatgtacttctctacaagtttacacaacattctagattccatacctaagttccacaactatatccaccttgctttcatcgctgggtctcatcaagcaagctaatattcaagaaccttctagactcattcctgtaatataccatgataaatcgaccgttctttatatttttctggtattgtttctcgtcccagacttattgacaccgttgacatatttccatatttccaaccgttgtaattgatcattcctaataatgtataataattggttcatggaaaacattcctaccgttatacactaccgaaaatcatatcatttttttttttttttttttataaggggagaggaatactttcctttttcacataggtcttaataacaggtatgaacaaaacgtcaagttctatgaatactaaccgttatgatgaggtaaatggaagagcagtgtgattagatccacccgtaatggattgtgttggaaaccaggatatcctcaactttgtcggtttgctatctggattttccaatagtcggattgagttgacccttctgcattcatcaaccagaaaataatctaaagaaatatagatcatgatttctaattagactaaacaaaaatgtttttttagaaaacaaaataaaatgactcataactctaaacacaaaaaataataagaatcaaaaataaaagcatagttaataagcgcctcccccagacttaaatatcattgtccccagtggcattcaaatccgaagagagaagaaaacataaaccaaaaataaaagaaataaaaagaaaaaaaatcataccactcggttccctctcactaagcgcttaattagagtcaataggttcacttggaggagttcaggacttggatggaggggtggaggacttgtgctgcattcgcgccttccaaggcggtatgtaaacagatcggccttgtacagcagttggtgtcgatcgacacagttgtttgtgtcgattcgatactctctccgtttcctgcaagatcaacagaaaaattagctttcgggaaactcgatgctcgtttaccggtgaagcacacttcgaacaatataaagaaataatcaaaggaacagtaagagaagagatagtgtagtacctatcacagggaactgaaataggtgtgggctctaaaggaggtgcagaagcatctatcgcgatggtgtcaatcgacaaggggtgtggtgtcgattgacactggttctctgcaaatctcatatgcgggctaagctgtaggggtctctgttgttggctctaaaagtgaagtctgagcagccagagaagacttgttcttgttggtggcaatgctactgataggcgatgtgaattctgaaccatccatacccaactccatctccttatcacatatgtggagagatatcctacccttcttcacctcaatcctagcaccagctatagctaggaaagctctaccaaggatgagaggatccttaagttctttatcatatgccaagaccacgaaacaacaaggatgaggcagttaccaactttcacagggacatcctcgaggataccttcatggatttgtttggaacgatctgaaaagaggagagtaatccttgtatgcttgtagatggtcatgcctagtctctcaacaacaaacttgggcatgaggttaatgcttgatcccagatcgcacaaggagtggctgaatctgctagtagatatcgagtagtcaagaacaaagctaccaagatcgtggagcttctgggatctctgactcggagtgatagtacggatgtacccagcaatgtcaactctccttggcttgtcctttgtaacctcagatgatttcagttggcacaatatcttggagattattggtttttctccataattgattccctttttgacaaaccatttgtttctgttcaaaaaatagatatgtgaagtctccgaagcaaaacaaggattggttgtcaatatcttttccattgcagcaatgcacttcttattgtcaagcttagaaagacgccttggagttgataaaatatctggaaagtagatcggtgcgagctcctcatgttgtgtttgttctgtttagtgtcgatcgacactagatgagtgtcggtcgacaccgtcgcgtgacgaacgatcctctctattcctgtttgacactgtctcgtcatctgattcgtcccagatcgggttgccttgtgttgatcgacactgatgtgtgtcgatcgacaccaactctgcagcagcgtgtcctaactcgtctatagcagcccactctctacagctttcctctttaatgctgaccatgatagcattgcagctcttcctaggattagcatcaggggtgccaggaagaaacccttcttgtctcttaatggattatgcagtttgaggtatttgaacaactagcttattcatgagaaagctcagattttggatcttcccattaagatatgtgtagatagcatcaaacttgccatcaaagtccataactaagttggactgaccctcaagaatctgttcaagcattgattccatcttattctcggctgagagtggaggggagttttggtaagatgaattaccataaatactctagaagttcttctaaggaaaggtcttctagaaggaaggttttggagtgaagcctgaagaactctggttccctgtaaacatgttgccactaaagttgccatgtggttgtcctaacttcctgtaaccttgaccatcaatgtagaagactccttcttctgaatctagctcaggctcgatagtctcttcttaagctgcaaagtgtacatgcttcttccctataagcaagttatgaactgaatccagcttagcatgtacctcaaccatctgattccttgaaacagctcctgcaatctttttcctctcaaagtcagcgttctttgtactcttcttgcacgcaaggttctcaatcaatgatgtagcatctgtcggatacctggtattgaagttaccattgcgcgctgaatctagagccatatagtatcttcaatcaactcctttaaagaaggtacctagaagttgtaccttgctgaagccatgatgcgggcagtcccgttgatattccttgaagcgaacccatgcttctttgactttgtgtgaaggtagacattttgttccgcaccttctcagacttagcatcatcatagaagttgttcaggaaggctttcttgatgcttcttgatagaaatagtgagtgaactagcctttaattgcttcaaccaagaaacatcttccctagcaagtgagtaagggaaaagcttgcacagtaagtagtcctcagagactccattagccttaatgtttagtacgaagtcatcaaaatgctcgatgtggtccattggctgctcgtgagataagccatggaaagggtgcttgcctaccagtgcaaagtagccaggcttcagttcatagttgttcctctaaaaaggtctgggtatgatcgttgatcggtagcgaggcttcagctcatagttgttcctctagaaagcttcttttcttcagcttttactccaaaatgtcttctcatctccattgttgtccctctccataaaatacatgaaaagactctagaaataacaaaaagactcaaaaacttatatctaaaacatagttaaaattagtaagaatagggttatatatcatgaagcataaatatgctactctagaactaaatgtgtagtttcataaatatatgcctttgttctctgtttcttctcttatattgcgaaaataaacatttctcattattacatggtaaaaatgtgattacaagacatcaaataaatcttgaaactatactcacttgatatttctcttttaccttaacaggattccaacccaaatacacttaaggactagacaatcgccacatcaacaaattgtatactagagccactctttcattgggagatgcaaataaagcaacagaaaaattgaggatatggtagaaaaaaacaactgcaaagataactttgtggaaaaactgcatttgaagaggacttgaactccgcaaaatggagggatggtgtgcttgaggaaccaaacgaattgtgtttatgatgtttaatccattaggacaaattttgattaaaaaaaccattgctattttcgatgtgagatatttaagatgaaatattaagtaattgataattttttgattttattttattttcttatggtgttcagcatataaaaagaattactttatttgtttacctgtcttaatctaacagtatacaaaatttaggtgccagataaatttttgctaaaattaaaaattatataacatactagacgagtaacaaatctaataaaattcgtaaaatatataatggtatcttatataattacatatctgcaccaacaaaattataaatagagaacaaaattcttaagaaggaagatattttggaaagaatcaagtaattaatatacgtccaaatacataaccaacatattctgggcgtagtttcagatttactttaattgtttattttgtgtgaaatcaaaatatgtcatgtactataacatatgtttcaatcaagttatttataaatctatatttgtcaaaatattatgaaatattaagggggtgttattggttcttagtttacaaggaatattgatgacttcaatcaaatcctagaaaataaataaatgaaagaatttaaactattcttgtagagttttttcataattgaaggtttagtgtcatccgatctcaagatatatgctaaagtgtgataagtatctgaagcaatcagagggtttgacccaagcttccttcattggctcacgtgagaagcacacacgtgagattagtaataagtcacaactagaagggtaaaagggtcttttatcattggctctgtatcttcttcttctctactcttctttgagtatgtaacagaatgaaacagataagagaagcgtgacaacgagactacgcaagtcgacgagagacgtgagcttagagttagaggtagagagagtaactggttttgtgttggtgagtgagagaaagcttgagagtgactgtaatccggtgagcgattgtaacggtcacttgtatgagctcgagtttgagctatgatctagtggattccggagtcaatctccggcgagacgtagggttccacaccggaacctaaactcgtaaaatctcggtgttctttgtttgcgttttttctattttctttcaaatccctaaactaagtcgcaagttctaatcggaaattatagattaggcttcacaaattggtagcagagcctatgttctacgatttcatggaaagcagaggcattgcgaattgaaagaaacggaggatttgaagtttcgttgatatcgtgactaaagataagaaaaacggaagatgttgtgatgtcaagagcgaaggaagaattggactgcggttgttctcggaagaagacgtcgtagctagaggaaagaacctccacggagaaagatccaaccggatcaaatggtttcaagtttatgaaatcagtttagtcgataagttactctctctctcttctagactctgaagtttgacatcactgtgatttctagtccaagaaattcacaagagatgatgttgagatcacgaaagtttaagatcttcgtagtctggatcaatgttatttgagttttggaggatgaaagttttacggtgatacgtttcatcgtattgaagactacttcgagtttctaagattgtgaagttgtaagttatctcctctaattgttttgtgtctgcatcattgcgagaagatcaagaaagactcgctagtgagtgcaattgcaaaggagaattggtccagatggaaagaaagaatgatactacgagttttggagatgtaagaagaagaatgtttagtgatggcttaggtggaggaatattcaccagcaagaagttttgatttctggtttaagaagtgtgtgagttcaagtactggatttgaagtcttgaaaccagaatcaagtcaccatcatgaagactcaaagcttggtgaaactaagtttgcatccgctgcaagtcacaaggttaattgtgatgttctggtatctacatgtctgcaaataaaggagtcaagatttggtaaagcacaagtttgtatgttcactgcacaagtttttagctaagattcgatacttggttagtgtggtttctggttaaggaagtgtggaagttttttgatgcaaacttgtgttcaagataagtaaagaacagctattggaagctcataaaagtctaggaacttggggacgccttggttgtttgattggtattgggttaatggttgtttggacatcagttaaggctcggtattgaaagacagaatttgcaggatcgttcaagaataatcaagaattctgcttagtcaaagtgggttgataattcagaaaaattcaaggtattacaagagttttgagtaagggttcttcaaagattcagtctcagaggtaattatcagattcttaagagataagaagagctaaaaggatatggtaatcaaagggttaaattctggtcatcattgagttagtggcagctaggacattccaagtgaaaatggattaaagctgcagcatcgttttgtgtttgtttggtggcagtagtgttttaaggaaaaatgaaacaaggctgcaagagtttgtgtattagtgttctctgtttaaacagagaaagtaacaaggacacaagaagcaccaaacaattctcaactacagtctacagatgaagaaacatctagtgtaaaaggaaatcaaggtgtgactggtataaaccagtaagaatgaaaccaaggaaattttaagttggtttctggttcttatggctaagtatgagagtcaagaataaaaatggatcagctggttatagaaacatctagacatgaagactcaagaataaaggtcctgcttataaatctctagcatcattcgggtgttttctttggagttttcagaaatggtacattcaagttagtgtgagaatttctgcaaataagaaagggtggtgctttgtgagatggttccaggagacatctgttatggtggaagaaattcagtataagggtgtgaagagtcaagtgttctaatgctataacaaggtagtggttgatcagttggtctctaagactaaagtattcaatataatatcacaaaatcagattgagagcttctctagaagcaaactgctaaagagtaaagagactgttggtgtagctacaaagtggaaagaattatggatatatcaagtgataaggttcatacagtcaagcgcacaaggttttatgattgagaattatagagacagtgacaaagaggcagttcgctcggcaagtcagaattaatgtcgagagatacaagcaacatcgatggtttaaagtttcaggtggagtcatcagtattacagggaagtaatacacgttcgtaaaagatggtttgtgatttcaggtggagctttagagttgaggagtttctcggttatcttaagtacaaagacaaggtctgagtatactgggttttcaacgcatcaggtgttagctatgagaagaaataagttgctgtttggatataattcggattggtcaagtgtgtgaagaagacagagtttcgagaacgggtaagagatgtcagaaacgttcaagcataagaaggttgcaacaggagttaaaaggaaagtttttcaggtttaaaggatgcttgatggtagttcagacattggtatatcagttgcatgattaagaagatcagcaaagctgaagtacaagctcaagataaaagtttattgaagtgattctcttaggagacggtaagagacaagtgcaaggtcttgcaaagaatttgtctgcggttcattcacctcaagtacgtgaattgcaatgcataaatcatggtttaaaagattcatcataagagctggtatagcaactgagaagaattcatccaagataggatgagaatgaagaagtagaacaaggaaaagttctgttcaccttttttgcttcataagaagtaacaaataggcacatgtaaaggaagcttatgaggataaagaaaggattcagattaatctctgatggttttaagatgcaagtgccaagttaggtgaagattgcaaacgtgaggacgttttgcagagtgttttttttgcagcaaggaagcgacttcgagaagttctagagtgaagttcaagggctgtaaaggagaagtctcaggcatgtcacaggagtgttgatatgagacaagtttaaagaagctaacaggggttcaaatctgttggattgaaagggtttgctgattcagaagggtttcgaaccagattgagcaaaaagagttgtatcggaagttttcctttctctgtgaaagttaggaggcatgttttgttggtaacataggcggtgcaaagtgatgctcaaagttcaaacaaatcactgtaagtacaatctctagttaaatacattttactactaacgggttattggcttagattgttttgcaggatgaatcattgactgtttcaggatagaaaagcacaagcgatccaagatatttttgcataatgattcaagggagaatttgattcaaagttcagtgcacatgaaatgaatcaaagggctagcgaggaatcgatctgcagaggttaaaaaaggatccaggctgtgaaggaaacaagtgaagcaaacatgagttttttgttgacacaagtctgtgttaaagttggttcacaactcaagaagtgatactagaacgtcgatggttcgggaacgtcggtgtgattcacatcacagctattttttttccatcgaagatatgttcactaatggttgttgaagtgtgaagattggagttgtcaaggttagagcaagtttaaagggttctaaggagcagctgcgaggaagtcttcaagtagaatcaagacatgttgattttaagatgcattgaggaaacaatttttcaaggaagcattgaagttgaacggtgaagttcaagatgagcggtgaagctcaagtaccggagatggaatccaagaagctagataaggagcgtgaagaagatcgatgacaaggtggagatttgaaggtttagtgtcatccgatctcaagatatatgctaaagtgtgataagtatctgaagcaatcagagggtttgacccaagcttccttcattggctcacgtgagaagcacacacgtgagattagtaataagtcacaactagaagggtaaaagggtcttttatcattggctctgtatcttcttcttctctactcttctttgagtatgtaacagaatgaaacagataagagaagcgtgacaacgagactacgcaagtcgacgagagacgtgagcttagagttagaggtagagagagtaactggttttgtgttggtgagtgagagaaagcttgagagtgactgtaatccggtgagcgattgtaacggtcacttgtatgagctcgagtttgagctatgatctagtggattccggagtcaatctccggcgagacgtagggttccacaccggaacctgaactcgtaaaatctcggtgttctttgtttgcgttttttctattttctttcaaatccctaaactaagtcgcaagttctaatcggaaattatagattaggcttcacaataatcttgtaaagtttcttaaacaatctctctattttgataatatttttcattactttttatgactttattttgtaaacaaaaatatagaaagtcatgaaccaataacataataatttaaatcattaacaataagagattcttttgttttaattgaataccacaaaactcttactgactttataagaatatgaatccaataaccccaaatttatgaagattttagattactttttacaaatcttaaatgaataacacaaaacattaacatagttttatattatcttgattgaataacaacatattttacatgacattttaagtcaataaaactcctttgaaatcataaaccaataatatcccctaaaacttaactattacttttgttgaaagagaaaacatgttcaattaataatgaatctattatactcatgaaaatattgtgtatatatattctaacatataattcactgattaacatattacccatatttctaatgaatgtaattaaagtttatgtgccacaatagtttggtcaaaaagaaaaactatttattgtcttaagtaaaaaaaaaatcttacagaatcttatagagttaaatttgcaagctcacaactacatgagccaaaaaaatgtcaaatacttaaatgacatttacttcaaaactttttgatgttaagtcagcctgtcaaaatttatttcactttaacacgtgttagaattcaataactacaaaactatatatgtcataatattatgaaactatatatcaaacaaaattagtgttatttgggtaagacaaaacatattcaattaattaattttaatctaacttgaaaacatagtatctctctattggtataagctcttaattacaattaaccacgtacataagtacaacttattgtcactatatatacccttaacacaaacaaatatttttatacaaaccttgcataagcctttacggagtaaggaacattgaaacccgatttttcatatatctttctgttctaactcatggcgaattttccagataagcagtatgactcaaacaacccatataacatcatgataacgttgtcaccatttgacgtcgataggagtactacgataatgatgccaaaagcgttactagaaaccaatttatttcctttcatggagataagtactctcgtccagttgttacaagttcaagacaagccaaagatgattggagtgtatgatattgatactcaaattacaacatatgtaatcataagacaagatggaaataattttaaatttcatggatggaatgatattctaaaaagaaaacattacaaagcaggcgatactattgcattttggtgggatcttcgtcatactagactaaatttcaaacatgttgcttaattgatggagcgaatcttcacaacttcatttctcggatatgcatctataccgggtttgtctgatcgagtccagtttgttgtcgttttattatgttggtttaattcctgtttctagagaacatgtttttctcttatatttataaatatatatatttggatttataagataatatatgtaaataataaaagagtcgagagaaacaatttctccaaattttttatctatacattcaaatttaatataatattttgatagtaaatcataaaaaggaattgtttgtggtagaatcatttgtgtaacagttctcataatttgcaataaataataaatcaagacagcaaaacaaaaattaatatgtattaaaatttaatttattttaacacgcgttaatctaactaatacaatttctatgtgcctaaatattttggcttttaaaaaggttatatgcatgttgtaacaaatctgatgacatttctgaattatacataatcggcatctaatttatattttttttatcagttgctataataactaactagattttgacccgcggtataccgcggggctaggtttttaataaaatttgttatataaaatgtatatgtagatatttgttttattaatattgtttgctttgtttagtgtttaagataatgtatatatagattttaattgttatatctaggatttcatccgtagtatatcgttttgtattattatcgatcaaaacccgtcataccatctaatcatgcacagtgaaattaaacatatctaatggatttcacttgtagtataccatctcgtaatactgtcgaccaaacccgtcctaccactaaccctgttcagtaaaattagacattattttgtgatttttgttttaataatactttaatttaaaaaatatttaattcaaatcaatttaaaagttttctttcaaatatttctttaattgttataaagtttatatattataatattataaacacgtcataccatctagtcctactatctaatcatgttcggtgaaattatttttttatttttttaataatatttttattaaaatatttataatttaaatcaatttaaagttttctttcgaatgattatttaatttttaaatcttttaaccattttggcaaaaataattaggccatggaataagagcatattcttttgaataagatttgcttttatttggtagttaattttcgcattgaataagccggtgacagccattgtaaataagttccaactccaggatttatttcacaaaatggctgcaaaaatgtatataagataaccaattaaattaattaaaccaaaataacatagaacaagagaaagagaaacaaaaagatccatgttcttatagaaggatctagaagatccatatgatccaagaagatattatgaatatattctagagatatgtatatatcttatatgattctattagttagataattagattaattcattttctatataagtgtatcccttatgtttgttagagattaatttgcggtacatcgcgagcctatatgttaattaaataaaagattaatttttttaggatgatctatgtatacgctattattttgtttgatttaaatgtacggtccactgcaaaataatattttagaattaaaaaattataaaatttaagttgtatttgtttcgttactattgtctatatatatagtcttgcgctattctaagcttatgaatgaaaccttgttcattttctcttgggttttagggttttgaatacaaatttaagtgatttgtttgttatttcttgctaattattcaactaagcggattaggtttcatttgatcggtatatatatgtgtgcatatgatttaagtttgactaatgctcaatgaaaatatatctttgtgtcattatatatatgcttaacacattaacaaaatttctaacccaaaccttacctagatatctctaagaaaaagaacacttaaaactgatacccatatatctttgtgttctaactcatggtagataccgagctgtatccagatgagccgcgcgtttaatgtggacagcccttggatacccatagatctttgtgttctaacttaaggtagataccgagctgtatccagataagccgcgcgtttaatgtggacagcccttggaacatcttgataacattaaacaccatcaaacataggtttgagtaatatgataacgttctcaaaagagatagtagaaaccaaagtgtttcctttcctaattccggcctatgaatattttcataggttatttggacttttcgattttgaatttaattataagaactcttatcataaaagaagatttaaatggaaatttccaatttcatggatagagtatggttctccaactaaacaattacaagacaaacgatatgattgggttttggtgggatgccaataactctagattgaatttccaactactcttgattgcttactttatggaatggatctttgcaaaatcattttagattgaatttccaactactcttgattgcttactttatggaatggatctttgcaaaatcatttgtataatatgtttagttgcttttttaaaattatttcattccgaaaatttgtgtattctatgttgtattcatcaagttgtttaatatttctatcataagtcttaactatattttctagagatcatgttttacttcctcaataagaaatggatccattgggctttatatgataatatatattttacctattactcataagtcgagagttttctccaatttgtttttgttttggcaatcaaacatgtcaactttatatttgatgaggcaagtccaaaagtacgaaaggagattttgtttttgattttaatagcatcaagtttctaataagggcttaaacccaagactagggctagtgtgagcccggaaggtttcgcttatctatgtaaaacccctaattttcaaatcagcgttgaatctaactactaatggcgtctccagtcaccacgaacggtaaagagccattggttaggaagcagaaaaagagtttgtcccttcctcatgatgtgttagtaagctgcttagcccatgtctcgagattgcactattcgattctctccttagttttgaagaacttccgatcactcattgcttctccggagctttacaagactcgctcactcttaggtcgtatagagagttgtctttatgtctgcttacgtttccccaatgaatctcatccacgttggttcactctctacatgaaacctaatcaaatcgtagccaataacaagtcaaattgtaatcttttggtcccaactccaactataagttcttctcctgcgcactggttatgtctcatagcggttggttctaggatttattaactcatatgtcacccatagagtgttcatatataagaatatctttgtgctcatgcatgaattagattataaacactccatatggaattatcgtctaaaatacaaaacctaccctgttaatgaaaattacatgtctttacactcattatttcaatccctaattatttatattcaaaccaaagcagctaaattcatctagaatgtgatttataccatattaagctgtaaattcaactactatatcttttgatttaatttatgggcttattgtcctctaatatcatatgtttagctgcttagggtttctaattatgggcttaagcccaagactgggattaatcttagagtttcgtttttctatgaataaaacctaatctcaaaatttcagcggaaaatctatgtgctaatgtcgtctccaacaacatccctgaccaccacgaggggcgaagagctgttggttacgaagtagaagaataattgttggggtcagatttcctatttcccccaaataaccgagccgaacagagtcataagcgcctaggtaactaggttcgtcgccgtcaaaggcgtagaaatgattcgagagagtccttatccggctcaggtgtcattccaagcaacacacccagagccggggaaagcaatacttcgggcctcaagaaaacacctctttaatccctcaaacggttcgagtgttattccaggaaacacgcccgagccaagcttaagcatgcctcggggatcgtctaggatcggctcggtgaacgtcctatcaagcagtattcgtcccaagccaaaatccagcgttccccagaccatatacttacttgaggaaaagacttgtacaaattctgtgaaggtcccaaaaatcatttcctaaaaacccggaagtgatattggagaatctctgagggtattgtcaaatctgaaagtttttctgaagctcccgaagaataaggaaaatctctttattgcaaagatcctttttagccgacttaaagataaatggaaatcttccgagaatattgcaggaggcggtcacttggcctataaaagggacctcaaggacttcgcaaaaggggacacaaaaaatgctctcaacttcagactatcaaaaaggctctgactttgaaggctaaacacttttctaatcacatttctaaacacttgcatgatcaaatcatcgtttccaattaataatatcaaaaacaccatccgtggttacttatcgattgttgatctttgagattctcgcgaagactgtttctttgcgagtttcgactctaacaatttggcgctagaaggaggggggatttagatttctcttactccaagaacacaaaaccatcgaaccaagaagcaatgaccaacaaccaggtcctcgctaacactgtcgacgtggagggaaacccgaatcatccagtccagacgaacgctcctgaggttgccgctcctacagtcctagcagaactgagaagcatgatggcacaactctagaagaaggtggacgaccaggaaaaaagtgcaccgatctttggcgcagcagctccaggcggctacttcccaaggacagctgaggaccactctcatcggcgcgcaacaatttcaggctcgtcgagtaacgactgacctcaatccaacaaggcttgtaatcgctacacctggcaaaacgacgagaccaccccggctaatcgcaccagcactcgttggaacccaagcagaattgacatgtttaggagaacagaacccaacaaaccaggtgggggcgtttgatccgcaaaatcacaaccatcgagctgaaactgctggagccgatcaaatcgaagcttccgacgatgaggaatcggaagaaaacatccgatgggcagaagagtacgctagggagcaagagatgaaagccatcagactctccctggccaaggtagaaaccaagatgaaactcgtacggtcacagatgcacaacacggtttcctcggctccgaacatcgaccacatccgggaagaatcacagaacacgccctttactcgtaaaatctctaacgcgataatctcagagccatgaaagatgaagatcgagtatttcaacgggtcatctgacctaaaggggcatctcaaatctttcataatagttgtagctcgggccaaattcagaccggaggaaagagatgctggcctttgtcatctatttgtcgagcacctgaaggggtcgaccttggattggttctcgagacttgaagggaattcggtttacagtttccaagagcactcgacgtttttccttaagcaatactcagtgttgattgatctaggcacctcagacgccgacctttggttgctatctcagcagccaaacgagccactcagagatttcctcacaaaattcaggtccaccctacccaaagtcgagggaatcaatgacgtcgcggccctctcccccttgaaaaaggcactgtggtacaagtctgaattccgtaaggaattaaatctatccaaacagcaaacgatccaagacgctctgcactgagccttagattatgtcccatgaggaagaaatggaattgttatcgaaaaagcacgagccttcgaagcaaacacctcgaattgataagtcccaacctagcgctccgagccagaaaaagggcgctcaaggcaggaccttcgtgcatcatgaggggcaaaacttcaccggagcacacaattaccaagccgacacgccccgaggtcgaggaagagagtcctacacttggactaaatactgcgagttgcacaagagctaaattgcaatactgcgagttgcacaagagctacggtcgtcacacttccaggtgtcatagtcttggagctaaattggcggccaagttcctagtgggtgaaattggatggggtttgaccatcgaatatttagaagtagagaaagccagagttgagcaggtgaatgctgtggcgaaactcgagtaggcagtccccgcggcaaaccctgaagggcccaagagaggttagggcgaccccgaggcagatgacgatgaagaagaagctacttggagcaaaatcttcacgattttgggaggttcaaccttttgtcaagatacaacagcctcaatcaaggcttctcaaacgaaggtcgattcaaatcgtaactgggcgcaaccgttcaacggaccggatgacaaagtcacttttccgtgagagcgacactaacggatagtcatatttgactccaaaacacttaccaaaattcttattgcttctcatagctttgatgttgtaaccaaagtccgtatgattctttggctttgaatcttctaacaaggaaacactactttagcttttgggaaccagttgcggttctagttcttatactcaatcatacacatgacatctagtcatatttgactccaaaacactaatcaagcttcttattgcttctcaaaattttgatggtgtagccaaagtctgtatgtgtctttgcctttgtatcttctaacaaggaaacactactttaattttttggaaccggttgcggttctagttcttatactcaatcatacacatgacatcttgtcatacttgactccaaaacattaacctagcttctacatgcttctcaaagcttttatggtgtagccaaagtccgtacgagtctttggctttgtatctcctaacaaggaaacacaactttaacttttgggaaccggttggggttctaggtcttatactcaatcatataaatgacatctagtcatatttgactcgaaagcactaaccaagcttcttattgtttctcaaaacttttatggtgaagccaaagtccgtatgagtatttggctttctatcttctaacaagggaacactactttaccttttgggaaccggttgcggttctagttcttatactcaatactacacatgacatatagtcttatttgactccaaaacactaaccaaaactctggttgcttcttaaagctttgatggtgtagccgaagtctgtatgagtttttggctttgtatcttctagaagggaaacattactttagcttttgggaagatgttgtggttctagttcttatactcaatcaaacaaataacatcttgtcttatttgactccaaaatactaaccaagcttcttattgcttctcaaagctttgatggtgtagccgaagtccgaatgagtctttggctttgtatcttctaacaaggaaacactacttcagcttttgggaagcggttgcggttctagttcttatactcaatcatccacatgacatctagtcatatttgactccaaaacactaacaaagcttcttattgcttctcatagctttgatgatgtagctgaattccatatgattctttggctttgaatcttctaacaaggaaacactactttagcttttgggaagcagttgcggttctagttcttatactcagtcatccacatgacatatagtcatatttgactccaaaacactaaccaaacttcttattgcttctcaaagcattgatggtgtagccgatgtctgtatgtgtctttggctttgtatcttctaacgaggaaaccctactttaagtttttggaaccggttgcggttctagttcttatagtcaatcatacacatgacatcttgtcatacttgactccaaaacattaacctagcttcttcatgcttctcaaagcttttatggtgtagccaaagtccgtacgagtctttggctttgtatctcctaacaaggaaacacaactttaacttttgggaaccggttgtggttctaggtcttatactcaatcatataaatgacatccagtcatatttgactcgaaaacactaaccaagcttcttattgtttctcaaaacttttatggtgaagccaaagtccgtatgagtatttggctttctatcttctaacaaggaaacactactttgggttttgggaaccggttgcgattctagttcttatattcaatactacagatgacatatagtcttatttgactccaaaacactaaccaaaactcttgttgcttcttaaagctttgatggtgtagccgaagtctgtatgagtttttggctttgtatcttctagaagggaaacattactttagcttttgggaagatgttgcggttctagttcttatactcaatcaaacacataacatcttgtcttatttgactccaaaatactaaccaagcttcttattgcttctcaaagcattgatggtgtagccgaagtccgaatgagtctttggctttgtatcttctaacaaggaaacactactttagcttttgggaagcggttgcggttctagttcttatattcaatcatccacatgacatctagtcatatttgactccaaaacactaacaaagcttcttattgcttctcatagctttgatggtgtagctgaagtccatatgattctttggctttgaatcttctaacaaggaaacactactttagcttttgggaagcagttgcggttctagttcttatactcaaacatacacatgacatcttgtcatacttgactctaaaacattaacctagcttcttcatgcttctaaaagcttttatggtgtagcaaaagtccgtatgagtctttggctttgtatctcctaacaaggaaacacaactttaacttttgggaaccgtttgtggttctaggtcttatactcaatcatataaatgacatctagtcatatttgactctaaaacactaaccaagcttcttattgtttctcaaaacttttatggtgaagccaaagtccgtatgagtatttggctttctatcttctaacaaggaaacactaccttaccttttgggaaccgattgcggttctagttcttatactcaatactatacatgacatatagtcttatttgactccaaaacactaaccaaactgcttgttgcttcttaaagctttgatggtgtagccgaagtccgtatgacgttttggctttgtatcttctagaagggaaacattactttagcttttgggaagatgttgcggttctagttcttatactcaatcaaacacataacatcttatcttatttgactccaaaatactaaccaagcttcttattgcttctcaaagctttgatggtgtagccgaagtccgaatgaatctttggctttttatcttctaacaaggaatcactacgtcagcttttgggaagcaattgcggttctagttcttatactcaatcatccacatgacatctagtcatatttgactcccaaacactaacaaagcttcttattgcttctcatagctttgatggtgtagctgaagtccatatgattctttggctttgaatcttctaataaggaaacacaactttaacttttgggaaccggttgtggttctaggtcttatagtcaatcatataaaagacatctagtcatatttgactcgaaaacactaaccaagcttcttattgtttctcaaaacttttatggtgaagccaaagtccgtatgagtatttgtctttctatcttctaataaggaaacactactttacgttttgggaacaggttgcggttctagttcttatactcaatcatacacatgacatcttgtcatacttgactccaaaacattaacctagcttcttcatgcttctcaaagcttatatgctgtagccaaagtccgtatgagtctttggctttgtatctcctaacaaggaaacacaactttaacttttcggaaccggttgtggttctaggtcttatactcaatcatataaatgacatccagttatatttgactggaaaacactaaccaagcttcttattgtttctcaaaacttttatggtgaagccaaagtccgtatgagtatttggctttctatcttctaacaaggcaacactactttggcttttgggaaccggttgcgattctagttcttatattcaatactacacatgacatatagtcttatttgactccaaaacactaaccaaacttcttggtgcttcttaaagctttgatggtgtagccgaagtccttatgactttttggctttgtatcttctagaagggaaatattactttagcttttgggaagatgttgcggttctagttcttatactcaatcaaacacataacatcttgtcttatttgactccaaaatactaaccaagcttcttattgcttctcaaagcattgatggtgtagccgaagtacgtatgagtcttcggctttgtattttctaacaaggaaacactactttagattttgggaaccggttgtagttctagttcttatactcaatcatacacatgacatctagtcatatttgactccaaaacactaaccaagcttcttattgcttctcaaaactttaatagtgtagctgaagtccgtataagtctttggctttgtatcttctaacacagaaacattactttagcttttgggaattggttgcggttctagtcatatttgactctgaaaaacttaccaagcttcttattgcttctcaaacctttgatggtgtagaggaagtccgtatgagtcgttggcttagtatcttcaaacaaggaaatattactttaacttttgggaatcggttgcggttatagttcttatactcaatcatacacatgacacctagtaatatttgaatccaaagcactaaccaagcttgttattgcttctcaaaattttgatggtgtagccggagtccgtatgagtctttggctttgtatcttctaacaaggaaacattactttagctagtgggaatcggttgcggttctagttcttatactcaatcatacacatgacaactagtcatatttgactccaaaaaactaaaaaagcttcttattgcttctcaaaattttgatggtgtagctgaagtccgtttgagactttggctttgtatcttctaacaaggaaacactactttagcttttaggaaccagttgcggttatagttcttataatcaatcatacacatgacatctagtcatacttgactccaaaacattaacctagcttcttcatgcttctcaaagcttttatggtgtagccaaagtccgtatgagtctttggatttgggggagttgatatgtctataatttgcatgatttcggcattcattcttcaccactttgtcattgtttcgtccacatttcatctcattaagagtcgttttagtgtgttttgcatacttaggacgattttgcattaggattgcatgtgcattgcatatttggttgttttcaggtactttggatgcttttggatttcaaacagaggagaaacagaacagaaagttagaatgcctaatgacaccttcagcaaaagtactctatcgcagccttggagccctgccagggcaaatcactctatcgcaaccccggagaagctagcagctcagtttcactcaatcgcgaagccggaggaatcaccccatcagaaccactcaataaccaccttatgatattcactcgatcgcactctatcagagggtcgctggaccattcaatcttgacttcactgcatctcacttgatcgcaaggcggagcccctgcagcccagtttgatcaatgacatactcgatcacaggaaagctcattttagtccatcagatgccaatgacacattcggtcgcagggtcatgacgtgaagattcgctatatatctagtttccttatttgtttcatttctcgcttatataaactgcctcttagggttttcccgagggcattcgttattatctcgtcttttttgcaactttcatagctgaagtgtttctcctgcgactttgtattttgtctttcattatttctgttatcatgttttcaatcgttgttttgctattgtttttgattatgtctgagtagtgaactgtatttctgaggatgagatagattagttgtagtttacttggtcgttttaggtggttgagtttagaatactagaatcccttctggattagttgcgcttattgcttgtttcactgactaatgtggaatatgagtccagacgtccagcgctcagaaggcgtttaataggcgttggatccaattaattccagaggtatctgactctaccccaacggattgactgtagagagggtattggctttaacatgttgattcgataatgccttcttagttagagatcgctaatgagaattagttcagtgtctagttatgcttgaggatttctatcacgggagtgaattaatctgttgttgaacttgttgtctagggatagcttctatgaagttttgtcaaccacttgaatagattaaggagaccatactattcgattaccccatccttaagaatcgtttatccatttgattgcctgttatcatttctgctttgttatttacctgcctactattgccatttctgcttttagtttcatttcatttctgttattgcatactaggactgttagaaccaaccgactctctgcttggcttgacttagagctttctaatcatatctcatctgtttgcatcacaccggattggattgacatcctaaaatactacaacgacaagatagtgttttaggattaattgagaaaaatcctactatcaatttggcgccgttgccagtttcgtgtttgtttgttatatttgagatcattagaaacgttaagatcaagttcggttttgttacacaagttactaacattgtgccttttctgtctttgtgtttcaggtaccttgcaacccgctttacagacgcatctttgattcatctgttatagcacggctgctatatgttgcatgcatacacggtcacaaggaaatcagaacctcctattcaacaataacatcgaccgtattgctcgccaactgatagaacagacagaaaccgacacaatggctgacgttgtagatgagcaagagcaacctaccaacgttggtgctggtgacttccctcataaccacgaccagcgtcatggaattgttccacctctagtacagaacaagaactttgagatcaaaagcggtctcattgcaatagttcaggggaacaagtttcatggccaaccaatggaggatccgctagatcatcttgacaagtttgaaaggctccgtggccttactaaaatcaatggagttagtgaagatggtttcaagcttcgcttgtttccattctcacttggagttgaagcccatctgtgggaaaagacgctaccccagaattcaatcacgacctgggatgactgcaaaaaggccttcttggcaaaatacttttccaactccggaatgagatatccggattcactcagaagcaaaatgaaagattctttgaagcttgggagcgctttaagggttatcaaaccaaatgccctcatcatggatttaagaaagcttctcttctcagcccactttatagaggtgtcctgcctaagatacgaatgctctttgacaccgcttcaaatgggaatttcctgaagaaggatgttgaagaaggatgggagctagttgaaaactttgctcagacggatggcaattacaatgaagattatgaaagaagcatccacaccagtactgaatctgatgacaagcaccaccgagagattaaagctctcaatgaaaaaatcagcaaactcctccaagtgcagcagaagcatgttcacttcgtctctgaagacgaagtattccaaatccaagtgggggagactaatgagtgtgccgaaatcagctatgttcagaatcaaggtggctacaacatagggtacaacaattacagacccaatccaaatctgtcatacagaagcaccaatgtcgccaaccctcaaaaccaagtttatccccagcagcaacaacagcagaaccaaccaaaaccgtttgttccttataaccaaagccaagggttcgttccaaagcagcagtttcaaggaggatatcaacaacagcagccacaacctggtttcacaccacatcaacaacaagcacctgcgcctcagaattcagacataatgactatgctccagcagctcattcaaggacaagccacatgagcaatggaaatcgctaagaagctggctgaattaaacaacaaagtcgacggacaaggtgtcgaacttaacagcaagttcgaatcaatgagcactaggatgagatatgtggaaggcatcctcgcttcaccatctgttaacaacaacccatgccagctttcaggcaaagcaatcatgaatccaaaggagtatgccactgcccatgccatcactatcagacatgatcgagagctgccaactcgacatgtccctacctcaaacactgaggacagtgttattctagagggggaggatttttatcaagatgatgttttggctgacaaaacaatcaaagagcccatccttgacagtcatcgcactcgaccacaagctccgctagctactaccttcgttgcaaaaccgacagctgcaaagaccaaagatacagtcttcgtgccaccgccttaaaaacctccacttccattccctggtcgatttaagaaagttctggttgcgaaatattgagccctattggaaaaacagataaaggatatgcctttagtggattgtctcgcgctaatacctgacgagcacaagtacgtgaaagacctaattatagaaaggatcaaagaagtccaaggaatggtggtattaagtcatgagtgcagtgcaagaagattgttcaagaaaagttggaagatccaggatcttttactctaccatgctccattaggcaattgcctttcagcaattatctttgtgatctaggagcctcagtcagcataatgccactctctgtggcaaggaagctgggtttcgttcactacaagccttgtgacctaaccttgattcttgctgataggagttcaaggagaccttttggcaagttagaggatgtgtcagtaatgattaatggagtagaggtccctactgattttgttgtgcttgagatggatgaagaatctaaggatcctctgatcttaggaagacctttcttggcttcaactggagcagtcatagatgttaagcaaggaaaaattaatcttaatatgggggaggatttcaaaatgaactatgaaatcagggacactatgaagaagccaacaatagaaggacaaaccttcttagttgaagaaatgggtcagctagctaatgaactgctagaggagcttactaacaaagatcaccttcaaactcctgtgatcaaaagtagtgaagctggatttctctccagtgagaccttgagctatgagatgtcattagactcacacaacaaagtaccaggatcagagatctttaaaggtgtcattgcgttagaaagagaggatgttgcattgaacgaggaaggctcaattgatattcgactagagtgctcaaccaaacagctaaagtcaagcatgagggcatcaaatgattggctagaactcaaggagaggtctaaatggcacgacagagctataagagagctaacacacactgtgaaagagctgaaggatcaagtcaaggagctccatgggaaagccaaccaagcaccactcgacatcaaggacgtcccaaatgatgaagttattcctatggttagaaaagaaggatgtgaattcacattagaacagtctagaaaagacgactatccagatgatgaaaaaggagcttacgaagaaagggccattgagtactcaattatagacctgtcacgggagcatgctgaatttgatgttgtatctactaaggaaggagaggagacgtcaattctactctatcatcctccttgagcctaatgagtgtgaggagtcaagctagagacttaaaacaagctcacttgggaggaagttccatgcttatccctgtatatagtttttattttatttagttacttttgatttgttttggttttggttttgattctcaggaaatgaataacagctggagcaacatcagggatgcaaccgagtgttcaaataaaaaaattcaatttttttttgatgaatcactcgatcgcaagatgagagtaaaagctcgagagtgcgatctagtggttttgggacaacatctttctcaacgacaatgtcaatctactcgatcgcaacatggaagtggtgtgattgagtggtcttctagtggaattgcccaaaccactcaatcgcaaggagaagtgaaaacgcccgtcaggacttcaatgataacccgcctgaagacatgccatccagctgccataatattgccctacaaaggcaatccacctatcaacagagggaccacaccgttctgcaagttcccgtaaggcacgagtctcatgagccaatggagcacaagaggcggaagagcgctaggatggtccgatcatcaagcaagggttggataatgtcgggtcggagaacacatgagcgacgtgctgcacaacctgctcgggttgcgatcgagcacaatgacgaggagatggcggagccacaccaagaaccggtcatgcctactgaggtaacacactaaaaccctttgtaaataccgcttttgtttttgtttttctgtgtttatcttgaattctttcacaaattttgattacacaagggactgtgtaatttaagtttgggggagggttcaagacgtatttgacttgtttttgtgaatatcatttgactctgcatatcatctaagtcatagagaaaaaacaaaaaaaaaattgaatttttttgaaaatgaattccacataaacagagtgatcatttagttgcattacatttaggatagagtttagagtgtttcatataggattgttgcatatgcataggggataatgaggaattagccttgaagcatgatgattcactaaaatgagttattagttctctaaggcatttgaatgactttgaagtaaaaccgcaccatgttctatagacaccactcgatgcatgtcatgacaccttttccctgtcaatttgaacttgaatctgacttataattatcatgtttgcatcgtttttgaactcgtggatagaatacatatttggattttctttcacttattcaccactcttgttaatccaagtagctgcttctattattggagtagttcacccttaaccaatccttctttcaagccatgttattttatgagagcatgtgaggcctattttcaggattgagcttggtagaacgtgttaggtttgagccgacaagagtagtatctcatgtagttccaatccgtatatttggacttagtaggactaggtgggaacttatttggggatagggattgagtgtgaaaagaaaaagaaagaaaaaatgggttagagtctttaggagaaggaagctaaaaatcatattgaggtctagtaaatgtttgggaagcataaaattgttaagatatgctctaaaaaaaagagatggcagcaaaaacagaaaagaaaaaaataaaaataaatgataagagccataagagtttaagaaaaatccaattcattagactagactcatagagtttaagaaaagcttctccttaagaacaagagctaaagaaaagaaaaggaaacattgatccaagaaaaaaatcgaaatatgcctttggtgcaaaagggtagacttaggatcatcattgggtttagagataggaccatcttcttgttattcacggtttatgtcattgggtagatgggatgctattcttgtatgcataggttggcacttacctttagcattcttctaaagctcggtcctttttcattgagagtcccctgctataaaaatctgaaccacttaaaagggactatctttgtctcataacctgtcactagccaaatgcgttcactagcgatgcatatcttgattcatgtttttgacgcattgtgcatttgagtgtaggtttggatcataacagagaatggctaaagtttttatgtaaaagtcgatcacctcgcatcttagaactgttagctggtacattgatcttaattgtcatatctcatgctttggttctgaatccccaacttcaaacctctccttccgcttatgtcttcttgtttgcttgagggcaagcaaagactaagtttgggggagttgatatgtctatactttgcatgatttaggcattcattcttcaccactttgtcattgtttcgtccacatttaatctcattaggagtagttttagtgtgttctgcatactaaggacgattttgcattaggattgcatgtgcattgcatatttggttgttttcaggtactttggatgcgttttgagttcaaacagaggagaaacataacagaaagtcagaaagcccaatgacaccttcggcaaaagtactctatcgcagcctcggagccgtgccagggcaaatcactctatcgcaaccccggagaagctagcagctcagtttcactcaatcgcgaagccggaggaatcaccccatcagaaccactcgatcaccacctcatgacattcactcgatcgcactcgatcacagggtcgttggaccattcaatctcgacttcactgcatctcactcgatcgcaaggcgaagcccctgaagcccagtttgatcaatgacatactcgatcacatggaagctcatttcagcccatcagatgccaatgacacattcggtcgcagggtcatgacgtgaagattcgctatatatctagtttccttatttgtttcatttctcgcttacataaactgcctcttagggttttcccgaaggcatccgttattatcttgtcttttttgcaactttcatagccgcagtgttttcctgcgactttgtattttcactttcaagtatttgatattcagttttcgtctaagtctttcatcatttctgttataatgttttcaatcgttgttttgctattgtctttgattatgtctgagtagtgaactgtatttctgaggatggaatagattagttgtggtttacttggtcgttttaggtggttgagtttagaatactagaatcccttctggcgtttaatgggcgttggatcctattaattccagagatatctgactctaccccaagggattggttgtagatagggtattggctttaacatgttgattcgataatacctacttagttagagatcgctaatgggaattagatcagtgtctagctttgcttgaggatttctatcacgggagtgaattaatttgttgttgaacttattgtctagggataaccgtgaaattttgtcaaccacctaaatagattaaggagaccatactattcgattaccccatccttaagaatcgtatatccatttgattgccagttatcatttctgctttgttatttacctgcctactattgccatttctgcttttagtttcatttcatttctgttattgcatactaggactgttagaaccaaccgactctctacttggcttgacttagagctttctaatcatatctcatctgtttgcatcacaccggattggattgacatcttaaaatactacaacgacaggatagtgttttacgattaattgagaaaaatcctactatcatatcttctaacaaggaaacaatactttaacttttaggaaccggttgtgattctaggtcttatcctcaatcatataactgacatctagtcatagttgactacaaaacactaaccaagcttcttattgcttctcaaaacttttatggtgaagccaaagtccctatgagtatttggctttgtatcttctaacaaggaaacactacttgaacctttgggaaccggttccggttctagttcttatactcaatcatacacataacatatagtcatatttgaatccaaaacactaaccaagcttcttattgcttctcaaagctttgatggtgtagtcgaagtttgtatgagtctttggctttgtatcttctaacaaggaaacaatactttatctcttgggaaccagttgcggttctagttcttctactcaatcatacacatgacatatagtcatatttgactccgaaacactaaccaagcttcttattgcttctcaatattttcatggtgtagccgaagtccgtatgagtctttggctttgtatcttctaacaaggaaaaaatactttatcttttgggaaccgactgcgattccagttcttatactccatcatacacatgacatctagtcatatttgactctaaaacactatccaagcttcttcttgcttctcaaagctttgatggtgttgccaaagtaagtatgtgtctttggatttgtaacttcaaacaaggaaacactactttggcttttgggaaccagttgcgtttctagttcttatactcaatcatacacatgacaagtagtcatatctgacttcaaaacactaaccaagcttcttcttaattttcaaagctttgatgctgaagctgtagtccgtatgagtctttggtttgtgtcatgtaacaaggaaatatacttaggttttcaagaactagttgcgattctagttcttatacgcaatcatacacatgacatctagttatatttgaatcctaaacactaaacaagcttcttctagtttctcaaagatttgatggtgtagccgaagtccatatgagtctttggctttgtatcttctaataaggaaacactattttagcttttgggaaccggttgcggttatagttcttatactcaatcatacacatgccatataatcatatttgaatccaaagcacttaccaaatttcttattgcttctcaaagttttgatggtgtagccgaaatccgtatgagtctctatctttgtatcttctaacaaggaaacactactttagcttttgggaaccagttgcggttttagttcttatgctcaatcatacacatgacatcaagtcatatttgactccaaaacactaaccaagcttcttattgcttctcaaaactttgatggcttagccgaagtccgtatgagtctttggctttgtatcttctaacaggaaacaatacttttgcttttgggaaccggttacggttctagttcttataaacaatcatccacatgacatcaagtcatatttgactccaaaatactaaccaagcttcttattgctacgcaatactttgatggtgtagccgaagtttgtataagtctttggatttgtatcttttaacaaggaaacattactttagcttttgggaatcgatggcggttctagttcttatactcaatcataaacataacatctagtcatatttgacttcgaataactaaccaagtttcttattgcttctccaagctttgatggtgtagccgaagtccgtatgtgtatttagctttgtatcttcaaacaaggaaacattactttagcttttgggaatcagttgcggttctagttcttatactcaatcatacacacgacatattgtcttattttgactccataacactaactaggcttcttaatgcttcccaaaacttttatggtgtagccaaagtccgtataagtctttggatttgtatcttttataaaggaaacattactttcgcttttgggaattggttgcggttctagttcttatactcaatgattcacatgacatcatgtaatatttgacttcaaaatactaaccaagcttcttattgcttctcaaaatttcgatggtgtatccgaagaccgtatgagtctttggctttgtatcttctaacaaggaaacataactttagctattgggaatcggttgccgttcaagttcttatgctcaatcatacacatgacatctagtcattttgactccaaaacactaaccaagcttcttattgcttctaaatattttcatggtgtagccgaattccgtatgagtctttggctttgtatcttctaacaaggaaacaatactttatcttttgggaaccgactacgattctagttcttatactcaatcatacacatgacatctagtacactatccaagctttgactctaaaacactatccaagctttttcttgcttgtcaaagctttgttggtgttgccaaagtcagtatgagtctttggatttgtatcttcaaacaaggaaacactactttggcttttgggaaccagttgcgtttctagttcttatactcaatcatacacatgacaagtagtcgtatgtggcttcaaaacactaaccaagcttcttcttgcttttcaaagctttgatgctgaagctgtagtccgtatgagtctttggtttgtatcatgtaacaaggaaatatacttaggttttcaagaactagttgcggttctagttcttatacgcaatcatacacatgacatctagttgtatttgaatcctaaacactaaggtggtgttattcaattatggagttaaagtcaattcttaaagctttagacttgttttctgatattgcttttaagaatatgtttgtatgaattttaaaatctctgcaatatgtcttggattttgattctagtgatttactcatgaaactccaaagaggtttcatttcaaatgaattaatatacaaagattttacaagtcttttagtttttaataacgctggattttaatgaaatatttaaaatcttaattgaataacatcaaactttaaaatctattaagcatgatttacaaagatgagttccaataacactaaattttaaagttggatatagaatcattagttgaataacagtggattcggcttggatttcaattctattaaaatccattaacgaataacaccccctaaacaagcttcttctagcttctcaaagttttgatggtgtagccgaagtccgtatgagtctttggctttgtatcttctaataaggaaacactattttagcttttgggaaccggttgcggttatagttcttatactcaatcatacacatgacatatagtcatatttgaatccaaaacacttaccaaatttcttattgcttctcaaagttttgatggtgtagccgaaattcgtatgagtctctagctttgtatcttctaacaaggaaacactactttagcttttggcaaccggttgcggttctagttcttatactcaatcatacacatgacatctagtcatatttgactccaaaaaaataaccaagcttcttattgcttctcaaaacattaatggcttagccaaagtccgtatgagtttttagctttgtatcttctaacaaggaaacattaatttagcttttgggaattagttgcggttctagttcttatactcaatcatacacatgacatctagccatatttgattccgaaaaactaaccaagcttcttattgcctcacaaagctttgatggtgtagccgaagtcggtatgagtctttggctttgtatctacaaacaagaaacattactttagcttttgggaatcggttgcggttctagttcttatactcaatgatacacatgatatcctgtaatatttcactctaaaatactaaccaagcttcttattgcttctcaaaattttgatggtgtacacgaagtccgtatgagtctttggctttgtatcttctaacaaggaaacataactttagctattgggaatcggttgccattctagttcttatactcaatcatacacatgacatctagtcatatttgactccaaaacactaaccaagcttcttcttgcttctcaaaattttcatggtgtagccgaagtccgtatgagtctttggctttgtatcttctaacaaggaaacactacttttgcttttgggaaccagttgcggttctagtttttatactcaatactacacatgacatatagtcttttttgactccaaaacactaaccaaacttcttgttgcttcttaaagctttgatggtgtagccaaagtctgtatgaatttttggctttgtatcttctagaagggaaacacaactttagcttttgggaatcagttgtggttctagttcttatacttaatcaaacacataacatctagtcatatttgactccaaaaaactaacgaagcttcttattgcctcacaaagttttgatggtgtagccgaagtccgtatgagtctttgactttgtatcttcaaacaaggaaatattactttaggttttgggaaacggttgcggttctagttcttatactcaatcatacacatgacatctagtcatatttgactccaaaaaactaaccaagcttcttattacctcacaaagctttgatggtgtagccgatgtccgtatgagcctttggttttgtatcttcaaacaaggaaacattactttagcttttgggaattggttacggttctagttcttatactcaatgatacacatgacatcctgtaatatttgactctaaaatactaaccaagcttcttattgcttctcaaaattttgatggtgtatccgaagtccgtatgagtctttggctttgtatcttctaacaaggaaacataactttagctattggcaatcggttgccgttctagttcttatactcaatcatacacatgacatctagtcatatttgactccaaaacactaaccaagcttcttattgcttctcaaaattttcatggtgtacccaaagtctgtttgagtctttggctttgtatgttctaacaaggaaacactacttttgcttttgggaactggttgcggttctagttcttatactcaatactacacatgacatatacttttatttgactccaaaatactaaccaaacttcttgttgcttcttaaagctttgatggtgtagcagaagtctgtatgagtttttggctttttatcttcaagaagtgaaacactattttagcttttgggaagatgttgcggttctagttcttatgctcaatcaaacacataacatattgtcttatttgactccaaaatactaagcaagcttcttattgcttctcaaagctttgatggtgtagccgaagtccgtatgagtctttggctttgtatcttctaacaaggaaacactactttagcccttgggaaccagttgcggttttagttcttatactcaatcatccacattacatctagtcatatttgactccaaaaagctgacatagcttcttattgcttctcaaagctttgatggtgtagctgaagtccttatgattctctggctttgtatcttctaacaaggaaacactactttagcttttgggaaacggttgcggttctagttcttatactcaatcatacacatgacatctagtcatatttgactccaaaacattaaccaagcttcttattgcttctcagaacttggatggcttagccgaagtccgtatgagtttttagatttgtatcttctaacaaagaaacattactttagtttttaggaatcagttgcggttctagttcttatactcaatcgtacacatgacatctagtcatatttgactccgaaaaactaaccaagcttcctattgcgtcacaaagctttgatggtgtagccgaagtccgtatgagtctttggctttgtatctttgaacaaggaaacattactttagcttttgggaatcggttgcggttctaattcttatagtcaatgatacacataacatcctgtaatatttgactttaaaatactaaccaatcttcttattgcttctcaaaattttgatggtgtatccgaagtctgtatgagtttttggctttgtatcttctaatagggaaacataactttagcaattgggaatcggttgccgttctagttcttatactcaatcatacacatgacatctagtcatatttgattccaaaacactaaccaagcttcttattgcttctcaaaactttcatggtgtagccgaagtccgtatgagtctttggctttgtatcttctgacaaggaaacactacttttgcttttgggaaccggttgcggttctagttcttatactcaatactacacatgacatatagtcttatttgactccaaaatactaaccaaacttcttgttgcttcttaaagctttgatggtgtagcagaagtctgtatgagtttttggctttttatcttcaagaagtgaaacactattttagcttttgggaagatgttgcggttatagttcttatgctcaatcaaacacataacatattgtcttatttgactccagaatactaagcaagcttcttattgcttctcaaagctttgatggtgtagccgaagtctgtatgagtctttggctttgtatcttctaacactactttagcccttgggaaccagttgcggttttagttcttatactcaatcatccacatgacatctagtcatatttgactccaaaaagctgacatagcttcttattgcttctcaaagctttgatggtgtggctgaagtccatatgattcttttgctttgtatcttctaagaaggaaacactactttagcttttggaaaatgggttcgattctagttcttatactcaatcatacacatgacatctagtcatatttgactccaaaacactcaccaaacttcttattgcttctcaaagctttgatggtgtagctgaagtccttatgattctttggctttgtatcttctaacaaggaaacactactttagcttttgggaaacggttgcgattctagttcttatactcaatcatacacatgacatctagtcatatttgactccgaaaaactaaccaagcttcttatagcctcacaaagctttgatggtgtagccaaagtccgtatgagtctttggctttgtatcttccaacaaggaaacattactttagcttttgggaatcggttgaggttctatttcttatactcaatgatacatatgacatcctgtaatatttgactccaaaatactaaccaagcttcttattgcttctcaaaatgttgatggtgtatccgaagtccgtatgagtctttggctttgtatcttctaacaagaaaacataactttagctattgggaatcggttgccgttctaattcttatactcaatcatacacatgacatctagtcatatttgactccaaaaaactaaccaagcttcttattgccttacaaagctttgatggtgtagccgatgtccgtatgactctttggttttgtatcttcaaacaaggaaacattactttagcttttgggaattggttgcggttctagttcttatactcaatgatacacatgacatcctgtaatatttgactctaaaatactaaccaagcttcttattgcttctcaaaattttgatggtgtatccgaagtccgtatgagtttttggctttgtatcttctaacagggaaacataactttagctattgggaatcggttgccgttctagttcttatactcaatcatacacattacatctagtcatatttgattccaaaacactaaccaagcttcttattgcttctcaaaactttcatggtgtagccgaagtccgtatgagtctttggctttgtatcttttgacaaggaaacactacttttgcttttgggaaccggttgcggttctagttcttatactcaatactacacatgacatatagtcttatttgactccaaattactaaccaaacttcttgttgcttcttaaagctttgatggtgtagtagatgtctctatgagtttttggctttctatcctctagaagtgaaacactattttagcttttgggaagatgttgcggttctagttcttatgctcaatcaaacacataacatcttgtcttatttgactccaaaatactaagcaagcttcttattacttctcaaagctttgatggtgtagccgaagtccgtatgagtctttggctttgtatcttgtaacaaggaaacactactttagcctttggaaaccggttgcggttctagttcttatactcaatcatccacatgacatctagtcatatttgactccaaaaaactaaccaagcttcctattgcctcacaaagctttgattgtgtagccaaagtctgtatgagtctttggctttgttcttcaaacaaggaaacattactttagcttttgggaatcggttgcggttctagttcttatactcaatcatacacatgacatctagtcgtatttgactccaaaacactaaccaagcttcttattgcttctcaaaattttcatggtgtaggcgaagaccgtatgagcctttggctttgtttcttctaacaaggaaacactactttaccttttgggaaccagttgcggttctagttcttatactcaatactacacatgacatatagtctttttttgaatccaaaacactaaccaaacttcttgttgcttcttaaagctttgattgtgtacccaaagtccgtatgaggtttttgttttgtatcttctagaagggaaacattactttagcttttggaaaaatgttgcggttctagttcttatactcaatcaaacacataacatcttgtcttatttgactccaaaatactaaccaagcttcttattgcttctcaaaactttgatggtgtagccgaagtccgtatgagtctttggctttaaatcttctaacaaggaaacattactttagctttcgggaaccggttgcggttctagttcttatacttaatcatccacatgacatctagtcatatttgactccaaaaaactaacaaagcttcttattgcttctcaaagctttgatggtgtagctgaattccatatgattctttggctttgtaacttctaacaaggaaacactactttagcttttgggaaacgattgcggttctagttcttatactcaatcatacacatgacatttagtcatatttgactccaaaaaaataaccaaacttcttattgcttctcaaaacattattggcttagccgaagtccgtatgagtttttagctttgtatcttctaacaaggaaacattaatttagcttttgggaattagttgcggttctagttcttatactcaatcatacacatgacatctagccatatttgattccgaaaaactaaccaagcttcttattgcctcacaaagctttgatggtgtagccgaagtcggtatgagtctttggctttgtatctacaaacaagaaacattactttagcttttgggaatcggttgcggttctagttcttatactcaatgatacacatgatatcctgtaatatttcactctaaagtactaaccaagcttcttattgattctcaaaattttgatggtgtacacgaagtccgtatgagtctttggctttgtatcttctaacaaggaaacataactttagctattgggaatcggttgccattctagttcttatactcaatcatacacatgacatctagtcatatttgactccaaaacactaaccaagcttcttattgcttctcaaaattttcatggtgtagccgaagtccgtatgtgtctttggctttgtatcttctaacaaggaaacactaaatttgcttttgggaaccagttgcggttctagttttaatactcaatactacacatgacatatagtcttttttgactccaaaacactaacgaaacttcttgttgcttcttaaagctttgatggtgtagccaaagtccgtatgagtttttggctttgtatcttctagaagggaaacacaactttagcttttgggaagatgttgcggttctagttcttatactcaatcaaacacataacatcttgtcatatttgactccaaaaaactaacaaagcttcttattgcttctcaaagctttgatggtgtagctgaattc

SEQ ID NO: 539 - DNA, 63292 bp, Arabidopsis thaliana
gaattcgaaattaggttaaatattctaaatttatttaaataactggaaaaataattttaactaaattattttttatgtttgataattaaaatagaaaatatatgtttaaacatttaaaaataagattaattacatttttggtttatattaatttttgttaattatattaattgaattccttttgcagcaactgaatcatattaatttaaaatattcaatgcgtatattcctttcttaaatttaaatatatcacttctccataattatagctaatcaaatattcagttggatattcatttttgaagttaacataaagtttccggacaatttccataattaaataactacttataagataattgctaaacattctcttataattatgagatttattataatcattaaacttgacttccacgatttaatattttattcatattttttacctaaaaatttatatcttataaatactgtacgtcccatttcaagaactcactcagcagttcctattttcttttactctctcgcctctttttttattcaagcagaaaaaaacgagaccatgaagaaaactgaggttgtggatcgactagaccatggagaaagcaatatatcgaggtgtcctctcacactctctgtttttctctatttttttcatgtttttctcacatcttttttttataatatttatgcaggtaatgtggaagattaaaatgtagacgcacacatgattttgttaaagtatgtcttgctttctaattatttatcttttatgcaaagtaatatgttaacctttttttacctctctatatatttataagatgagtaattctgattgaattttttgatagggattacggtctttttcctgttaatttgcagatacacgatgatgatttataatttgactactatcttccaatgaacaacaaaattataaggtatgcaatattttttcttaaatctgattgataaattctccaattattttccaatttataaagtatgaagaaagacattttccaattattatttgtcaaattttataattcacttacatgttaatgacatacacgaaaatgtacaaatcttctatgtatacaactacatatacaaaatatacaattatgtatccaaacgtacataccaactatagacatatattttttatgctacaaaccgaggaaactacatatactaaacaaaatatggtttgaccagactaaatatatttagttggtaccaataatacatgataaacaactacatgtttaaagataatgaaaatatagtagagtttctgtggaatacacagaactgagatttgatgattgattaaaccaaagataccgtgcgtagcacgggtactgacctagttccatattataaccaacatatttccatagtaaaattctaatctataaccaatcagatctttcaatcgaatcataaaacttgtttcaggaaaaagctattgtatcagcaataaaatcttcaatttaaaccttagcaatacaagaaaaagcaagttgtcaaattcttttgttgttacacttgaatataagatatcttatttaaaaattatgtaatttttttttgttctaaatcttttggacacttgaataacaaaacaaattcaaaatgaccaaatagcagaataataagagaggaaaatcacaagaatctaatccagcaagcttactatgtacctagcggacactttctctattgatgccggaaccaccacctcttcgtcattgccttatctgaatcgaaaaaactacaaaaaaataagctgatattgctcattgagtatgctacacttacaaaatcaaattcaaatcaaattatatgtttatctcgagaaaatgataatttagagtttttatcgttcaatgtatttatagttatctttttatatttttaaaattaataaaaaaggtttttttgttttacacatgtcaatatatgattttagtttctcaaaatttgccattaacataattatggtacattttgatttatttcctatattatcatattatcccatatattaaaaaatcaaaatttctttatttaatgaaagaatatttttttctcataaaactaatttgcatgtatttttttaaagactttttttaatatatacttagttacattttatatatcgaaaagtttttttaaaatcttaacctataagaaaaactaacaaatgtctaaaatatgatattaatggttattattttgttaaaaataatataatcaatactaaaataaaaataaaatattattgttatagttttaaagtgtaagatatcgtgcaacctcttttcacaaatagaatgtataatttcaagtaacacataaatagaatgaaacaaaattggttcatgcatggagtctagttctattttccaccacctccaagtaattttgaatttgaaaattttgtttttattttgtttttaactagaaaaatttgttttaaactagtagctgaatcattgagaaaaaaatgctaaaaccctattgaggtaggttctctatcttctctctcttcaatttttcagagcgaggccgactaacttattttcgtctgaattttttccgattatcaaatcctatttagggggctctcttccaacatgcactagatcctttgtagtatttcgttgacttttatctgatatcaatttgaccttcaaagtcaagatgactggcgtggccatcggcaatgccgctttgctctcggttgttcatgactcaataaagtttatgtcgtggtggtcattgatgtggtcaagccatagacttttgaaatcaaatttgatccctagctcttaagcttcttcaaatccgtcaaattactttctcttgccttcaaccgattgatcccaatccctaatctctgagatgggagatgttgtggttaggcggctccttcaccttcttcaaacaagaattcacaaactggtcaagatctaaaaggtctactttcgcttatccggttttctgtccagtgaatctcaacttaacggtgtcaacatatatttgatggttccaaagcttcatcagcgaagcctcatcaagctgggttttcaattaggtgctttaatttcttaagtctgtttaacaacaagagaaggcaagtagttctgagttttccggtggttgtggcatttttcgtcatcaacagcaaaatttagttcttggaaaagaagtaattgtctttcagatgcttctcaaaagaattaactagatattaaatattagattttgtttgtttgattgtggttttgtgcctataatttgtttatgttattgtacttttggtttgtgttttagcttcagggaattcttgtactaaggcaaacataaaatcaccattcgtactatttatctatgacatctcttatatatgtgaaactagtgtatttaaacaagcattccatgtacttcacattttaaaagaatcaaatatatttttagaaagaaatttgcgtaaggcgttgatgactctactcacctcacatgatctttatgtggtgttatcgaacatgtctagatgcaatgtgtatccatgggcaaaactatagatttaaatgctttacatggatatgatgaacaattgagagtggaactagagaaactctttgatctcaacagtgaattacaaatcccacaatcaatagaaaattgtcttcaaagacaatgaaggagatatgatgcttgttggggtgatccatggttttataattcctctttatttctatatattgaaaatatgtgaaggcattaaaagaaaatgtttgaagttgagggttgtgctaatgtagttaattttgcaacatggcgaataaaatagtcatatgatcaaaggaggaagtgtagaaaatgaaatttggaaactcggagacagagattagaaagcgacatgccacatgcaagatcatggtgtgttaaacacactacggttaataatacagggagatacaaatagtcactatcaagagatcatgtgacattgaaaagaattcattagtctcaaggatcgctgacacgaaccatgaaaagtagttatgagtatgcaacagattcttaccttacgagtaggaatccatggatagcttggtaaaagacttctctccataatagaggagagtggcgaaagtttctccaagtagtagcattgttgtaacaacagtttcttgtatcaaaagtaaatatgattattttgaccctcaaggtcaggtcaaataggtattgcgatgttgtgttaagttgtagcttggacttcctcaggaagatgatttgagggagttggatttgtaactgagaagagaaggcgactaaaaacatggttaacatgggatcacagaatgtacaagccaaaatataaacatttaagccgagaatattggtcccatcctaaacgaaaggagcttggggcagttgaactgatatccttcgtgctaaagagttcttcaaacaaaagccaagatgagcttgcaaacaggaaccgagataagaaagattcaataccaaactagactcaatgatttaaggatatagtgatgtcataagtcaatcaacatatggaatagagaaatccaatcaaataattaagaatacaaaggaactaaatcggagatgtgcaaagtaatcggagagagtgatggggcacaaaaaaaaagagaaagctttctttgaggaacagaaaggccatagttctacagatgagaatgtggatcaaactcattaaggaccatctctagagagattagggtttcgtcgagccaactagtgatctactcattacaaaacttggccaaaacctaaataatgggccacaactggggaacatgccagctcactaaaaacttggcttctttttgtaagtgtgaatggtggtcgttgcttggcggttgcactgtaacaaatcaaaggtcctagatggtttcatcgatgctggaaaggaaggcagttttggggttttaaaaccctcagaaagagggacgaaggagatgaaaataaggatcacatattgaaacatgcagtagctctctagacagatttggtggtaacagctttgcgaggagggatgtgaacagagggaggaaagagagaggagtcactgggtatcttctttgtcttctataactgttgtttgagctttgtttgaagctttccaggagaacaaaatattgaaatgattgagatatggaccaaaacgagactaaaggggtaatacaattacaaaagttgtgagcaagaagagacaaattcttatgttggcgagccaaagcttcattgggttcagaaatcaaggctagggtagctttctcaatataagagcatgggagcggtttctattttttcctaaaatctcaattattatcttaaatttgttgttatttggacaaaaattagagttaaattaccatcattttaatgaccaaatttgttatttcgttcgaatattttactaattgattgttagcgattatgatgaataaacgataaatttaattatttgaaaataatatgtcctatttacctggaatgtagatttatttaaatcaatctacgacaaattgatttttgttgttatattgatgtaaaccccatttatgacgaattaacaacaaactggatcgttattatccatgtatttcttgtagtccagaaagaaagataattcaatccaaattttgaagcaaagttttatttaaaaacagaccgaaatttgtcggttaagcagggaagatataagcattgtaagataaccatgtaggttgattggtcaatgcattatccagtatcttctttgcctcatatttctccatattaattgtttttgctcttatagtttcctttttgatgatttccgctgtatgaggtataaaaatattgatgaagaaacaaacaaaacaatactataacacatcaaaagctgattaacgaatttccaaatattacttaaactcttgacttgaaacagattttgagaaagtttttttatccaaattaaaaacctcaaagatttatttcctaatcagataacaatttaaaattttctgaaaacatattttgaatagaggatatcaaaaaatttcaatgaagaaaataattataaatcaacataaataaatatttgaatagatggattgacagcaaaagtttgttaagatctaaagatattgttcctccaaattatatgcttgcataagaaataatctatcaaaagttagaaaaatacatagcatatctaaaaaattgtagtaatacattgatgatttagaaacgaaaagttgttgcaaaaactgatctaaagagtttttaggcacaaaaactcattacatattaaaaacaaattataatttgatggacaaaatttgttaaaatacaagaaacttgaaaaattatgaaacaaatttgggttttaaaaacaattttatttatattctaaaaaattgatgcatttcaaattgaatatagttgtgaaccaaaagaattcaagatacatatatgtaaaaaagcaatattataccaattcgtgcaacaaaacaaggattaattaattagatggtttcacgccataattcgttaaaaacaaatctccaacagacagtttacccatgaaaaaaccgttggaaaacttataaaacatttcaggataaagtaattaagaaatttacaatgaattaaacatgcatgatctgtttctgctgccccaaaatatattatatactaataaatttaaaaatggtcaaggtaacataatggcaagttggtcaaagtaaaatgatctaatatccatattatcttggataattaataatatagagatttagaagattttggttgagatttaaaattatgtcttttctataattattgtttacttatcttttaaaaacgattgtataccatgcaaacctttttaaaaatctcttgtaaatcattctttgacacttacttatgctttaaaaacgattgtaaatcatgttaaccccttttaaaatcccttgtaaatcattcaaagccacttacttatgctttaaaacgattgtaaaccaaacaaacacttttaaaatctcttgtaaatcattctatgccacttacttatctttaaaaacgattgtaaatcatgttttacccttttataagcttttaaaatcccttgtaaatcattccaataccacttacttacacttaaagaaacattgtaaaccatgctaaccctttttaaaaatccttgtaaatcattctatgccacttacttatgctttaaaaacgatgataaatcatgttttacccttttataagctttgaaaatcccttgtaaatcattcaaagccacttacttatgctaaaaaacgattgtaaaccatgttaaccctttttaaatcccttgtaaatcattctatgccacttacttatgctttaaaacgattgtaaattatgttttacacttttataagcttttaaaatctcttgtaaatcattcaatgtcacttacttatgcaaatctcccttaatctaaagcgtaaatgtataaatatacttgattaaaattcgttcacaaatcaaaaccaaaaccaaaaccaaagcctttaaaaggtttatgtaaattatttttcactctttactaaggaaaacccccaaaaatatgatgtttaactaaaccaaaaatcgcattaaccttaaacatattagggaaatttgcaaaactaccctttttttactacccttttgcaacaatacccttttatattgttcatttttaaaaatatcgctttctttgaacagaatgaccaaattaccctcatctaataagaacatgtaattggaaactgaatgttttccgccaattttttggcgccaaaatttatttttcccgccaaaaaagaatttccgccaaactttttttcccgccaaaaaaaaatttcccgccaaaaaaaaaatttcccgccaaacttttttctcgtaagttattttttccagccaaaaaaattgttttaaaaaaccttgtaaattttttaaaaactcttttaaaaaaccttgtaaagttttttaaaaactcttttaaaaaaccttgtaaagttttttaaaagctttggtagttgctaaaaacctttgtaaatcattttaaaacttcttaaaatctttataaagtctttaaaaacataggtaaatactttgaaacccctttttaaacttttgtaaatcattttaaaactttttacaatagttttacaagatttacaatcgttttttaagcataagtaagtggcattgaattatttacaagagattttaaagcttataaaagggtaaaacatgatttacaatcgttttaaagcataagtaagtggcataaaatgatttacaagggatttaaaaagggttaacatggtttacaatcgttttttagcataagtaagtgacattgaatgatttacaagggattttaaaagcttataaaagggtaaaacatgatttacaatcgtttttaaagcataagtaagtggcataaaatgatttacaagaatttttaaaaagcgttagcatggtttacaatgtttctttaagtataagtaagtggtattggaatgatttacaagggattttaaaagcttataaaagggtaaaacatgatttacaatcgtttttaaagcataaataagtggcatagaatgatttacaagagattttaaaagtgtttgtatggtttacaatcgtttttaagcataagtaagtggctttgaatgatttacaagggattttaaaaggggttaacatgatttataatcgtttttaaagaataagtaagtgtcaagaatgatttacaagggatttttaaaaaggtttgcatggtctacaatcgtttttaaaagataagtaagtggtatagaatgatttacaaggattttaaaagcttataaaagggtaaaacatgatttacaagagtttttaaagagttttaaaaggatttacaaggattttaaacctttgtaaatccttttaaaactcttataaagtctttacaagcattttttaactcttagaaaaagaattgtaagtatttaaaacatttacaactcttttaaaactattttaaaactgttgtaaacctttacaaaaggttttaaaaagatttacatgagtttttaaagggtgtaaatctttaaaaactcttgtaagtcttttaaagccctttaaaataccttggaaatcttttaaaacccttttaaaatcgcttgtaaatcttttaaaacccttttaaaatctcttgaaaatcttttaaacccttttaaaatctcttgtaactcttttaaaatatttttaaacccttttaaaatcccttgtaaatctatttcccgctaaaaaaaattttttttacgggaaaaatgttttcgaattttttttttgcgggattttttttttctaaattctttggcgggcaatttttttccgaaattttttggcgggaaaaatgtttttgaaattttttttggcgggaaattgtttttcgaaattttttggcgggaaattttattttgaaatattttaggcgaaaaatattaatattttattttgttaacctaaatcaatttacaaatatgggtaaaatggtcattaaaaaattaaataggatataaataaaaatggtaaacagaaaagggtagaattgaaaaggggtagtgtgaaaaggacattagaaagaatttttcaacatattatccattttcatccaacaaaaatatataaataaaacaaaagattaaaattttaaattttgaattgattttctatatgattcggatagattagatcaatttaattattatctatatatagagagacaaaaagaaaatgtgtttacaaacttacataaatatcttgcttgcacataatcaacacaataaacacactacaagtctttcatgtgctaatacctcaactttttcagttaaccataacttgacacctctgtaaaatgaatagtcaatcagaacatttcgattaatacacctcatttacattgaccaataagaacttattatttttccatgtcatcccatcaactaaactaaaattagacattggcctagcccaaccaaactacttccaaaactaaaatctatataaaaacatgggcctaaacttctttatttagaaaatttaaacctaggcaaataaactaaaccgaatgtacaaaaccaaaactgaaacaacctgacccgttttatttttaaacataaataaatatttccataaatatttaattaaaccaaccaataaaacaataattaaaccgtaagtcaaaaatactattttatgaataaataaataattcaaccaacaaaaccaagaatgactaacaatcctaacacaatactaaccggttctaataaccaaaacacaaaaataaaccaaacgagttcctagatcatcctctcttccttgccatgatttcacgatcacactttatctttacctgcatcaacaatacaatgagatgcgtaagtattatcacaaatacttagtgaggcgatcctcccatctacgagctatacacacaagcaattaaaaaagtataatcacaaatacatcataaacaaacctgtcattgaacgattcaccaaaaacacattcaccacacctacataccatcacacaaaacaaaacatacaacccaatcgctcagataagctcatggtcatgcactcaccttaacaaattgattctaacaataattaaacccagaagagactctctttgcgtctgaaacagtgcagaaacgtcatacaacaagtcacaaccaaaagcaaccttgaaacaaactggacatgaaaaacagaaactaccagtctcaaagacgaaaccctaaaatacaaactaaccgttaactattaaatcactctggtaaaactctagccctagacgtcacaaagcttcccacaaaaacgcgtgccaatcggaaaccagatgagactacaatcgcagttgcaatccccgctggtcctaattcgcgtctgagaaaacgggtctcaagaaactgcgaataactccaccaattttaattcaaaactaattttgtaaactggagaataacgataaaagacttgggaataaccctactaaatgtcgttacctttgaccacgatttgatatgtcgaaaccgtttccttccaaaccctaacgattctagttcttctccttctttctctttttctcctttataaaacgaaaagtggctaactaaagccctaattttgagtttccttctcatataggcacactcttcggtttccaattaacccaaccgattagaccggacgatttaaatacaaaccctaaccgattttccggttcacgggcgttacaattctcccccactaaaatagattcgtcctcgaatctagcttcacccttccactccgagtaactccgtgcaaccatcactacggtccgcactccctccaaccagaccccctctaggtctctctatctaatcgatatactcaagatttactagtcattgttgctcacaactcactctccactctcagaccgcaatcttcgagtatcaaccgtcactctcaggcctcggcctacggtatctcgggtatcatacgtattatcttccccactcaaagtcaaaccctgagttgtgtcggctcactctcagccaaaaagtcatcgagttacgacacttggagaaaataataccacaaaactcgctctcgggtcgtcaccctaaagcgtgctatcggattgtcacccgaagccaccgtacccctcgcactctaaagacatcaagtccctcgagttatcggtacctcaggagcatactccgctcttcacgagtcgttgggaccctcatgtccctcgagcaaacaatactaaacgcttccgagcatatctccaaactctctcatggattcgcgtaagacacctctatgcctcaccatccatcatatcccctcgagaacatccttatgaccaactcccgaccatctcgtaaacacacctctctcttaggttgtttactcaaactttccaaaaatagataagtcctttttgggaaactttccatttttggaaaccacacaacacattcttaaataagacagctcaagtcaaatctaagaaaaaaaatactcatcttataaatcatcgaacgtcatgatcgttacaactccaaacgaaaatacaaatgaaagagaaaataagaataacaactcaaaatctcaaaaactcaacaacactgaaactggaaacaaaggaaagacaaactcatgcagcaacctgcttctcgaaccatttcttgaaccttgccttcatcctcgcctctggctcccaagtcccctctgtcacaccatcgaagtcccacaggactttgatcaaaggaatcttcttcccctgaagttcctttatcctcctctcgagaaccctcactggtctcgcctccaaagtcatgttgggctgaagatcctctggaatcttagccaacacctcatcatccttgtgaagacacttcctcagcatcgacacatgaaagaccttgtgaaacgcacgcataacatcaggcaacactaacatgtatgccactggtcccaccctgtcaacaatcctgaatggacccatgtacctcggactcaacttagtctctgagatagacctgttcggacctcgcaacatggccatcttgagatacactctgtcccaacctcaaactcaaactctctcctcctcttgtcagcataactccgctgtcgatcatgagcttccttcatgttcagcttaagaacccggatcctttcggtggtctcctgaacataatctgcaccatatatgctcctttcccccacttgggtccagcataacggtgtcctgcatggcctcccatacaacgcctcgaaaggagccatcccaatactcgtttgatagctgttgttataagcaaactctaccagactcaagtgatccgcccaatgacctccccaatccaagacacacatccgcaacatatcctcaagtgttgaatagtcctctcagattgcccatctgtatgaggatgataagccgtgctcatctgcaccttagtgcccatctcagcctgaaaggatctccaaaatgcagaagtaaacttggaatccctgtctgacacaatactcacatgtactccatgcaacttcacgatctcgcccacattttgcttagccaacaccgccgttccatcggtttttctgatggccagaaaatgtgctgacttagtcagacggtccacgatcacccaaatagcatctttggttcgcgacacatgcaatccaaccacgaaatccattgtgataaaatcccacttccactcaggaatggataaactttgcaagaggccacccggcacctgatgctcagccttaattaactggcaaacatcgcattgtacgacccaattagctacatccctcttcatcctgacccactgatagtaccgcttgaggtctcagtacatcttagtcgctcctggatgaatggaaaacatgctcgcatgagcctcactcaagatctcccgtcgcaactcctcatccttaggcatacaacctcgcccatgcacaaggatagtcccattagctgcgaactgatactcagagccctctgccttagaagctgcaatcaacccctcatccttctcctgagccaaccgaaccctactcggaagatctgctcgatccacagcttccaatttcaatgactcccgtgctacagcacacaatcacaaagcaccaatctcactcaccaaggcctcaacactctgccttggagccgcactcacgcgcttatggctcaacgcatctgcaaccacattagccttaccaggatggtaggctatctccagatcataatcagccaccagctccatccatcgcctctgccttaggttcagctctggctgagtggagatatactttagactcttatgatccgtgaacacctgcactttcctgccataaagataagacctccaaatcttcaaggcaaagattacctcagccatctccaaatcatgagtaggatagttgccctcatgcttcctcaactgtcgcgatgcataggcaataaccttcccacgctacatcaaaacacaatccaaaccaactctcgaggcatcaatatacaccatgtaaggctctccatgctctggcaatgctaaccctggtgtactcgtcaacatctcctttacgctcacgaaaccctctttgcactccggtgaccacacaaaaggaacatccttccctgtcagcttagtcatcggctgtgccatactcgcaaaccccttgacgaacctcctgtaataccctgccaacccaagaaaactcctgatctcagtggcattcgtcggtctaggccagtctctgatagcctcaatcttctctggatccactgaaactccctctgcagaaacaatgtgaccccaaaaacccatctctatctgccagaacttgcacttgctcaacttagcgaacagcttttgttctcgaagcttctccatcactcttctaagatgtacctcatgcttctccggacttttagaatacggcagaatgtcatcaataaagatgatcacaaactcatccaaaaactcttggaacacgctgttcatcaacctcatgaacgctgcaggtgcattagtcaacccgaaaggcatcaccacgaactcaaaatgtccatatctcgtcctgaaagcagtcttgcgaacatctgcctccgctatcgggatctggtgataacccgacgtcaaatcgattttggagaaacaagtagcacccctcaactgatccaacaactcatcgatccttggcaaagggtacttgttcttcacagtgacccggttcaatccccggtagtcaatacatccattcccagaataacatcatacaactttacagggctgataatcaaatctgctggcatcgactcccctacaatctgaatatccacacccttcgctctcccagaagcgctagaaactgccctccagcaaccttgacggctccaaactgctcaccaggatccccacagatattgccgcacgaggcactctctagggtaatgaagcaatgcgatgctctagagtcaaacaacacatgggcctctccaccgcccactaataaggtccctacacaaatctcatgtgctaagaaccctaacattcggttgtaccgctggactcactgcaaccacctgcctctgaaggtcctcctctacctcagcaactgtctcaaccagtgccgccttcgtggcctactgcgacactctacaccgcaccctcaaatccggtcgaagtcccctcaagaacctcctcaatccggcctggtcatcctccatgccctaacccgcatataccaagagtcggttaaactcccgattatacttccgaaccgaccgttcaccctgtgtcagctcaagaaaacgcgcttcgatacggtcgaacgcctcctgcggaaagaacttggcattaaactcagccacgaaatctgcccaagccatatccgcctgcctcctcctgacattcacactctgccaccacaaatgtacatccccctctagaaaatatactatcatatccacctgatactccaccgggcatctgctcgaaccgaagttccgctcaacctacgactgccaactatcggcctcctcaggactagtaccaccagaaaaaaatatccggtgccaatatgtattactcaattataaaagaaatatatatgttctcacatcgactaaaatgtttacacaatggatgaaaatcatattataaataaaaccaattgaattcaaaatccgagtgcatatgaagcttaacttgacaagcatccaaattttaaaagtttttgttagtttagtttggttctttagtcaaatcgttaattatactagatataataaattttaaattcttaaaaagttaaaaatataattattgtaatatttttaaaaaatattacaagactcaggttgtatggtaaaatgagtttaattgacattaatacggtgtcataagatgaaaaataattattttattgttttgttaacaccaccgattttcaaatattagatatgtagaattaagctgattcacgtatggttgtgtaagaaattatatattgctctttttcataaccaaacatactttgtatcgtttttttttattaccaaccaatctaatatcagcttaaaccgtgtagtgagaaactatctttttatcacaaatactactatcatgtgtactttgatatttgtagaattatatattttaaatacattctttattagtagtaacatatataactgaatctaaatttgaataacagatatctctcacttgaatttgtttttcagcttgtaaagagacatagttttcagtattgaactcaacttgagctaggtgccacaaatgagcctctttttctgctagacataacacatataactgatctttctcgacattttcaaatatgttttcattacttgctttccaaatataccaaattatccatggatatgcgaatgaatcaaattctaaagggattcttgagaataagtgatccaaatttgcataaatagaatacgtgggaaaaatccctgggaccatagggatctttggttaagctagcaatggttgtttggtatgtaatgtttcatagtttttctttatttgttgaagaaaaacaaaatcctttattttattattttgaatgtgtgcaactaatcttctatctcatattttgatcaaattctaataaacaattagaattgttttaaactcttttaggacatataaatcccaaaaagttttcttttttcggtaaaggaaggcgacattgtcccctactatttattcgaacaaaataaaacaaaaactaatttcaaaaactacgtgaaaacagagttccacttgtgtcctttaatatcaccgagctaacactctctagacaacgatcaaaagaatgagggtctactgccaacgaaaaagcatagtttgctaactcatctgcaagacgattaactttcctatacatatgagtaactcggactatccaatcctttatgataaatcttaagaaattgattatataaaaaaaacatataaactaaggttgctgaattgttttaacctcttttaattaattattgaactgtcgatttgacctcctaaacaccctatctacagctctctttttttgttaagaagaaaggtataaaagaatatattctaaaagttcatgtaacgataatatataaagggttctggagtttggtgtgattaccaaaggaaatatatatatatatatatatatatatatatatatatatttatatgtacttaagaattaagatttaaaggagaaagaggaaataaatgaggatatatatacatgcaacaacgtcaacatcatttttaacaaaaaaaagcacaacgccaacatctagctaactctcctcttagtgtattactttcatgattcgtcagcagttttgtttttatctgattttcgtctatcaaaatgtaataaagttctaattgcaatatggatgattgcacagacattttagcttagccggcattccgtcatcctctcctcaaagatcataatgtttttggttttatgaatacgcatataatacaggaaagtcaaagaatcttcctaatctagccaaaaaatggagatgaacttacctgacagacgtggctttgtataggattgacatgtctcgaagcaactattgcgatacggagggaggtttctcacgagaacgggactacaaattctggggctggaccagaatcacccatggacacaagtatccgactatattttttccattttactaaagtatatgaattgaaccaattcatcattctgaattactctctatgtcacgatggtattctaaacttgaaagtgcatatttttcttgttatttctaaaataccaaaataataaatttaaaattaacctttcaatttttctgtagtttcaattttgatgtaagtggctattttataaatacatatatctatatatatttaagcaaaacataagatgaaaaataagcaaaaattaagcaaaacataagaagaaaaataagcaaaagttaagcaaacataacaaaaaaatgtaacttgactaaatgcaaagctttttaaccaaaagataaaactttgacacaatgactttaatgaaaacgtcttttttaaaacaatatctatagaacatattattttactttatttttggctcaacttctactattcataatccaaagttcttacataacctgttctaaatcacagaatgttttatgtattgttcacacaatttggtgtattcagtactattatgctaaactacatcttcaaaatgcatatcagagacgatcacattattcttttgtctaataagggttttggatttgttaaagtaaaatttaattgtgacaaacggaaaaccccacgtctaccaagtaatttttttctagaaagaccgccatcaaagaaaatgccatttggattacctttttagcatcatgattttggtgaaaaaatgtatttctatagaatcgtcatattaaactttgatagatttgcattaagttacagactacttttggtaagctacatcttctaaacttaagtaagctacattattctttgcgtctaattattattataaatgaaaataattttgtagatctatgatgttaaatccactgatcattccatgacaaatgaaatatttctttatttttcattgtatattttatagtttatagacatattgaaaaggggtagtgttgaaagagtattcatagcaattattctagaattttgggtagaaaatctttatttatttctaattaatttattttcttattcaatattattcaatattattcataattagatgggtttaaaactaattatactcttacattataggatttacaatatttattatatactaaaagattactaatccaataagataattacaatattttaatgaggctgttttagtacattaatgtattaaaaataattgtttaaaaatgaaaaaaaaaggatagggtatttttcaaatgaaaactcaacaacagggcatttttccaaatttactcttaaaaataactgtaacaaatttactctcaagttccttcagactaccaaaatgactcttgtgcctaatagagaaccaagtaattttttccgatctgctgccttctctatgatcgaaaacaagactattaattctccaactgttcatggtaactttcttatttagatttttcactaatatatagtctatttttttgaaaatattaatctttcatattatcgttttttttgtttgtagatgcttatggtattgtcgtgagagtggggaatataacaagaccggactttgtccctcaagcttcagaaaatcctatactttctcaatttctcgaatttgagattaaaaattcttggttagtattttccactatatagttcgtcatctatttggttatatatctgaatgcacaaacatagtaaatattgttatctttatagttggtttaattcatagaacttagatgttttggtgaaataatttgatattgttattaggggtaaatctctgatatgtgttgcaagcggatatacttgtgagttgtttatgcaattatggaggggacttggtctagaacttggttattactggaactttggtatgaatcctacaatctgtgtgctacgattttggaatgttttttttttttggtgatttacgattttggaatgttgatgattatgaaggtatatttaagactcattttatcttatctataatttatatagctacttcatataataaaaacattaatattttaggtcgtcaatgtctaatctcacataatggtgcttcaagaattacattcaatcaaagttatccagagattaacatggatcgcgtcaggtaagaacatatttacattatcccttaactgtttattattttttaaaaaattttggtcttggttatttttaatttttctattttcctactgtttcagaactcaattccttcaacgaatgcaaacacctgagctacatgaagttgtggacgagaactgaaaatgcaacaccagacccctatctatcgttttgtttaaaaacttatctacatatgttttaaagttgtacttttaaagactttgtttatgtttttattgactttcttatgattatatctgttaaactttaactttattataactccttttatttaatgcttactaaataactatataaacttagatcaaattataactgcttttagattggccaattattaggttattttgatttaaataatgttgatcttttattgattttaataaaatgtatttggattgcaaattttgattacaatgtaatctaaaatatgagttagatatctatattattaaacaaagaaaaataaaaaccaaaccttagagtttattagaagatttgtccaaagaaatatgtcgttaaaattaacatcgttagagaatcttctaagttgaaaacatttattatttcaactcttatatataagtgccataatagaattaaattatagattctgttgtaaacaatatatttccatatatattgtttcctaatttgtaatcacttccattattaaaaatattttaaaattttgttacttatttctctccattattattaacttttatggaaattttgttattatatgtctcaaacattataggatcctgtgattattagtaatttatccacgcagttaagacaattggtatttatataagaactccaattaataataacgatacaatatttatattatttcctaaaatataagactcgccaaatttttaattttcttaataattgagttattcaaaatatatttacagaatcttcaagattacgaagtgacttgaaacgtcatgactgttattactttttaaaaaagttgcgtctaaagcatgcctctacggtgtatttgtctcttatatatatatatatatcggtatcattagcatctcataaaacgaatacaaaaaaataactaagaaatttctgccaaaagatggaatcgtttcatcctctttcactgttgaaaccgtctattagaggatggtgtattcgtgggagagttgtgaggacattcttagtttcgttggttccatcttcaaaggttatgggtttgattctcgccgaggaacatgtaagtattgactgtcttgtaatgataattctaggtttgcatgttttagaattttgattaatatgtttgatccgtagggtatgactattgaagctactgttgggtataagatgtcggatcactataaagattttattaatgaaggagaatgggtaacgataacaaattttggagttgttgagaactcgggttctgtcagggcaacaactcatagcttcaaaattggattttttgttgacattgtcgtcagattaacaagtccgctacccgctattcctcactatcgtctagcatccttctcttcgattattgatgatgaaatcgataaatctgttttagtcggtgagatttttatgaatttgttgtgttccttattttatatcatgcatctaagtgttcattagttttgtcattttcaatatcatatatatttgactctgatttattttaattaatttatataattttttggagacttggtgggagcgatctatgatgttggagaattgattaacacaagacctaagcaaaataacgtcgatgatttgacgctaatattcaaaataagtgacaatgagtaagtttccttcatagtttaattcgaattatctaaattatactattctaataatatttttgattttatgtttagaaaccgtgttttggaatgtctagctactaagaaggaagctcttgactttgatcataactatcgtcgatatggtggtggagttattgtcgctgttcttggttggtggaagattgaccgttattttgatggtccaaagaacgtacgtgtttgcacagcaggcacgatatcaaccgtctttccggatcctgatattcccgagtctaacgagatccatgagatataagtttttatctatcatcaaatattcttacatttcgttattagtaattatataaacggaatatctatactattatttataattgcatgccacatttgtttgttttttaggctccgtgatgaaggtgcaaggaatggcggttgaacatctacttaaaatttttttttacatgtagcctattgaactcggtctattattatttttatttctgtatgaacaagtttccatttttatttctctacgaacaagtttacatatttcgaatttagattaccttctaaaacttgatatcttacaatatcgcatcgctattatttgatgattgatttaaccaaagataccgtgcgtagcacgggtactgacctagttcacatagtaaaaaaagaaaccaaactaagatttagtattcattttggaaattttttttgtaatgcccttttcatgatggccttttttaactctaccctttttttttagccatttttatttctatcctctttaaatttttaatgaccattttacctttatttgaaaatttttttatgttaacaaaatgaaatattaataactttcgcccaaatatttcaaaataaatttccggccaaaattttttgaaaaaatattttcgcgccaaatttttttttcaaaaatatttttcccgcaaaaaatacttgagtgtgtgaatccgtcttccacattttggcgccgtctgtggggagcggaggattcttgagtcgtcagatttcttccgtgtattacatacccgaagtaagccgcaatgtctggagaggatgctaccaacgcttcaatagccgaaaccctcaagaccatgcaacaaactatggccgatatggcgcagaagttttcaaacgtggaaaaaatcgtcgaaacactgtaaacaatccaggtatcacttagccaaaatgttagtaccattcagtctcgtgtccgttctttaaatgcaggaaattctactagagttcgaagaactatcttcggatccccaaattcccttccacgaaatgcaacaagcgatcaaacgaccctggatggtacaaacgcgaatagtcaaccggaagatggagaaacgcatcctgaagatgataaccagttcgatgatcagcacgagcaagaaaactttgaccagctcgaaaccatgagagaagtaagtcgggaactgaaagaaatgaggtcgaagttccatcaagttacaagttcggagccagacatcaaccgagttatccaggaggctaggcgaacaccgttcaccccacaaattgcaagtttgagaatcagagattctcaaaaactcaacttagaaccatataattgtttggaagacccgaaaggctatctcgcagcttttctaatagccgctgggcgagttgatctgaacgaagccgatgaagacgcagggtattgcaagcttttctctgaaaatctgtgtgggcaacccctgatgtggttcattcagttggagccaggatcgattagcaatttcaacgaactatcgaaagtatttttaaaacaatactctattttgatggataagagcattttggacaccaacctctgaaatctatctcaagggccgaatgagacacttcaggcttttatcaccaaattttaaaacgtgcttttaaaactcccaaggatctcacaatagtcggctctatcggctttgtgaaaaggattatggcatgattcgaggtttaaggaagatctaatacttcacaaacctgatactattcaagatgcattatttttagcgaacagttggatggaagtcgaagatgaaaaagagagtttcgcgaaaagaaataagcaagcaaaaccagcggtcacttttccacccaagaagttcgaacctcgggaaaatcagggaccaaggaagtttggttcgcaaccattcaataacaacgtcggaaagcagtttcaggggaaaggaaggtcaaatacttgtgtccgagatgaaagctcgtattgcgatatacatagagtcacaagacatctgaccaaagactgcagtgtccttaaaaggcatctcgcaaaattatgggccagtggagacctctcaaaattcaacatggagaacttcgtcaaacaatattatgaatcaagggataactcagaggctcaaaactctaaaagaccaagagcggctggcgaagaggaaccaagaacttcaaagggtaaaatcaatgtaattcttggaggatctaaactttgccgtgattccgtcagcgcaatcaagaaacatagacgcaatgttcatctgaaatcaagcttaagtgaagaagtagactttcaaggcacttcgatattattcgaagaaaaggagacacatcatctcgaaatacctcatgatgatgcacttgtaattacgttggatgtagccaacttcgaagtatcgaggatcctcattgataccggtagttcggtagatctaatttttcttagcactttggaaaggatggggataagcagggccgacgtggtaggaccgccatcccccttagtggcttttacaagcgaatcgacaatgtctctcaaaacaatcaagctaccagttttggctggaaagatctcgaagattgtggattttgtcgtttttgataaaccagcagcctacaacatcattcttggaactccattgatctaccaaatgaaagcgctcccctctacttatcaccaatgcctcaaattcccaactccgagcggagtggaaacaattcggggagatcaagaagcttcgagaacttgttatttagctagccaccgattaaaaattcaatagcaattaacgaagcccgcaaagaaaggaataatcccgagattccctagcggacagaaagtggatgatgtcgtggtcgaagtaattctggaagcagacaaaccggatcagaaagttcgaatcagagctaccttatcaggcgaagtgaaggaagccttagttgaattgttaaaaaggaacaagaagtcattgcttggtcggcagcagatatgcccggcatagatccaaatataatatgtcacgagttgaacgtggatccaagctttaaaccggtaaaacaaaaaagaagaaaactcggagtagagagagcaaaagcagtaaacgacgaagtggttaaaaagaagaatggaaaagatagagtgtgcatttattttacagatctcaacaaagcttgtctaaaagatagtttcccacttccacatatagatcgtcttgtggattcaaccgccggaaatgagttgcttttctttatggatgctttctcgggatataatcaaatcatgatgaatccggaagatcaggagaaaacctcatttatcacggataggggcatctattgttacaaagttatgccattcgggttgaagaacggaggagcaacttatcaacggctagttaacaagatgttcaacgaacatctcggaaaaacaatggaagtttacatcgatgatatgctagttaaatcgttgaaaaaagaagaccacgtaaaacatttagaagaatgtttcgcgattcttaaccaatatcaaatgaagttgaatccggcgaagtgtacatttggagtcccatccggggagtttctcggctacattgtcacaaaccggaggtagacgaaaagctctatctatatgtctcagtttcgaaccatgcggttagcggagtcttaatccgagaagaccggggagagcaaaaaccaatttactacataagtaaatccatgacagatcctgaaaccaggtatacgatgatggaaagcttgcacttgcagtagtaacttcagctcggaagcttcgaccatattttcaatcccatccaatcaaagtgttatcaaatcaaccacttcgaactattctccatagcccgaaccagtccggtagattggcgaaatgggcggtggaattaagtgagtatgatatagagtacaagagacgagtcgccatgaaagctcaagtccttgccgattttttaacagagttaccggtactcggaggacaggagcagccgccaaatcagacttggaagttgcatgttgatgggtcgtcatcaaaaaacggattcggggtgggaatcaaattagaatctcccacttcggaaatccttgagcagtcatttcgattgttatttgctgcatctaacaattaagcagagtacgaagcattgaatgctggacttaggttggcacaaggagttggggccgatgaggtggtcgcctactgtgactcacaactggttgttaaccagttcaatggtgactatgaagcaaaggactcacgaatggaagcatatcttgaggtggtcaaagacttggctaaaaactttaagaagttcgaactcatttgcataccacagggagaaaacactactgcagatgcactcgcagccatggcatcaacatctgatcccgaagtcaaaagaatcattccagtagagtgtatttcagaaaggagcattaaggacgaaaatgaggcattcgtcgtcacaaggtcccgagctgcagcccgagatcgcggcgaacctgttattgaaccgtacctaagccgactgtacaagaagatactgggctcgaagaaactatcgaaccaatagaagaaatcaccccggacaccacagccgaagctggaaccgaaccgtgggttgacgaagacatattagcgccaaatgagcatccgaacgagaagctcggatatttcacgaaatcgaccaaattccggctaaagattggggggctgattggagggagccaataaagcattatatcgttacaggcgagctcccaaagaatagatggcaagctaggaaaatgagaatcgttagcgcgaaattttgtctatcgaagaattctttgtatagacgaggtgaaagtgatccctacttactttgcatctttgggcccgaagtcgagatcgttatgagtgaagtacatgaaggtttgtgtggaagtcattcctcaggaaggactatgactttcaagattaagaggatgggatactactggcctactatgatcacggactgcgttaaatatgctcaacgatgcaaccgttgccaactccacgcgccactcatccaccaaccttcggagttattctctttgatctatgccccatacccattcatgagatggtcaatggatatcattggaccattacataggtcgacccgaggtgtacagtatctactggttctaactgactacttttcaagtgtacgtaaacattaaagaatcggcggtaaagacgttcatttggaagaatatcatatgcaggcatggcgtcccatacgagatagttactgacaacggaccacaatttatctcacacgagtttgaagcattttgttcggattgggggattaaggttagttattctactccgcggtatccacaagggaacggtcaggctgaagctgcaaacaagacaattctaagcaatcttaagaaacgtctaagttatttaaaagggggctggtatgacgaacttcaaccagttttatgggcatatcgcacaactcctaggcgctcgaccggagaaaccccgttttcattggtgtacgggatggaggcagttgtcccagccgagctcaatgtaccaggacttcgtcgaacagaagctcctctaaatgaagaagaaaattttgcgatgctcgacgactcgctggataccatcaacgagaagcgagatcaagccttaatccgaattcagaactatcaacatgcaacagctcggtactacaactcgaaagtcaaaatcagacctttctttgtgggcgattatgttttgaaacgtgtgttcgataacaagaaagaggaaggagcaggcaaacttggcaataattggaaaggtccttatattgttaccgaggtggtccggaatggtgtttacagattgaaagatttggaagacagaccagtccaacgtccttggaatgtggtgaacttgaagaaattttatgttttaaaaaaaaaagggacacacattttttgatcccgaaatgggtacataggcagctcggaaacgagttcagctattaataaaatttgttttattcatgttgaaaaagagttcgattatacgaatgaatggaaacaagaagttcgactatgcgaacatacaaagcgggaagcaaggataaatttgtttaaaaaagaaaaacaaagaaaagacgccgaaatcttagaaatacttcggattaggaaatccttctcgtcttgcagaacacttcgaccccttgactagggagatcaagaatgggcatcatacaatccgggatgcgggcaaattcagcaattccaagttcgatctaatctccggggtgagagttgagggtgtgtaactcccttgatatcacggtaaccctccgcagcattttgttgatcttctttcgaagtttcttcttttctgttgagcgttttttgtgttgagccgcgagggctttgataatggccatcgcgatatcttggtctctgctcgaaaggtccttggatctgggatctaaagttgcgaagtggggagcgccctctgtctggtacattcgggatgtccttgtcgatcatcccgatcctcgaaaagtctggcatggattccgagcatcggaggttgaaggccataattgcacaagaaaaataaacgatattgttagtgaggtatgaagaaaaacctagagaggtaatttataaggagggttcttagctttcaaagatgcgattccatttaaagccggagtgattcgcggaagcattcacgtcgtcttgttcgccctgcattcaaagagtatctccaaaacgaatatttgatgaatcaaggaaagcccaataagtaagtccatacgaaaaaaaaaaagtttaagtctcagggaacatttagggaaggggctcaggaacaggctccttcatcgccggttcagagttcgaggtggacgtctcgttcttagcatccacatcgggtttgttcttcacgcgcttccaggggttgctatcgtcctcttcgtcatcaccgtcctcactgtcagacaggatcacttggaccggagcgtttacaggaccagggacttggcctcgagcacgaaggtacatccggagcatgtgcgggatttttgccatgtagtcgaagttcctccactcccattgataagggtcgctctccatagccctcacctttctttcgatacgggcaattcgggcctcgagcgtttgcctcttgaggcccaaacgctgtctctcatcgcataagcggcgatgcttgtcaacgacctagaatacgaactggttaaatacgaatcaaatttgttctggaaaagagagatgggcgatttaccttatccataaaatcatacgcctcctttttgtctttcgaggggaagtggaagcaggcgtgcggaaagagaacgccggcgggctcaaagccttcgccggacagaaacaatggacttccgggatcgagggggcagacggtggaggctccttcgttttccattctaaaggtgtttaccaagtaaatttctgagatcatattttgagggagttgagagagtttctgctcttatttatagtgatttagggttttactagaaaccacaaagttaataattgtggcgtgtccgaatgggtttatccatttttggaaatcgaggaaaagacaattattgccttagaagcgtgacacttttcctgatttccaaggaaaaaatggcaaccgtcgcatttaagacaagtgggtcattaaataaaggaaaaataataaaggctcaaagcctagaaaataaatcgaactgactaaacccgagttggggaattcgcgtattcgagtccgcattttttaggaataggtctgatcaacttacgaatcccataacttgaccacatggttaacgaagatgctatttaaaaaatagactttgcaaatccatacttaaatttagcacaaatgaaaccctcttgggttcataatcttaaaaaaaggtttaaaagcctcctcaagcaaagtacttgtttagcctacttagacaggtaaaataattcgaaaaataataataaattttgagtttaagggacagtccccactaagtggacacagccattacaagttctcgggcacctcgagttcgggttaggctggctcaggatctgcggcaactgtctcagtatcacccggctcgccagtagtagactgctcgctaggaaccccggagtctgaaccatcatcgtccgcgatgaccactgtctccgagttcgtggatggaggaagttctggcggggtggctaccgcttccggaatcgtcgctggcacggtgggtgcttcgggttccacgggatcactaggacctgagacaattattttggatcagaaaaagtacaagagtaatttcctatggttaggtttcaaaagctttgaaatgtaccggcccaatgtaaaccagattcgctcaaaggaggcgattcggtgaagaattccttgaactgttgaggattgaacgacgaggaaggaagggcagctaaacgacttcgcttctcctccaggacggtcttcaactcattcctctcttgttcctcggagaagtcatcttcatgggtttggtccaaaaggaggagattgctctcgtactccttgatgtctgactccagctccgtcctagccttcttggtttgaatgaagacgattgctccttggatcaattccatcccgcgacctttcacttctttcctggcctttgatgctgacctccctaattcagcatcccgatagttggctaccgctttgtacttgagctgcaattcggacagctggttggacaagtcgtaggcactggattctgaaagtctatcccgagaagttgagagttctttcgatcttgtcatacctctggtattgatcctgcaactcgccattggacttcatgagttcgaaggagagattgtctagttgatcctctaggtttttgcctggtatcatgtgaagaacggaggtcggactcaagggaagaagatttgtctttccatgtcaaagcttctttttccctgtctagcaaaagtttctcgtagtactcaatcatgtcgttgagttcgttgattgcctgaaccaagtagcaaggaaagagagttagcatctaagtgaaggaataaagtttaaagaattattatgggtgaagagaactaacccgagatgagtgatgggcgtggagtaggaatcgctctcgaattgcaggacgccacctatcaaaggctggcaggatggtgtcttttcgagttttgaagcatcgaaagacatttccctctgtttccatcgctgtcagaataaagaaagggagcgttaagtcaataaattaaaacgataaggccggaagacatagtggaaggtaatttctaacccgtgagcgacttggtctgaggaaccagaacagccttagttccggcatctcggacctcagcttcttcccgccgggggtttgaactccgatcggccttttcacctcctgatccagacgaagtagatacggtgactggaggaggaggacccatagagcggggtggtggagatggccgaggagagcgatctgtttgggctctcgtcttatctcttttgggggaggagctgctgcgggttgatctgtccctctttttccgaatcagatcagcaagcggctcgctgcttagtccatttcgggaggcaggccgaggtgaatcacgacggggtgatcgttctctgcgggatgaccggccgctatggcttttgcggtgaggagtgagtctataggcaccggcagatcttgccccttcggcgctgccgtcatcaactagcaaggttctgctatattctttcttgtcgactgcggattggaggaatgatttgttcgtttcgcaagcctccacaatcgacttggatagcgtcttgcgtcaagctgcgatggcccgagcagaagtcccttgaggtaagggagggggcaatggcagttggagaagatgtccagggggctcatcctgagcttgtggttggcctctacgaatcggtcgagggtaaaggagttccagagggtatccccttcgatgacgatcttgaagaattcggcgaattcaacagacggtagggtcggtgcgatgaaagctgcgaattgaaaattaaaagttggtcagataagccaagaagtaaataagggtcatatgcatgacctaatatctagtaattgtaggggattccgagatcaatgcaataacataatttaggcgggaaataagagagtcatttggcgcaatctttgcctttagaacattaaagccttccgaactggagtgatactttgaaagacttggagggctaattgttggtgtcggatcgcgcaccatgggcttgggtccggccaaagattgttacacaagtaggagaggcccataatagagagggcccataagtgtcctcgaggtgagagtatgggcgagatgttgatttgcgaagtggatgcagcatcgaagtcagaactactcggattgaagaagccgaatgggccggaaggagaagttcagaaggcccggagtggattcaaattcaaacgtccaaatagttaattcaaagactaaaaacggatacatttaaggtagaatgattgtgagtaaatggggattaaatgtattctttggatataaattgggggtcaaagaccatgtaaggacacacgcattttttggtgcaaattagctatacacattttttttacaatactcatagttttctctataatcatctatctattttctagcatatttgtcctcaagaataatcattctcactaaataaataaatatttgagtgtgtgaatccgacttctacaagagaccaattccctcttcctcctctttgaaggagagacctttttcatcaatcctctcctttagggagaatgtttctaaaagctcagccctggtggcatcaagctttattgttgttcgccagccttcaatggcaaaagaactaccagcactctcttcattatttgaagaccaagagtcgacgatcgtattcaaaccgatcacttttgaaatcctctcgaaggagcttccggttatcatccatgatgttaatctactattttactgctttcatgttttccctttcctgtttgtttctatttcaaactttcgacaaatgagttctttggcaaagcttcatgctgttgtaatcgcaagttaacttaatataagttgtttgacaaaaaaaaaatagattatttcaatagatattacaattttatttcatttcacgatatttaattacagatgttatatactatatcagttgaacaaaaaagaattcacattttaacattaaaactagaacttttaattatcaataacattaataaaacacaaaacaatgatcattacacgtactttaaatttgatgaacattggaacttgatatcatagggctataaagattaatatcgaaaaggaacggaagcaggtaatttgaaacaatagaaagaattttgaaaataattactttgtatatctaaacaaaaaataaaacttagaaaatatcatatatctattctattacgtaaaaaaagttagaatatgttttattgtacaacatttttttttaatgaaactcatactaaaaatttactcttttacatgagcaaattgtaggaattatatggaggattattgtttcctctatagaaccacatctgacgcatcctgaatcacaatttatacctcttaacacttcaaaaaggcttgaattgaatcacatagatagaatcagaaaactaaatgatagtattttaaatcaattatttacaaaacaaaaatacatggtttagcatcaattataataattgatgtcgtaattaacttgtttggcatcaattctataaactgatacaatttttattagtttgtatcacttttacaaaattgattttaaaatataattttacatcaattacctaattgatgtttttaaattttttttttgacatcacttattaaaatgttgcaaagtttacattaataaaaactgatgcaaataaaaattatattaataatataaacagatttatggaaattagcttcacttattaaaactgacgtaactattttcgtctttggcatcaaatttttaaaaataatgttattttagtttagtttgcatcagttttttttcttttcttttttattttttttatttttttaatttttttttattttgcatcagttaatacaattgattctaaacaaacctagttcacatcaaagaaatcttcacgtcatcctcatctcttccccattattattttttttgaggtttttgatcaatctttgacccctccctaaaagctttacctaaaagagtatcttctgatattaatcaagctgatttatattcaactttgaatctcttggataatctttttcctgatattaatacgaatatgtctagtgaacacaaacctggatcgtgtgagcaacatgaggacactgatataccatcaacttcaagtggaaattgtggaaaaggagaaggttttgatgatttgtttgctgaatttatccaagagctatatccgggatgtagtaagttcacgaagttgtctttcatattgaagttgtaccatatcaaatgattgtgtgggattagtgacaagggtatatctatggtgcttgatatgctgaaagatgcatttacacatgccaaattgccatgttcattaaatgacatgaaaaaggttattcgaaaactaggcatgacttatgaatcaattcacgcatgtctaaatgattgcatgttatattaggatgcagatgcagagagagagagatttgcaaagtttgtaaagcctctcgatggaaaaataacatttttgcacagagtatgatttcaagatcagagaatgagaaaaagaaagatcctccaaaggttttgcgttattttcctctaaagccacgactgcaacgtttatttatgtcatcgaaaactgctacacacatgagatggcatacaactgctaataacaatgatagtaaacttcgacatccaagatggagaggcttggaagacatttgatcaaaaatttcccgaatttgcatccgatccaagaaatgtcagactaggattagcaactgatgtttcaacccatttggtactatgagtagtagttatagcatctggccagtgatattgtttccttacaactttccaccgtggatgtcaatgaatcacacatcaatgatactctctattgttatccctgggaaacacatgcctggtaatgatatcgatgtatatttgcagccactaatcaaagagttgacggagttatgggattatggaattaaaacgctagatgcttccacaaaacaaacatttaacatgcgagcagctatcatgtggacggttagtaattttcctggtcttgaaaatttatctggttggaatacgtatacaacgttagcttgtccaagctgctattatgatggcattggagaatgattacgacatagaaagaaaaactgttttattggtcatcgacgttttcttcctcgagatcatagctttcgtcaagacatgacacattttgacgaaaaagtagaaacaagatctccaccactcatattgacaggttctacaattattcatcaactagaacaagttaatgttactcttggtaaaaaaatgaattagttggagttgggagaaaaagaaagcgacgtgatgcaagaagatgtggtaatcaacaatgggaatttacaatggcgcgacataatctggtttcatgcacatagagaaaaatgtgttcgacaatctaatctacacaatgttggatgacaaaaaaaaatcaaaagataatatgagtgctagaaaagatcttcgtgagctaggtatacgtcctaacttgtggcctgatgataatgagaaatatcaaactgcatgtttttctctgaacaatcaagcgaaagatacttttttaagtgtcttccagaatgtaaaactcacggatggttatgcttctaatttatcaagttgtgttgatgtcaatggtcaaaagctatcaggcttaaaaagccaagattgtcatgtgataatgagagatctattttctgttgcgattcgaaatctattgccaacagacgtgacttcagcaattgttgagcttttcggttttttagagatatatctacaaaggtgcttgataccgatgagttagataaattacaatacaatattgtagtgattttatgtcgtatggagatgtattttcctccatcatttttcacagtgatggtacatttagtagtacatctcgcagaagaggcaaaatacggagggttggttccattcctatggatgtattcgattgagaggtgagtattttccattttatctttatatatatgaaactaaaacttactagattcaattatatacacaggatgctaggacacttcaaatcatatgttgggaatcgcgctaagccggaaggttctatatgtgagtaatatttagctgatgagtgtgtaacattttgctcaatgtatctcaatgatatagagacacgatttactcggattggccgcgttgatgatcgacctctagctgagactagtgataaggttcaaatgacctagaactactctctcaaataagagatcaactgcagtattttaggatcgaattcacagagttcttttgttcaaacaatgagttaaatgtcgagattaacaccgtcgatccagatccagtgtcgatcgacactagaggggtatcggtcgacaccgtcgtattgagtcgtctctgagaaaagggtcccgtatggtgtcgatcgacactggagggtgtcggtcgacaccatctctgcaactgcgagctcaactcgtcttcagtgtccaattcctcccacacatcatctcatactctgatcaagatggcattacaactcttccttgggttagcatccggattaccaggaagaaaaccctcttgtctcttgatagattgtgcagtttgagctacctgtacaactagcttcttcaagtgagagctcaaattctcgatcttcccattaagatctgtgtagacagcatcaaacttgccattaaactctacaacaagctttgtttggctctccagaatctgctcaagcatcgattccattcttgtctcttctaagggtggacggggggcttggtaagttgaattaccataattcctctgaaagttgctttgaggaaaggtcttctggaaagcaggctttgaagtgtagttggaggaaccctggttccctgtaaacatgttgccactgaagttgccttgtggctgcccaaactttctgtatccctgaccatctatgtagaagactccttcttctgactcaggctcaggctcaataatctcttcctcagctgcaaagtggacatgcttcttccctgtgagcaagttatgaactgaatctatcttagcgttcacctctgccatctgatttcctgaaatagctccggcaatcttcttcctctcaaaatcagcattcttggtactttgctgcaagcgaggttctctatcagggctgtagcatcagctgggtaacgtgtgttgaaattaccattgctcgctgcatctagagccatctggtatctccaatcaactcctctaaagaaggtacctagaagttgtacctcactgaaaccatgatgtggacaatctcgttggtactccttgaaacaaacccaaacagccttgaaagcttcagctggaccttgtgtgaaggtagacagcttgtttctcaactcctcagacttagcatcatcgtagaaattgtttaggaaggctatcttgatgcttctccaagtcttgagggaacctgctttaagttgctttagccaagaagctgcttccccagcaagtgaataagggaagagcttgcacagtaggtagtcctctgagactccattagccttgatgctcaaaataagatcctcaaatcgctcgatatgatccattggctgctcacgagataagccatggaaaagatggtggccaactaaagcaaagtagccaggcttcagctcatagtcgttcctctggaatggtgggggtacaatcgctgatcaattagcatagaacaggtctggcctgttgaaatctccaagagtacgacgtagttccgcagctggaggaatagctgcaggaatctggtgttggtgtcgatcgacacctctgttgtgtcgttcgacaccgattgcatccgcatgctgctcccgatggtgtcgatcgacaccaagccctgctgcgtctctagcagctaattgcgcattaaggtgcgcctgatcctcattggcgtcctcaggtaggatgagtccatgatcatccaatatctgaccagaatcattgtaggcttgcccatcctcatctctcaaaactccttctgcatcagctctgatgactctgtcagccattgctaatttctgagtttttcggttggtgcgttcaagttttcccaaatccagaacagacaagttgataagcgccttctgttttgtgctccttgtttgcctaggcatacacttgaaacacagaaaagaagaaaacaagaaacgcgtgagtaacaaaatagaagtaaaaactagacgaaatctctaaacaaaactcaatgatgattcccaagaactttggcaacggcgccaaatttgataaggttcaaattacctagaactactctctcaaataagagatcaattgcagtattttaggatcgaattcacggagttcttttgttcaaacaatgagttaaatgtcgagattaagctagcagggtgatagtgaaaataaaagagaacaaagtaaaaagacaacagattgattgtgttgtaaacgatttaataaagagctaggaacagggtattctcaggaaactattggttagtagatctaatgaaagctaggttgttatcgaaccattcttaagctcgaactctaattatggaataaccggtgggcgtgccgtgaaaatccgtatatctatagctaataataatcggagaagccgagaaactatcaacctaaatatgcattcttaatgagttcaattattcatcttagtagataggccgattcttattacacacctataaaccagactcatcaaataatagatccaactgtaaatacctatggcgggcatatgtattgtctacattcaagatctagttaattactctacatctagcattaggcataattagagatgaagaattctacagatacctagcaaagtggactactcagacatattgaatgaagcaaacaacataattcagatagaaagcataaacacagtaaatagagaaggggaaagaagggatctcttcactgtattaaaaactggaatgaatctctcaagaacaatggatgaatagggttttgcaaaagtttgataaaagacttgataaaagaaacttaggtctaaaaataatatatagaccctaaaaatgtctagggactaataatgcaaatagggaagtcttcaggggcaaatttgattttctgaaacttgaaagcgtctaggtttttgctgggccgaaactggtgtcgatcgacaccaagagtgtgtcgatcgacactcctcgctgattcctgaaccaaaatcgtccttagcttccttttccttagcttttgctccaaaatgtctccttatctccattgttgtcccgctgcatagaatacctgaaaagacattaaaaagactcgagaaataacataaagactcaaaattctatacctaaaacatagataaaaatcagtgaaaatcgggttatatcaactagcataaacccaaattcagaactcttacttatgttcccaaaccttggaagagttgttggagcgggtaaagtttatactcttaatcatgtagagcggcaacaagcacatcgacatgtattggtcaactgccaactactagatcacctacgagagtaagttatctaattcaagaacaactaattatatttatgttttatcgaaattctctaatgtagacgttatggttgttgtatgtttagaaaatataaaaacgagttgttgaataaacaatctcatcaaagtagaaggaatcgtgttatcgatattgacagagatatgcatcttaattttgcaaaatggatcaagcagaaagttgagacgaatgagttagatgagctaactgatgatttacaatgcttagctcagggtccatttgaaaaagttgtaaagtatacagcttataatgtcaatggtttcaaattccggacaacaaaaagagaattagatctaaaaacacaatatagtggtgtgtatgtggctgctgagactacgagttatgctagttcttgtgattctaacccaagaacgagaactgtagcttactatgggaatctaatcgaagttatggagttaaacaactatgaagttttcaaagttgtattattcaagtgtaagtgggcggacactcatacaaaaagaggatataaaatagatgcatatggtcatcatatggttaattttttatgcttgttacacactggagataatgaagaggatgtaccatatatattggcgtttcaaacaaaaatggtatattacgtacaagatccttctgagactgattggaaaattgcatttcatattcagcctagagaaatatatgacatgggagattcagaacaactgaatgatgaatttggtactcataactccactaatgcttcctaagaagatatttataatgttaacatatgtcgctactggtaattgtttctccataatcatagtatttgttgatatgttggcattagtttgatggttgtcttattttctaggatttatctgcatattataagcttgttaaaataagggggcgagattatcatatatgattattctactaaaaagaaaccgcataacttatatatatttttattcactattttgttgcttatttatataaccagagacgtgacattttgcgtgaaaaaactgctgtgatggaggagaagttgtgtaatgctggacaagattcttttaagtatgacttttatttagcctatcatgctttggcaatattttgtttctttgttctaataagaattattcagaattattatgatcttcaacattttaaaactattatttattaattttctttttaaattgtttttctatatacacttgataaaccagttgtaggtaaattttggataatatttgtagctacaaccacattccggacaaagctaatatcatttggctcgataccggtcaactgtattggactaaatcaccatttacgcatccggtattgctcacatgtgttggagcaaaacgttttttgtgtcatccaaaataacatttgcatgtttcccaacggacgcacgtaacggcacgttgaattttttcacacgtccaacacatgcatgtaaaccggtttgaaccagtcttaaccaagaaaaccacaaaattgattttatttttttggttaaggcaagtgtaaaccggttataccatatcttaattaatcgattactttaattttttactcaaaaaaggcaaagaaatattattaacccaaatcgataattgcctttacattcttcatcttttttatcgtcgttttacgtttctctctacaaagaaacaaaaatctcttcacggttctagaactcaagaaaacaaacataggtgtggttgtgttgctctattctaattcaatctgaggtaagttctagaaacccaaatctcatggttaattttgaggtatttctatatgagctgtttatatttgacatggaaattgagatatgagctgaaacggaattagttcgtatcacatatatctccatgattattctttcaatttacataatttagctgcttttcttgatgctcacatttattttccctttggtatgaataaagttcttgagcccaaattgcttcacgttttgagccggagaagaatctgaaagctgacgattttgcacctccactgatagagaacatgaatcaaagagattgtgaaaggttttctgtatttctcaatcgtaacagaatgtacaatgaagtgtttatgtactctacactaaaccaaactaaaccatatacaatgtaattatatactaagttaaccggctaaaccgactatctatatacatactctaatagtccccctcaagcttgagcttcatatatgttgagaactccaagcttggtgttgttagctcgaaagagcgccagataaagaggtttagttagcatatccgcaagctgattatcagaacgaacaaacatggttttgagaatcccagcttcaatacattccctaaccttgtgacaatcacgctcaatatgcttcgttctttcatggaaaacagaattgcttgcaatgtgtaaagctgcttcattatcacaatataagtaagcaggagccttgaaaggaaccttaagagatgtcaacaagtaaccaatccaaagatgctccttagtagttaagggaagagtgaatacctttaaaattattgactactttagacatagttaagggaagagtgaatacctttaaaattattgattttagctaagcatatcagaaccactgtcttctcgtcatgctttacactttttaaagcactaaatactttctctgcaaacacaccccacaaagtacaagacaaaccctcattgctttaatacagtaacaaacgatttcaatattacttgtttgaaaacatagttattatgaatcaaaaattatatgaaaacaatgttctacttgccttgcatctcttatttgaatctctagttttttgtttggtttgttttgagccataatatcttctcacactcaccacttgacctaatatgtctgccattgtaaagaataccctgttaatattaaaatccgtaacagacatatagtttgagttaaactaatgatagggaatttagaaaatacgtaccaattagaacattttcatcataactctcggtcttaaccccttcaaaatatgctagatccagaaaaacactatccgatacaggatcacatttaatcacatctgtgttgtggttaaaagcccattcgatagctcaaactcgatatcttgtacttgccatacgaaggactcaaagtgaaggtatcaatgatcatccaatcaccaacctttagtgacatgttaaacttgccaatataatgctttctaatggtaatctgtatcttagatccctatatcaaaaccaaataaacaaaaacacataagaacatgttaaatgtttcaaacagaaatatatatagattcatatatttaatcaataacattctctcatacattttcatcacatataatgacatctaacgtcaatttgtttgcctccttagatgaaggatcttgacacggacacgccaattcgttttgaaaggcttgacatcactaagatacgttaaacctgaaggtaaactcattgattatgtgtatagatgagaaagaaaagtgatgctttagaattgatgatattgcttgagtatttatattgttaggacttgattctgaaaccctagttttaaagtatttatcaatactaaaataaaaataaaatattattgttatagttttaaagtgtaagatatcgtggaacctcttttcacaaatagaatgcatattttaaagtaacacataaatagaatgaaacaaaactggtttatgcatggagtctagttctattttccaccacctccgagtagttttgaaattgaaaattttgtttttattttgcttttaactagaaaattttgttttaaactagtagctgaatcattgagaaaaaatgttaaaaccctattgaggtgggttctctatcttctctctctcttgaatttttcagagtgagaccgactaacttattgtcgtctgaattttatccggttatcaaatcctgtttaatgggctctcttccaacatgcactagatcctttgtagtattttgttgacttttatgtgatatcgaattgactttcaaagtcacgatgactggcgtgaccaacggtaattcttgctgctttgctctcggttgttgatgactcaataaagtttatgtcattgatatgattctggtgaggaatcaatcccaattttggcacttggaagatctagagtgtatattctcaaaatagagacgacacacgactcaaagacgagatgatggattgaatgacgccacaaaaggatgcggaaagccttttgataagtcgagaaaagacatggggctcattaaggatggtgccctggacgtacacttgatatccatagaaataacatacatttcaatccaatccatttctcaaggaaacattagagtcatataactgaacaagtttatagtcacttcttaaaactcctatgaatcatttttaaacaagtaatttttaaataaattgtgttgattcaagttatttttcatcgttttctatcaaaaataaaacctcgtatatacatcgctaatttccgtcgactttacaataaatacatctaaagaagtatatttttcgttgattcaaacagtaatttaggatgatttaagttagaatatttctatcaccaatttacgacaaattaacgtagtattttatatttgtcaaatgccttgtaaatggacgtaagtttacgaaacaatttcatcttaaaatattgatggttaatctgtttttcttaagtgaaattaactttccaattttacgtagattggtttttcaagtctatatattgattaattatttaaaataactacatctaatgcagtgccatggcacaaaggagtgtggttttctcatgaaacaccgagatactccttttatgtatggttggcggttcacgacaagcttgctataggcgttaggatcctaagatggaatagggacacaacatgggtcttctatttctgcaaaagttgcatcgaatctagagatcgtttcttcttctcttgcacttttacttcggttatctgggacatgcttgctagaggtttgttcaagcgggagtatacaagtgattggtctcagctcatcaatacagtcttagccccgtgaagtaatcgagttgacaggttcctcatgcgatacttatttcaagccaccgtctataaagtttggagagaaagaaacagaaggcttcatgatgaaaaaccaaattctggagctatgcttattcaatagatccataaggaaatatgaaatcaattatccaccattcgaaggatgagaccgacgatacgacactagctatcaaggctggctctaaagtcaagcttaatcacaatacatctcaaataattcctgtttttcaatttgtttctatcaaacacacgaagcactagagtaataactttataattttctagctatagaggaataactatcagcaaaattgaatatatgtgtttatatttcatataaaaataaatcacaaaacatgtagcagaaaaaaaaaatcaaagccgcatagtagtaaactcgtttgaaactgaatcctaaaagtgtggttgaggttcaatacttatagattaatgtctaaaaaatacccgtcttttttgtgataagatattattaaaggctcaaatgagcaaatcttgggagaaattgtttacataagtgatatgtagcggttatgtacaaattttccgtaccaaataatccgccttgacctttgcattacgagagattaaagataaagaaaaataagagaattcttccgtgttgctttgaaactcctcaaaatatgttgaaaagactggccattcaattgggaaagacaccatcttccccaggtctgaacagtctgcaaaaagaattacttcttggttgtcggcattgatatgtccaggtttttactgatttctaacatagtttcagaatggttttagagtctttctagtctttttgtatgttttgagtcatttcaggtacacttacacatttgggaactatggagcacaataaggaattttggaagcttttcagcaatgaagatcttaaaagacgtttttcagaagttggtgtcgatcgacaccacacctgtgtcgatcgacactcttattgctgcctagggaattctcgttttctaccaagtttttgcgaagccctgaagtcttccttatttgcaaagtagtccctccacgtttttagtcacgaatatacctaattgtttggtcattgttagacctaagttttgttttagagattgttacacactttgagagaagaatccaatccttttagagaggattctgaactcccttacttgcattcttaaatcatcaatgcaaactatttagattatgactcagtaatcaccttgttgggtttagggagtctcaatagggatttagatggattagtagatcgaaaaccccttaggattatttttaaagttcttcatcttgattattcttattgctagttttagattgatcatctagaacttgatattagataataggtatgtccgccataggtacttgttattagaactatcataaatgagccgaggtatttaagaaagaacaggtagtctcatagaagggctctggtttagatactaggtgaacttatcaagcttattaacaatgcatgctttagcataggatttctagacttctttggttatctagctttaagtatagagagtttcgcggaacgccactggctactctagaatcatagtttgagttcgagaacggtgcgttaacaatcctaatattagctacatctacgatttatctatctcccgagaccattacttagacccgacgcttaaataacttgaatctacaactcgtttacttgcttatttgtcttttacattcaattacttcatctagcttattaaacaacatcataagtctattgtgtgaacatcgagagttcagtggaattcgacccttaagtgctaacgacgatctgttatttgaggaagtaagcttaaggcagtttaagctatatcaaatttggcgccgttgccgaagttctattttagttcaccattagactaggtgtcattttaagtctagatactacttttctaccacctattaacgtgtttctttgtcttttggtctcttgtgtttcaggtaccttcagattgagaatcacgttcccatggcagactttcacggttgtgtcgaccgacactattagggtgtcgatcgacaccctctacagaactagacggctacaataggcgatttagcagaactgacctcttctacacaaaccgatcagcattcaagctacctccgatgaatcaccattagatcatttggaagtcttaaaagacatcgtttcctctattaaagcagaaggtgtaccagctgattaccttctttgcaaactcttccccccactctctcgcgagcagaggaacatcatggttgcgtcaactggaaccaggttcattaaccaattggagtgatacaaagaatgcattcatgaatcacttcttcgttgaatccgtgacaaaggcaattcgtttacaaatctcttcgttcactcaggctccagtcgagtcccttagagcatcttggctctgtttcaggtcttatcagcgtgaatgtccccaacatggcttccaagagaggccaactcatcaacatattctacaaaggaacagacaagccaaaccggaatcaacttgatgcagcgagctactgtaacttcatgacaagaactactagtgaagcattacttctcatcaccaatgctttaacttgtctttcaacgcagggatttgacaaagaacgaagaatttcagctgagatagccaccgcgagcaaagagactctcgtttcaacaatttctgctcctatccaagccccccccccctccaccctcatcagagaccagaatggagtctatgcttgcgcaacttcttgcaggccaaacaaagcttgatagcaaatatgattctctctccatagatctcaatagcaagattgacactctacgctctcaggaacgaattccaaggaagctacttgatcatggaacttttgtacttagtttcaccatcaatcacgattctttcccaagagctttatgtgatctcggttctagtgtgaatctgatgcctcgttcagttgctatgcgtcttgggtattccaatcttgagcctacctttattactcttgtcttggcatatcgttctacccgaattccagatggaattcttattgatgttcccatgatgattggaaagagcatgattcctatacactttgtagtcttgccttatgagaaggaagctaaggatccattaatcctagggagatccttcttgcagacagctggagcaatcatagatgttcgacaagggaggatagggctgaatgttggcgatcttactatgcagttcgatatgaacactttggtcaagaaaccgatcatagaagggaaaaccttcttgatagattctttcacttcatcagctttagatagtatttcagagatggaatgagaagacccactagagcgagttttggtcttttccatagaagatagtgcagatttggacactgaaacttctacatatactaagctgctagatgagaccgaacatgtgatgcaacttacggttgaagaagctcttccatctatgactccaacgccgactactaattcagattgggatccagcaaaggctcctaaaatcgaattgaaaccatttccaacagggctaatgtacgcttttcttggtgaaaattctacttatcttcttattgtgaatgcttctcttattcctgcagagctcaccttattgctaagcaagctgcgcaatcatcgtaaagctcttggctattctcttgatgacattgcaggtatatctccagatgtatgcatgcataggatccaccttgaggatgagtctaagtcttcagttgaacatcagagaaggctgaatccgaatctgaaagaagtggtgaagaaggagattgtgaaactgttggaagcaggtattatctttccgatttcagatagtagttaggttagtctagttcatgtagttcccaagaaaggaggtgttacagtagtcaagaatgagaaagacgagctgattcctactcggacaatcacaggcccccggatgtgcatcgattatagaaagatgaatgctgctaccaggaaagaccattttcccttaccatttatcgatcagatgttagagatgttagcaaatcataaatactattgtttccttgatggatactcaagattctttcagatcccgattcatcgagatgaccaggagaaaacgactttcacttgctcttatggtacatttgcttatcggagaatgtcattcggtctttgtaatgctcctgcaacatttcagagaggtatgatgtctatcttcacagacatgattgaggatatcatggaagttttcatggatgatttttcagtttatggatcgtcatttgaggattgcttagcgaatctctacagagtgttagcaagatgtgaggagaaacatctagttttaaattgggagaaatgtcactttatggtgcaggatgggatagttctcggacacaggatttctgagcatggtatagaagttgatagagctaagattgaggttatgacaagtcttcaagcgcctgataatgttaaagtaataaggagtttccttggacatgctggtttctacaggagattcatcaaagacttcagcagaattgcaagaccattgactgctttactctgtaaagaagtcaaattcgagtttacacaagagtctcatgatgcctttcagtagataaaacaagccttgatcagcgcaccaattgttcagccaccagattgggatttaccttttgaggtaatgtgtgatgcgagtgattttgcagttggagctgttctaggaaagagaaaggataagaaacttcatgccatctactatgcaagtagaactcttgatgatgatcaaaggaattatgcaactgagttgttagctgttgtgtttgctttcgagaaattcagatcttatcttgttggatccaaggttattgttcacacaggtcatgctgccatgaaatatttgatgcaaaagaaggatgctaagccaagatttttgagatgtattttgcttcttgaggaatttgaatcgacaagaaattggtcaccaactgagaattgcgccgtcacagtagtcgagaaggattacccatggtatgctgatattgttaattacctagctgcagatgtggaaccgaataatttcacagattacaacaagaaaagattcctaagagagattaggcgatattattgggatgaaccttatctctataagcattgttctgatggagtttataggagatgcattgctgcaacagaggttcctgatatactatcgcattgtcacagctctagttatggttgtcattttgcaaccttcaagagaatatccaaagttcttcaagcaggcttttggtggcctagaatgtttcgggatgctcagaagttcatatcgcaatgtgacctttgtcagagaaagggaaagatcagcaagcgtaatgagatgcgtcagaaatttatcctcgaagtcgaagtcttcgattgttggggtatagatttcatgggacccttcccaccttccaactagaatctctacatcctactagttgtggattatgtctccaaatgggtagaagctatagctagtccgaagaacgattcagcgtttgtcatgaaactcttcaagtctatcatcttccctcgttttggagtgccacgcatagtcattagtggcagaggtaagcatttcattaaccatattcttgcaaaattgcttttacaaatatggagttcagcatcgggttactactctctaccatccacaaacgataggccaagttgaagtttcaaacaggcaaatcaaagagattcttgagaaaacagtgagtaaggcgaaaaaggagtggtcctacaagttagaagatgtactgtgggcttacaggacagctttcaaaactctgcttggaaccacaccttttcatcttctatatggtaaagcttgtcatcttccagtggaattagagcacaaagcagcttggacagtcaagatgatgaatttcgacatcaaatctgctggagaaaggagacttattcagttgaatgagcttgatgagatacgaactgtaacaacccgccccgtgagacccgcacacgtggccactctctgccacgtggcatcctgttggctctgcagcgcatctacccaaacatcgacacgaattcatgcttatgacaactcgaagctctacaaggaacgcacaaaagcttaccacgacaaaaagatcctcactcggacctttgagcctaatgacctacttttttatgattctaagttgacaatatttcctggaaaattatcttttcgttggtcaggtccctacacagtccacttggttaggccatctggaacagtcattctcaaaaacaacaatggaaaaccatttgccgtgaatggatagagagtcaaacattactgggctgaagccaaattccagtagaaaagccttcggatcttcaggacccatctgttgattaagcaactgtagagtcaagctattgcctataaacaagcgattagtgggaggcaacccactggtaagtatttctcctttttatttatttcattcatttgattcttaacttaggatttttgattttataggatttttattcagatttaaaaaaaaaaaaaaaaaaaaagaagaagaatagagtgttgaccaaaaacgcgatggtgtcaatcgacactagggtggtgtcgattgacaccctcattctctagatccttctcttctgcatgccgcaccacgtaccaagagttggattttcctcgtcggctcttccatatcagctgctttctcctccacccatcccgatggagccacatgtctttcagcagtacgtcgtcggcagtttcaagagcgtctagaatgccatagctaccctttctcgctgcggttgtgtttctcccactcgtcgtcgtcgtcgctctcccgcacccacctccggctcagagcatgaggactagccatcctccctatctttctttgttttctgactttgtttttgctttatttcagactattggttatttgttttgaaacttgttacacttatttttctatgctttgttggacctattgatgtgtgttttagtgatttaacagtctaaccggaggatccatgtgaaaacactaaccaaggctctataacaatgagctgaattcgcaaagctaagcaaaaggaccagagtgtcgatcaacaccaacatggtatcgatcgacaccactcttaggtaggaactcacgtttctctaacttttaacttttgattatttttccttcgatttctctagcttaataacactggggacagtgtcatataagtctgggggagtcagtaactaacttcatcttttcttttcttatgagtcagttgtgtcattttaacttagatagttgttttattgagtcaaattttttgtctgaaattatgatctatctctcgagtttattgcatggattgcttaagtactgcatattcaaatcaatccgactaatggaaaatccagaaagccaatcaataaaattaaggacatccattcccaacataatccacaaaggctggagctaatctcactactcttccttttacctcatcaaaacggttagtgttcataggacttgactccttgttcgtacctgataagtcgactaatgtgttaaaaagaaaatgttcatctcccaaaaaaaaaaaaataataataataataaaataaataatgagagattgagaagactttcagatagtgtataggggtaggaatgtttcctatgaccccattattataaaattatttggaacgataaattacaaaggttggaaaaatactgagggtgtcgatccaatatgcgagttcccctttgtttactctctaaaaagaataagtctgggggagagaaagaacaccaaagaaataaatatataacgaatggtcgatctatcatggtataatacaggaatgagtctagaaggttcttaagcatttacttgattgatgagacccagcgatgatagcctagtggatatagttgagtgctttggtatggaatctaggatgttgtgtgggctagcggagaattacttggtggtcaggatttgattagaactgttcaatacatggatttggtttgtatgatcaaggtaataaactagagagattgggagtttctatgttttccaaacctctttcacagattcaaccttttgtttgcttgagggcaagcaaaagctaagtccgggggagttgatatgtcctggtttttactgatttctaacatagtttcagaattgtttttagagtctttctagtctttttcgtatgttttgagttatttcatgtacacttacacatctgagacctatggagcacaataaggaattgtggaagcttttcagcaatgaagatcttaaaggacgtttttcagaagcgatcgacaccacacctgtgtcgatcgacactcttattgctgccaagggaattcttgttttctgccaagtctttacgaagccctgaagtcttccttatttgcaaagtagtccctccacgtttttagtcacgaatatacctaattgtttggtcattgttagacctaagttttgttttagagattgttacacattttgagagaagaatccaatccttttagagaggattctgaactccttactttcattcttaaatcatcaatgcaaactattcagattatgatttgtgtttctattatcatgtctaagtaatcaccttgttgggtttagagagtctcaatagggatttagatggattagtagatcgaaaaccccttaggattattcgtagtgttcttcatcttaattattcttattgttagttttagattgatcacctaaaacttgatattagataataggtatgcccgccataagtacttgttattagaactatcatagatgagcctagatatttaagaaagaacatgtaggttcatagaaggactatggtttagatactaggtgaacttatcaagctgataaacaatgcatgctttagcatatgatttttcggcttctctggttatctagctttaagtatagagagtttcgcggaacgccactggctactctagaatcatagtttgagtttgagaacggtgcgttaacaatcctaatattagctagatctacgatttatcaatctcccaagacaattccttagacccgacgctttaatcacttgaatctacaaatcgtttacttgcttatttatcttttacattcaattacttcatctagcttattaaacaacatcataagtctattgtgtgaacatcgagagctcagtggaattcgacccttaagtgctaacgacgatctcttatttgagggagtaagcttaaggcaatttgagctatatcaggcatcaatcatacgcttcattgcccaaagtaaagcttcgacttctgtatggaaaggagaaaacttctacgcagattagcaactcccatggttgacgcccctccatttaatcatgtgcaaagccaccctagacctgaaaagttttcgctttctttccatgaaccgtccacaaaggaaagaaagcatgagtatatattatcttgtgagatatctctcacccgaatttgttttttcgcttggaaagagaatttgttttcaatattgaactcaaattgagctaagtgccacgaatgagcctctttttctgctagacataacacatataactgatctttctccacattttcaaatattttttcattccttgctttccaaatataccaaagtatccatggatatgcgaatgaatcaaattctgaagagattcttgagaataagtgatccaaatttgcataaataggtgggaaaaatccctcggacaatagggatctttgaaagagcccatatgtgtctcgccggatgacactggaaaagagtatggtttattgtttcctctatagaaccacatctgacacatattgaatcacaatttatacctcttttctgcaaattctctgttacaggcacgcaacttgataatatttgccataaaaaaatgccgtaacttaggcggacattgcactttccacacatgtgctttcagagctttgatctctggacaaatgaaagatgaattaagatccttgttaactattcgtgttgtatggtagccggatataactgaataatttttggattttgtgaaatgtcaacctaggatatcctcccttgttgacgcacccaagtgcagtgcacttatcagctcgacatcttccggctcaaaaagctccttcaagagatcaatgttccaaaaataaagccgaattaaaatcatctacatccctaaaacctaagacaccttccgatttactactacacaatttattccaagccatccagtgcatacctctagattctccatttaaactccaccaaaatcttgcgacctcacttgttagtttaaaagtaattgttttcggaagcctaaagcaagacatcacataagttggtaatgccaaggctaccaatttaatcatcacttctttccctcctttcgataagaatttaaccgaccacccatttaatctagtctataatccatctctaacaaaggaaaaattctttgtcttagagccccctaaactctcaggtagcccaaaataggatcccatacctccgatattatgtatagccaaggttgattttatttctgcctttatagcttcgtctactttatgcctgctgaatcgatgatttcacaaaatttatcatttgtcccgaaaccgcttcatattgttttaggatacccaatattattccgcaacggtctttatcagctttacaaaagaaaagactatcatccgtaaataacaagtgagaaactgaaggaatcgatgttgctactttgatacttgtgatcaattttccttgttttgccttccggatgttcgctattagcacctctgtgcagagtatgaataagtaaggagaaagtggatctccttgtcttaattcccgttatggtattattagtcctttaggttgtccattaagaaggactctatactgaactgaagtaagacaccacattatccatgatatccattttacgcaaaatccctatttccttaataattccttaacgaaattccattcaaccctatcatacactttaatcatgtctgttttaattaccatgtatttttaaaagcaaattttttgtgtcccactttcttcaaccgttcgacgatagacgttttttgtttagctgagctagtgttatatattctttgtttgtattttgaacttgtatccacatgttttgtttgatggtagatattctaaaaattaaaagaaaaaaacttaaattagaggtaattaaatttaaagaacaaccaagagtgatatacgtataattcgtaaaaatatggtcttagttacgtaaacatatgaacaattatgtattgacaagactagtaatgtaaacatataaacacttaaaagaatatattgacaaagattggcctcttaataccgttatgacaaatagatatcaatataatgtatcatcttctagatattaaaatagaacatatgacctatagataagattgctttcccaaaaaatagctttaccaatagaacaaagttgaagcaatggtagtatttttgaaaaaaaaacatttttgtttcccaaaagattggcctatttgtttatatagaggttagtatttataatcatttttcttctaggattaataataagaatgtataatttccttaattatagtattttattaattgattgtataatttcataaatcccttctttattttaaaggcaaaagtattaatttcttttagaatagtaactttaaatttgaataagtaaatgattatatatttttatattttatataaaagaataatatctgaaaatataacagattggacatgtcagtaatcatcgttcctccagtttctttagtaacaaatccaacaaagtttgttgttgcaagcgtcatgcatatatatggtgaaattggacttggctcaatgtcttttggaatcttgcaattgtatggattcaccccagccgcatttacaataatgaagttaccatattaaaccaagagaatatattgtatatattccatatcttttttaattaagaaatatgaaattctatacacaatctaagagaatatgataactactattctatattataaccaacataattccatcataaaattctaagtttctaccctatcagcaatcaaatctttcaatagaatcataaaacttgtttcaggaaaaagctatcgtatcagcaattaaatcttcaatttaaacaatagccatacaagaaaaagcaagatgtcaaattcttctgttgttacacttgaatataagacatcttactttcaattatgtaaattattttttttgttctaaatttgttcgacacttgaataacaaaacaaattcaaaacaactaaagtttttaagaccatgtaagatcaaatgaccaaatagaagaataataagagaggaaaatcacaagaatctaatccagcaaacttaccatgtacctagcggacactctctctattgatgcaggaaccaccacctcttcgtcatcgcctaatctgaatcgaaaaagactgccagaaaatgagctcatattgctcattgagtatgctacacttacaaaatcaaattcaaatcaaattatatgtgtatctaaagaaaatgataatttagagtttgtatcgttcgatgtattaataattatctttttatatttttaaaattaataaaaaagttttttcttttacacatgtcaaaatatgagacacaatcctataattttttaactttaaaaaccaaacgttcatactttatataataaacctagattgataacccgtgcttcgcccgggtgttaaatgttgatatataaatacatgttgcggggatttttggaaactattgtactatgacattttaattgtattatcgtatttttttttttttttatcttatgattttgttatatttataataataaattattttaatatatatgtgttgacactcattatttttatatagaataatgttgtaacaaatggttgaaatgttagatttattaattatagtatttgagtatattttttttgatatgcatttatttattggaaggaattttatatatgaatttagtatagtattatatattataatctatgtttgtcaagtgttagagatattttgtttattacattttgttattttattaataatgaaaataagataattttattgtgaataattataatatgaaactgaatttattttttcctgtgtattataaatttcaattaagaactctttatgttcaaaacaaaatcacaaaataaaataaaaaatatgtgatttacaaatgtaaaagccttttattcttttaaattttctaaatcatcctactatattatttgggaagtacattttaaatgtaaccttaatttttgtaagtaattacatatatatgccattagaaataaaaatttaaagagtaaattaatttatctctttaaggattaaaaagtcaaatactaatttaattaattaaatttaattaaaaaacgaaatacattattaatttctaaaaattataaccaatcaaaataaaaatataagatttgatatctaaattttaattaatttaatttaattagaaaaacgaaatacattattaatttccaaaaaagtaaccaattaaatcaacaaattatatttgatatctaaattatcatattaattttttattaattattatagttcacttctcatctttatatgattctatttttgcagaaaaataatatcatcattataaaaaaataattagagttttttcgcatatgccatgatttgaatttttaaaaacaaatataaactgttcaatagatgaaaaatattataacgggtgaaaaatagatttaagaaaactttctactgagtaacgggtcataatttgaaatatttatattcaatttcatacatattatattggaaatttataatcttatatactacaataattaataacatattagatgtgattcaatttttaatacaagctggaaaatcctagaattgacgggtttaaatcgatattaatacaagatggtatactacatgtgaaattcttaaattaacaatcaaactacaagtgtataatcttaaacactaaacaatatagataatatcaacaaaacatatacaactcacaatttactatacatttaaaatcaaataaaataatatcatatatttttaaatcatctttacaataaaagtttttagtttaactaaaatataagcttacctgcggtatactgcaggttaatatctagattatagggcttactagatctaaagacgggtcatcaaagatttcctaaactgaagcaaaatatattgaatattcaaatatctatctgttttataaacaaataagtcaatttaatattttatatacgaaatcaattaaatcttaatcacataaaaattagcacaaaaaaaaagtattcaacaattaaaaaattatcaaatctttgtgttatataagttttgatactatattcgaataaagtgtaatataccttttcaatttgtattctttaactaatttaagctaactaatatatttgctaatcttatacttatcaaaaccgactatagtttcttatctctatagtatttttgcaagaagtttttggtggatttggatagggtcatatggtacattcccctattaaataaatatagtgcactcctatgttattagctaaaatgtttagaatataattcagagtcatatcattaataaaattaatattaataaaataaatggttttttggcaagacggatttggaggcacgggtttttgaatcaacattaataaaaaaagtaaaatataattaatctaccgtttcaatacgggttaaatctttaatttagtattttctaagaccactaatattaaatatatcaaatcatcctaatttagaaaagattatataaaaccaaaaatgttatgtgttatgtataatgttactatatataaaattcaacaataaaatataaatgtattagagaatgattcaatttgcaaagcttttatatataaaaaataaatcttaaattttaaaaattagtactttaaaaaaaacatcacgggacgggtaaagaaattacagaacgggttttattttggaattggattatatggtggatgtatttgaataaatatttataaaattttaaatattattaatatgttgttttaataaggattaaaacttcagttttttaacaattgtctcatggattcgtggtatagcgttacttaataacaattataagctgtaaaatataaatattttataaaaaataaaatttgcaagttttaatatatattacttttaaaaaataaatcgtcccgcggtataccgcgggttaaaatctagtctatacttaattaaagataacaaaaaaaaaacaacctatgtttaaggacactttgactaaccaataaaaaaacagtgtgatataacctatagctgttaaaaaaaatgctattcggaaaaaaaaattgtcgagcttaaattcatttttttgacattgagcttccttcaattcgattctaatgtcaaaagctttactgggtttttcggatgtcaacaaatattatcctaccatttcatcaattaatcacacaatttcaacagatctaatcgaattcgattgaaattttgataagtggagaaggcggaggataatggttttttaaagttagaatctggtgattggagtcttgatgtttggagttgtccgaattctgattcatcttccgctgatcacctttcgttatgttcaatgtgatattgagaaggtaaacaaactttaatgaaattgagaatcttgattgtttaatgaatcttgatatatatatatatatataagctttaatgtattttggcgaattgcatatatatatatatatatgcaattcgccaaaatacaataatgagaattgttctttcactgtagtacggaaacactgaagtttggaggccatcacaacggatgtttcattgttgcagtcatagaatcgttttgattcttcacaaacctctcagacaataacaatcctgaaaaggtacatggttcttaatctttaagcaagtaatatttctgcatttgtgtgatatggttgatatatagataatctaagtaacatcggttagaatctgtatatgatagtgtaaactcttagattgaagaagcaaatattcaacgaatattgtagatataagacggctgtaataaaaatccaacataagtaaaaaacaaatggaaactaaagattcttaaaaacttctttgaaaactacattttttgtttgcttttgtggcttaccttcatcatccacaatcagaatctttaatcttgtctttgatgtaactctggatatggcaacataaagttggttgtgtgaaaagcatggcctaggtagaaaaattcctactcttttcaaagattgaccctggcttttgttgatagtcattgcaaagcaaactgctaaaggtagttgtgttcttcgcattctaaatggtaattttgtgtttgatggtgctagcttcaatcttggaatcaatactcaatgaccagctctgtcatcggttagaatcattgcttgcaaaatgaatggacccatttgcgtgatctgtaactttgtgccattcattagaccacctacaggatcaatatttctgggcaacataagaggacaaccaatctttagacgaagcctatggttaggcaaccctgaaactttaacactattcaaaaagtcaggagtcaatgccggattattgttaccaccaatgtcatctgggtctacactgtctgaacttaggaatataaactcctctcctgaaaattaaaattttagttagttacagttaaagaaggaaaagaaaatagaaacactattcataaaagtaaataaagttacaaatcaatgcttctgaattagtaaatacattggaggttatcaagcatagttttggttgacatcttcgtttgtgggacataatattgctctttcttcgaaaaaactggatcattttgttcatgtatctttgtaatatctccatatatctttatgcatatggcttctattggatcttttgctttcgtaatcagaaattcagaacgaatatcgatcaaagcctccccatcattaggctcaacaattctaccatcacctactgctaaaatccactttgaaaactctttaatatcttcagcttcactatcactcaaaccttcagaataaagacgcatattctttgtcagagtcaatactttgcaatgacaccaaaggtaagatgaattaagggcatacataactatgtctaccctatcagcaccggggatttctggtagaacttgtcggaaatcacctccaaagacaacaaccttgtcaccaaaaagtttattatcaccattcccacaaatatctgacaaactccgatccaatgactcaaaacagtgtctgctcatcattggagcttcatcccatataatcagagaagcttctttgactaaattagtcctatctgaaccagctttcatattacatgtagtaaactcaataggattaagaggaattccaaatctagagtgagttgtcctaccaccttctaaaaggagagaagcaataccactggaagtagtgagtgttttccaaagaaatgttttatctgttcctccaaagccataaacaaaaaatactcccccaacattttcattcacggcaccattaatgtcgtcgtaaatagacttctgctctagagtaagcatctta

SEQ ID NO: 540 - DNA, 112629 bp, Arabidopsis thaliana
gaattccaaatctagagtgagttgtcctaccaccttctaaaaggagagaagcaataccactggaagtagtgagtgttttccaaagaaatgttttatctgttcctccaaagccataaacaaaaaatactcccccaacattttcattcacggcaccattaatgtcgtcgtaaatagacttctgctctagagtaagcatcttaatccatttggcatgtttttctgtcaaattatcacgatcataccctctctcatctaaaatcaagacattagtatcaaatctcggatctctaggtacttgtggcatagtcttataatatgtaagtgaacgaccattccttcttaaaatgtgatctatctcttgtagagcatataattttttctcctcatccgacaaaattaaatctataaacaacatttaactaaatgagttacaaccaagcaaagcaagtttatgtgaatattgcattgtaaaacaaaatgagataaaattgaggttttgaaatgatattagatgttacctggtctgttgaaatattacctcttattgttttgaatatcttcagagagatgtggccacgttgcagcccacacattttcaggaattatcatagcatctaacattattacgaataactgacgtaaataccatccactgctccaaaaacttgttctctttaaatcatcaatgtattcatgatcattatctaataagccttatgcttcacaagcatctttccactcttcatatagcataccattaactgtcctgagctcttcaaaacatcttggacctgattgaacattgaggagtattctcaaataatattcatcttctatatcacgaggaacatagtttattcttcctatagcaaaacctttctttctgatattaaattttttttcttttgaatcataggtaaatctagtggggatgtctacataagttagcttcctagcaatcctactaactttatttaattcgaaccaacaaggaacatagagccatctagatcactacgatttaacactgtttctacttcttcatggcctttaaaataaataatttgttcccctggcaaatggaacgaaagcttcatcacagccgtagatctataatgtatatgatattttaatattctccaggatgcttcgcaagcagaaacatatctgaaattcaaaattatacaatcatatggaacacaaatatatgtattttatagtaataatactattaactttttaattaaacatacgtgcaattgaaatagtcttcgacttcattcttcttctttgtctctgatcaatctcgatcagcattgtccttctgtttaccctttcctttacttttcgaatttaaagacgatttaacaacaacagtaacacgatctggtattttatgaatatacatgaatatgtatttcacagaacctgattggttacaccattccacggtgatgtgagctatgtatctcagtgatagggatctattataaagaatgacatatcggttatcgcatttaaagtctttcttctcaacaaagttatttgttcttctctttctgtattttgcaaatccttctttatcaataatggtcttttgaacatgatctttcggataaaactttgaacactttcctttttccatactatggacatttcgggttcaccacacgacaaggaccaagaaccatagattcctttatcacttcaaatagctcaaagtctttcaatttgtcaggaatctctactgatataactttatcaatgtgctctgctttggtcaacttacactttgaatccagccaaattagtatatgagcatgagggagtcctcttttttgaaactctatggtatacatagctgcaattacacagaaaacataataattattatagttatcaaaaataataatagaaatcatataagagtaaatgaaacgaattaaaaacttcttacatgttcttgtctttccaaatagtttttttttagttaaatcaagcattagagaatcaagtttcattttgaagattttgcatataatcccaggtctatcatcagctctcaagtttcgctcaccacaaaacctaatcacctctggccactttggattgcacgtgaatgtgataaaataatctggaaacccaaaatgtttacacaatgtcatcacatccaaatacatgttcctcatatatctaggagcacctgtaaaagtagctggcaaataatatgctaatccttgttctttcaaatcactctttccttcctctgaagccttttgcacagaattgtaattatctacctcatactactctagttaagtttgatgtaaccaagccggttagaagctatttctgtataagaatccaccaagaattgctgccacagccttatcgacctaagtaaaatatgcttctcatgttttctttcgtgaattctgaaggcaaaccatggccttatagatatgcacttgttcttggtttttttaccagaccttgtttgatgtttctcaatgcctgttctgaatccatcttcaccataagggaacaatagaggatattgtaaaggaagataacacgaaaggatttcactaattctttgtagtttccctgatttatcttgcacaactatatctctacttggcatatctatagtgaaatctcctggaatcaacatggctacctctgatgatgttggtacattatacaccctgccatccttttcccgtttactaactattctcatataaaaagtctcttctggattagcattgagcatgtccctagcagtccgtaagtgtgataaataagggttgatactattcagcaatttgatcacaacatcaataattttctttctcaagtctttctttttatacttgttagcattaacaccattactattaagaatcaaataagtcaaatttagaacattaaccaatattaaaacaacatcaatgttatataccaaaacattagtaacactataaggaatgaactcacctgagtacttccgatctgttatcaacttcattctttgtgtctacaatatatgattgcatgaactttggaggtatatcattgtttggtttcaaactccctatcctatggtgattctctccgtgaatctggaacatttgaggacaaccactggctgtaacactattttctgtatcaccaccaagtgatgtaaaagaaaatatcatattgtaagctagccctgacattttctctgaaatgtctactgatttcatcgtcattggttagcaatgcataaagtaattctagtgaattattaagaaaagataacttcacttgaccttgcaaacaacatgatgtaaacttgggctacttattcttgactgtcttttcaatacgctcaccatgccacattatagctccataatattcacatgagtaaataggatcaccatgatcaatgtatactgcatttgaaattataaaatgttaaatatagaggatacacagagtactaatatatagtcatacctgttttgttttttcttgaatttatatcaaattgacgctcaaagtcttcatgttcttttcatgtgaaacatagatgtcattagagcttgtagatttgttacaaccttgattgagcatttgcaaaatgtttattataatttatttacaaagtttattgaatataacacaccgtaagaatgttcctctatattttcattagaggtacgacatccctggccaaaagtggcaagcaaactcttctcaagattatcgaaaactgataaaatttttttaactagttcagtaatcttgacactttttttttgtagttggtatatgaatcataatcaacttcatcttgaaaaccattttcaagatcatcatatatatcagactctgaacctaaaaaataagaaaagtttattatacatcacataatatagtttattttaacggtgaagaatatgtaaataattcagttatgtttaatctttaccatctgattctccattactgtcacattctcctaaattcttttgatttcttgattgcagaaattcaggaagaatggtatcatcggttttgtctcctcgtccacaatgtgtgacgccatttatctgaagaggaatgtcattggtaaagtttctaaacaatcttttatctttagacgggtttgatgtctctccttgttccaaattagttaatgtgaatgaagaacttaggttggaatttggtctatgatttcctgaatataacaaaatgttagatagtattaaacaacatgagacttaccaagttgtaaaccatgacttaccaaacggatactgagaatcatttgcatctgaaggtagatcatcatcatatgttaaatgctttcgatatgattaaatagaacttgaaagatcgattcctgctggcattgttaacatttcataaataattcttgttaaatgtagttatgttatagaggacaacctctaaagcttaaatatatattatagattaatcagtaaacttaacttgtttttgatgttaaagatgactccaaagtgccaggcgtttggctaatgcttggtgtatgaactctttgatttgtaatatcacttagaacgctcttaaaaacataactaactggcactgatttcttcacacttggtgcattgaatgacgggggtgtattttcagaagtttcttcatgtctgaaccgcttatcagttgtgttttgaataacattagacaaatctgaagattgagtttcttgaattttttttctttttgacatgaagaacaaataaaagataccagtaaaaacgtgatagctaaacactcaaaactttatgagaaatgacttttctataatatgttaacctagttatgtgctcgtttctttgttctccggccagaaaagattgacagaatatttgcagtgatgttatttaattaaatctattaagatatcaactatttatatggaaacatttttaaactttgttatttcgttttcttaaagagtatttaaattttctaatctatgaagatcttttttttctatttaacaaaactcaagcactaaaggaaatatttgtgattgggagagtctttcttggtatgaattctctcaagtctctaagccaatgactacttattttaaggtaaattctggtttttttataagaactaaattattaactgatatggttcaaataacctagaactactctctcaaataagagatcaattgcagtattttagaatcgaattcacggagttcttttgttcaaacaatgagttaaatattgagattaagctagcagggtaatagtgaaaataaaagagaacaaagtaaaaagacagcaaattgatttggttgtgaacgatttaataaagagctaggaacagagtattctcaggaaactattggttagtagatctagtgaaagctaggttgttaacgaaccattcttaaactcaaactctaattatggaataactggtgggcgtgccgcgaaactccctatatctatagctaattataaccggagaagccgataaactatcaacctaaatatgcattcttaacgagttcaattggtcatcttagtagataggccgattcttattacacacctataaaccagactcatcaaataatagatccaacaccagatacctatggcgggcatatctattgtctagattcaagatctagttaattactctagatctagcattaggcataattaaagatgaagaattctacagataacctagcaaagggggcaatctactaaaccatatgaatccctaatgagaaaccctattcctaacaagcagattactcagacatattggatgaagcaaacaaaatatttgagatagagaaagggaaagaagggatctcttcactgtatatagatctgaatgaaactctcaagaacaatggatgaatagcttatatctctcacaatagggttggcaaagaacttgataaaagacttgataaaagaaacttaggtctaaaaacaatatatatagaccctaaagacgtcaagggactaataatgcaaataaggaaatcttctggggcaaacttgagcttctgtaaactcgaaagcgtctaggtttttgctgggccgaaactgctgtcgatcgacaccaagagtgtgtcgatcgacactcctcgctgattcctgaaccaaaatcgtccttagcttccttttccttagcttttgctccagataatgtctacttatctccattgttgtcccactgcatagaatacctgaaaagacactagaaagactcgagaaataacataaagactcaaaatcctatacctaaacatagataaaatcggtgaaaatcgggttatatcaactcccctagaatttgcttttgcttgccctcaagcgaaacacaaaaaccgaacccgtggaagaggttttgaaaacaaaggaactcccaaaattctctagcctattgccatgatcatccaaactaagtccatatgcctaacaagtctaatcaaatccttaccaacatgtacttctctgcaagcttacacaacattctagattccatacctaaattccacaactacacccaccaggctttcatcgctgggtctcatcaaacaagccaacattcaagatccttctagactcattcatgtactataccatgaacatttgaccattctttatattttttttcttttttggtgttctttctctccccagacttattctttttagagagtaaacaaaggggaactcgcatacttgatcgacaccctcggcattttccaacctttgtaattgatcattccaaataatgtataataatggggtcataggaaacattcctacccctatacactatctgaaagtcgtctcaatctctcattatatttttctttttataagaggagaggaacatattatttttatcacattggtctccataacagctatgaacaaggagtcaagatctatgaatactaactgtttgaagaggtaaaaggaagagcagattagctccagctttagtggttgagttggaaactaggatatcctcaagtctgttggtttgccatctagattttccaatagtcggattgactcgaacctgcagcactcatcaatcaggcaataaacaagagaaatatagatcatgattcctaactaaactaaagaaaacgtttttttttttttttttttttttgaaaaaggaaataaaggaaataaccaaatgaactacaaaacgaaaaatgataagaaacaaaaataaaagcatcattagtaagaacctcccccatacttaaacgacactgtccccagtggcattcaaatccagagaaagcgggaaaaataaatcaaaaataaaagaaaataaaagaaagcgaaaaaaaaaatcaaaccagtcagttgcctcccactaagcgcttgttttgagtcgatagcttgacttggcggagttcaggatgtgggtggagtggtggtggaggattattgctgcctcctcgccttccaaggcggtgtgtaaacggatctggttggagcagcttctggtgtcgatcgacactcattggtgtgtcgatcgacactcttctcgtcatctgcaaaaacaacaagagaaacaagcttttgagggactctaggcttgttatcttgtgaagcagtattcaaataatccaaagaagtaatcaaagataaactaggagaagagatagaagagaacttatcacatagggcctcaagtggtgtgggctgaagagaatgtgcagaatcctctgtttgtgaaacccgagggtgtcgatcgacaccgttcctctgcaactctcattggcgagctgaacgggttggagcgttgtgtgtggctctgtggtgggattctgatcagtctatggtggtgtgtgtgtcttggaggcaatgcaactgataggcttagtaagctctgaaccatccatgccaaactccatctctgaatcacaaaccttgagatagattctccctctcttcacatcaaacttagcaccagctgtagctaggaatgctcttccaaggataaggggatccttgggttccttctcatagtccaggaccacgaaatcagaagggattatggagttaccaaccttaacaggaacatcttcaaggataccttcagggattcgcttggaacgatccgcgaagagaagagtgatggtagtaggcctgtagtgagtcatgcctagtctcctagcaacagacttgggcatgaggttgatgattgatcccagatcacataaagagcggctgaatctgcttgtggagataaagcaattaagaacaaagctaactggttctggaagcttctcaatggtctgaccaggagtaatggtgcagatgtattcagctatgtctactctctgtgccttctccttcttggctttaggaagcatgattgcactaatgtctctggtaagcagcttagcttcatctgagctaattccattgtcaacaagtcgcttgacatacctgttgagtggagcagaagatgtctcagaagcatccttaggaagagtatgaaggatcttctccattatagttgtgcacttggcaacatgaatctcctgcttagaacgacgcctcctcggataggggacaggaggagtgtagacagactcgagctgcataggtacttgcacctcacaaggtgcagttcggatccagtgttgatcgacactagaggggtatcgatcgacaccgtcgtattgagttgtctctgagaaaagcgtcccatatggtgccgatcgacacaggagggtgtcggttaacaccatctctgcaactgcgagattcaactcgtcttcagtgtccaattcttcccacacatcatctccttctctaatcaagatggcattgcagctcttcctttggttagcatcaggattaccaggaagaaaaccgtcatgtctcttgatagattgtgcagtttgagctacctgtacatctagcttcttcaagtgagagctcagattgtcgatcttcccattaagatctatgtagacagcatcaaacttgccattaaactccacaacaagctttgtttggctctctagaatctgctcaagcatcgattccattcttgtctctgatgagggtggaggggggggcttggtaagttgaattaccatagttcctctgaaagttgctttgaggaaaggtcttctggaaagcaggctttcgagtgtagttggaggaaccctggtttcctgtaaacctgttgccactgaagttgccttgtggctgcccaaactttatgtatccctgaccatctatgtagaagactccttcctctcactcagactcaatagtctcttcctcagctgcaaagtggacatgcttcttcccggtgagcaagttatgaactgaatccagcttagcattcacctctgccatctgatttcctgaaatagctccagcaatcttcttcctctcaaaatcagcattcttggtactgttgctgcaagcaaggttctctataagggttgtagcatcactgggtaacgtgtattgaagttaccattgctcgctgcatctagagccatctggtatcttcaatcaactcctctgaagaaggtacctagaagttgtacctcaatgaaaccatgatgtggacaatctcgttggtactccttgaaacgaacccaagcagccttgaaagcttcagctggaccttgtgtgaaggtagacagcttgattctcaactcctcaaacttagcatcatcgtagaagttattcaagaaggctatcttgatgcttctccaagtcttgacgaaacctgctttaagttgcttcacccaagaagttgcttccttagcaagtgaataagggaagagcttgcacagtaggtagtcctccgagactccattagccttgatgctcagaacaagatcctcaaatcactcgatatgatccattggttgctcatgagataagccatggaaaggatgttggccaacaaaagcaaagtagccaggcttcagctcatagtcgttcctctggaatggtgggggtacaatcgctgatcgattaacatagaacaggtctggcctgttgaaatccccaagagtacgacgtggttccgcagctggaggaatagctgtaggaatctggtgttggtgtcgatcgacacctctgttgtgtcgttcgacaccgattgcatctgcgtgctgctcccgatggtgtcgatcgacaccgattgcatctgcgtgctgctcccgatggtgtcgatcgacaccaattgcatctgcgtgctgctcccgatggtgtcgctcgacaccgagccatgctgcatctctagcagctaattgtgcattgagacgcgcttgatcctcatttgcgtccttaggtaggatgagtccatgatcatccaatctctgaccagcctcattgtaggcctgcccatcctcatctctcaaaactccttctgcatcagctctgatgactctgtcagccattgctaatttctgagttttttggttgatgcgttcaagttttcccaagtctagaacagacaagttgataagctccttctgtaaacaaaggggtgagtaacaaaatagaagtaaaaactatacgaaatctctaaactaaactcaatgatgattcccaagaacttcggcaacgacgccaaatttgatattgttcaaattacttgaactactctctcaaataagagatcaattgcagtattttaggatcgaattcacggagttcttttgttcaaacaatgagttaaatgttgagattaagctagcagggtaatagtgaaaataaaagagaacaaagtaaaaagacagtagattgatttggttgtgaacgatttaataaagagctaggaacaaagtattctcagaaaactattggttagtagatctagtgaaagctaggttttaaacgaactattcttaaactcaaactctaattatggaataactggtgggcgtgccgcgaaactccctatatctgtagctaataataaccggagaagccgagaaactatcaacctaaatatgcattcttaacgagttcaattgttcatcttagtatataggccgattattattacacacctataaaccagactcatcaaataatagatccaactacatctagttaattactctagatctagcattaggcattattaaagatgaaaaattctacagataacctagcaaagggggcaatctactaaaccatatgaatccctaatgagaaaccctattcctaacaagcttattactcagacatattggatgaagcaaacaaaatatttgagatagaacgcataaacacagtaaatagaaaaagggaaagaagggatctcttcactgtatatagatctgaatgaaactctcaagaacaatggatgaatagcttatatctctcacaatagggttggcaaagaacttgataaaagacttgataaaagaaacttaggtctaaaaacaatatatatagaccctaaagacgtcaggggactaataatgcaaaaacggaaatcttctggggcaaacttgagcttctgtaaactcgaaagcgtctaggtttttgctgggccgaaactggtgtcgatcgacaccaagagtgtgtcgatcgacactcctcgctgattcctgaaccaaaatcgtccttagcttccttttccttagcttttgctccaaaatgtctccttatctccatatatatatacttacctgaaaattggaatatcaatttcttcaaatttaggatcggtgtatagccttgaaaagccaaactcattaaggagaatatgcttacctgtaaaattttaaaaacatgttaacattataatgaagacaaatctttattattatttagaagtcaaatccaaagtaatgaccatgataatttgtgattctccagttttggagaagagcgacaattagttcataattttaagtaatcaaactgattctatttgaccagtagttcacaaaccactggcacatctttccaacagaaatacaccttacctttcttcccctaaaaagaaactcaatatcatcactaaccacattactaatgattatcttttaagagtagaaatagactacaatattgttccttaagaaaagacttacatgttgtccgcaatcatgaatttcacaaatcttgcttcataatctgtctctctttgacgacaaacaaatgggaatctcctaatgttagaaacccttgtaataatacccattgcatctgaaacgtttaatataatgtaagttaagagaataaacaagatataaagttgaaaaataagttatagaaaacagagtaccgtatgatctcaaatagaaaataagagcggagccacaaactcaaaaaatctacttattgaaagagaaggaacatgccacatgtttgttcttctcataaacttgatatgttttgaacataatgagtatctaacaggcatggtattaaccacaacttgaaagtcggacatgtaataccaaaacccctcttttagtacatccttgtacttccaatgaatgatgccttcttgaatagttgcatcaattcgattatactacataaaaattataaaatttaaaaaatagggtttcaaatataatcaagtcagagggtaagctatgctaatttataaacttacatttgaatcgacatgcatcatcgtggttacaacaacatcttggggtggattatgatgccaaagaacaagaatcttcacatagactctccatttagtactgtgaactcctatgtcagataagaggttcatcatctccattgagattgataagccgtgatagtttatattaggggaaaactcaaagaaaaataaaagtaaactgtaaacacaaagtcggaattatctagtttatattagaggaagagttgcaatcattgagaaaacagttctagaaccactaaaaatcgagaaactcaaacgttatatattgattaaatattataaatactaattttaagtgtaatcgccaagtttgttatttatacgaactttatatattagagagtgtattctaagaatattgtagttaagatatcatatattgttatggaaagagtatatacatattgatactatataggtaatttgaattttgtcttctattggaggttgcaatgtattgtaatttcaatttttatgtaatagaacttgaattaaatttactaatttattaacatatttttcctttctaacagagaaagagctaaagagtggaactcatcatttccatgtaaggttagatactaattactcttagattgtataagaaaatactctataaatatgaactaagttataaccaaaattaaataactggaaatttaatatttttaacagaaatttgaaactcaaacgcttataagtcatacatgcttaaagaaaatacaaaacatagggaaaataaacatagttcatatgtgtattaaccattatatgtgaaaactatctactcaattcatttttggctcaatatacattctttttgcgatattgttatatagtctaagttactctttacttaattacggaattatatcaatgaatctaattaaggctaatatttatatgttttgtatcagttatggaatctttaattgagaatctggagccattgattggtctgattcaacactaataatgagcaggtaatattctaatagtttcagctatggtaattgtttaatagctataatattcatttcgaaaaagtaaattcttaaaacttgataaagtgcaataaattagtaacttgaaaacatcaaatatgagaataggaaactgaaaccataaaataaaaaaaataacacaatgtatgataattcaaacaaacatttcaattatacttcatcagataaaaccaaaatcaacttagaaacaataagtttgatttttaacagcaaagtaaattgcttctacaaatcattgaaaagacgaatctgactccaggatcagttctcaacaacatactcaatcttccttcaacagacccatcatcttcacattcaaaccaacagctgtaacaaaaacaaaatcatggctttttgacttgaatagttagtatctaattgacaaaaataatttatttaatgactttcacatacatgtattgtgtcacatcaaagtttggaaaagatttatcaatgaagatccttgaacacccatgctcgctgattaagaccttagatcctagaacatttgtaaagacttctggtgattagttataggtcacagggtttaacatcataaaggaatgtgactaacatattcatgaattttcactaacctttaaaattagaggctctccagaaccagaggactgtagtgattgactcgtagttataagttacgaaaccaataaatagctaaaaacgttttcagaaacgactcacacacactccctctagcaacacatgatatgatcctatcactacaaccaaccaaaatacaaatttaccatactacaaatataagtatgttcctaacgaatttcaatatcaatatacatattacttgttaacttacaaattatctctgatggtaaatgtcacatatatggcctcatagtctgtttccccttcacgacagacatatggaaacctcgccacagttgagacacttgatatgactctaatagcatctaacaataacaaaagagcaaacaaatacttataaatcttagtactaaggaaatacaattgcaagaaagcataagctatataaataaatcttagattaccagttacataatcctcatattcatattcgacttcatcagcatggatgaattggagagaactttcagtagatatatcacttacaggccacatttttgtgtgccacataaacttgatttcaaaagtagatgatgagtacttaggtattgaagttgatctcttcaatcggaagtcagcaatgtaataccacttgccttcaaataggctaggcttgaaattgttcaaataatccccccaaggtactctatcgtcgattctggttccctgaataaaaagacaaacatatcaaattctttgaactataatagaaaccaaaaaccaaaataggaatccaaaaagattgtttacgcacaaatcttcacatcacagaggatcatggtagtatgatttccaaagatcatagactgattttcccagatgcttaagattttcacgtataggacccagttgttcctgtgtaaacttaagtcacgaatatagtttgtgtcggccataagaagtttctatggtttgatacagttttcagagagagagtagattgactgaagttaacctaatctttgtcttatatatatggagaggaaagttgtaacgattcaatgaatctatatgaaaggtttccatataatataattgttcaaatcctttagtcaatatataattatttgctaaccgattctgtagccaataaaaaaatagcaaaaaaatttgctaatgattgctgcgatgttaagtagataatgatgataaagtatttggattcagtagacatataaataatggttgcttatgtttttgatcccaaacgaattcttcagtatttaatctaaataatttagtaaatatactaactttgttgtcttactataatctcaggcatttgaagtcggagagatagcacactgcattaaggtaatatgattcttcttttactttagtcattttagttatcatgagttctaatccatgacatttttagaagttggtaaagtaagtagtttcagagacaagtaaaataagcaaaataatataaagtactcacatgaaatccaacttataacagaagaaaataaacatagttcataaagcatagcacaattgttttctcataattcaaattgtaaatcgataactaagaaattggactccacactctcaatgaaaatgtcaacatcttcatcatcagatcatgcaaagttacgcctacgaaacagaaaccaaaaataaacaaagttaatatctatatatacaacatatagactaaaaaatgcttaagaataaggctgtagattacagatatttgttcttgtcgattcctcggaaatttggatcaatgtgaacctttgaacaaccataaacacttttcaaacatggatttcctgttaaacaatcacacgatttagtaaatcataaatcttaaatggcttgaaaaaaatctgacgaataagtaataagaaaataaccttcaaactctaaaatgttccaaaaacacagaataatcatcacaagctccatcctaaaattaacatcacttattttcttgtagcatttcctttcaaactcatcacaagaccttcctacaacaacgcacttcatgtactaggacctaaaatatgaagtgaactaaataaataaaccaaaagatatatatatcatactgaatgtattatagttttaaaacttacacagtatctttaattgtaaaagtaaggtatctggattcatagtcactttcctattccctcttcacccaaggtattttcccgattggtgagactgattcaatgaaaaattataataaccaaatgttaaaaatactttgttttgagtggttagccgagtattgtacaaaacaaaaactaaaatactcaccaacaacaaaatttttttcaacagctgcattcttgatccggtagaaatcaaaacactcaatgaaatgacatcttaccttaggagcaacatgttccactgtagtctttcgtaaaaacttaatttggaacacatgagaagagaatctttcaagtgtgttagctacaaccacttcaaagtatgagagtagataccattgtccttctcttagtgtagaattcatttcttctttgtatgcatgtagaggagataatgcatcgatttgatgtccatgagaccatatataaaatctcatcaaatctttcatggaggtttatatttgtatgatccggtaaataacaacaattatagaaataaaaactgtaaatataagtttcataccttctcatcaactaaaattataatacgttcttccccgaagtaattaggaggccaattccacaacttcagtagcttaacaaagacaaaatattttgtttttttaggacgccaattagaaaagttcttgaagtttgacattgaagaaaaactcttttttgaatttagacagcttcttttgagggtttctactgttttttcttgtgtggaagatgaataagataaggagagaatctattgatctttccaatatacagaacttcttattttttcaaaaataattatatcagaaatgaatttcaaatttttgccaatgaatgattacttttttgaatttagacagcttcttttgagggtttcaagatccattgatttggtttatttttgaaaattcagatttaacaattatatttttgatatatcacatcttacttttcaataatataccatgcaagtatattgactataaaattccaaagatcttctgatgttttcatttgtttcagtataatttcgaaaccggttatttgctattcaataagaaaatagagttaggataaaaagtataaatatatagtagaacaaagatagtgaaaaccagaaataaaatctctaacaaaaatagcaatacatataaatgtataaagcatcataaaaattgaaaatgttgttaatacttattaaaaaatataaacgaagtcagaaaaatctgacttttattagatccaaaaccaaaaaacaattgtgaaaacatataactaattttattccttgtatctttctgtcgtcatttttgttgatcctttagcttttgaggtttggggctcaatctctttaactactccttttatcagtagacttccagcatcatctgaaataactttaacctcatcaacattttctattatcacatttgttccaatctcatcatctccattttctgagttaaccctagagtataacttcttagtggtactcgattgatcagccatatcagacaacttagaaccacgcttagatgaaggagtagacagttaagtgtttttatcatcagcacagttctcgttgctatcagttaacatcaattgaccctatacaataaaaattgagaaatataatttgttatatcagtacaaaacacttaataagcagtttgaattgtattaaggtgaatatgatcatacttgttcctcagacccaattgttgatgaatcatattgagtgtcttcaagcaaacctgattcttcttttgctatgtctgttccaaaatgtacttttgtaactttgtaaatatctttaccaccataaatattggctttctcaacactgaccagaaaatggaatgtctttccacacaaatttgtgatgacatcaggtatgatcgtaggatcctcaatctatacacatgtctcacgttagtactcttcattctaccatagacatatagctaatacttgaatgatagtatatatttaatacctcttcatattgtccatccactaacacttcagaagtttgcccaataagtttggttgcattattttcaaacaccatgagtttaatttcagctgtctggtccattacacgaacctcaagcttgtacctggaataaaatgtattgtacatatcaaattaatatacacttaaaaacctttaaattttctgtataccaatagaaacaatttttttttatcttgtacaagataaaagagtaatagaaaacattctgacattgcctccacatttgtgatgctctcttgacatttgtcacacaagaacttaggtttcataggtgtcttaaccatcttaccagtgctggtagattttttaacctgctcagtttttctgttatatttaggacatcaaaaatagaagcaacccaaatcggtatcaatggcaaaaatagaaccaagtattctccattgcccaacctgattccaaaaacaatcacaatattataggtacttcaactaaaagcagtaatttaggaattagtggaaatatacttacctctttcccagcaagtaaatcaacaatcattttggcaggataatcaaaaaaattatccgttttcaccttaattatgtcacggttccataattatcttgaatagtgagagcaagaccatcacttgggagtctgcaaatccacatttgtctgtttaaaatgtttgtgaatttaaacagaacaaagaaggtcataatatatttgcacttacgatttcacgaacaattcaacctcatgaatatgaactggattgattatgacattcgaaacatcaaaagcacttgtaatactaatctcacctttataacagaattagacaatatatgttaactaagacatgcacatatacatccaatattgactactttagacatagttaagggaagagtgaatacctttaaaattattgattttagcatagcatatcagaaccactgtcttctcgtcatgctttacactttttaaagcactaaatactttctcagcaaacacagcccacaaagtacaaaacaaaccctcattgctttaatacagtaacaaacgatttcaatattacttgtttgaaaacatagttattatgaatcaaaaattatatgaaaataatgttctacttgcctggcatctcttatttgaatctctagttttttgtttggtttgttttgagccataatatcatccacttttcccacactcaccacttgacctaatatgtctgccattgtaaagaatactctgttaatattaaaatccataacagacattttgtttgagttaaattaatgatatggaatttagaaaatatgtaccaattagaacattttcatcataactctcggtcttaaccccttcaaaatatgctagatccagaaaaacactatccgatacaggatcacatttaatcacatctgtgttgtggttaaagcccattcgatagctcaaactcgatatcttgtacttgccatacgaaggactcaaagtgaaggtatcaatgatcatccaatcaccaacctttagtgacatgtgaaacttgccaatataatgctttctaatggggatctgcatcttagatccctatatcaaaacaaaataaacaaaaacacataagaacatgttaaatgtttcaaagcgaaatatatatagattcatatatttaatcaatagcattctctcatacattttcatcacatataatgacatctaacgtcaatttgtttgcctccatagatgaaggatcttgacacggaaacgccaatttgttttgaaaggcttgacatcactaagatacgttaaacctaaaggtaaactcattgattatgtgtatagatgagaaagaaaagtgatgctttagaattgatgatattcttgaatatttatactgttaggacttgattctgaaaccctagagcaacaccggatatttttatatatgaaatcataactaaatatactatctcaaaagaatataggaatcatacataattggttgtgatttgtagaatatcttcaagaactaagaatatcttggaaatgaggcaaattattgagcaataaatgtttgctaagactggtgtttaacgcaaatgggctaactgctctctttgacgccaaatgagaaatagaagtgaggcccattgcacgagaaagaggatccgcgcgtcattgaaacgggtcggttacggtcgcggctcgggtcggctgcgaagagcacaaataatgacggttttacccttaatttgttttgtttgttttttcttgtaacgtgtttttgtaaaatggcttaaatggcttgaaaatttttgtcccccattctctcttaataatatatatatatatatatttaaaagacggagtaaagaaaagtttagcgtaaaatgattttagtttctcaaaatttgccattaacataattgtgctacatattgatttattgcctatattatcatattatcccatatattaaaaatcaaaacaattttgtttaattaaagaatatttctcaaaaaaactgatttgtaagtatatctttttaaagacctttttttaatatatacttagttacgtttatatatctaaatttttaaaaaaaatcttagcctataataaaaactaacacatttctaaaatatgatattaatggttattattttgttaaaaataatataatcaatactaaaataaaaataaatattattgttatagttttaaagtgtaagatatcgtggaacctcttttcacaaatagaatgcatattttaaagtaacacataaatagaacgaaacaaaactgatttatgcatggagtctagttctattttccaccacctccgagtagttttgaaattgaaaattttgtttttattttgcttttaactagaaaattttgttttaaactagtagctgaatcattgagaaaaaaatgttaaaatcctattgaggtgggttctctatcttctctctcttgaatttttcagagtgagaccgactaacttattgtcgtctgaattttatccgcttatcaaatcctgtttagtgggctcttttccaacatgcactagatcctttgtagtattttgttgacttttatgtgatatcgaattgactttcaaagtcacgatgactggcgtgaccatcggtaattcttgctgttttgctctcggttgttgatgactcaataaagtttatgtcattgatatgatcctggtgaggaatcaatcccaatttcggcacttggaagatctggagtggatattctcaaaatagagatgacacacgactcaaagacgagatgatggattgaatgactccacaaaaggatgcggaaaagccttttgataagtcgagaaagatctaaattcgacatacgaaaatggatcaatgatctatttttaagagagagtttttgataaaaagatatatgagttctcataagagattacaagaggtttataaagaagaaagaagtattggaacacactctcaagactaccatggaaaatgaaaagaaataaaaactagtttgaaagtttaaagataacccttccacttcttcgctccaaaatgactcttgaaatgctattttcgtcactcctcttgaccagcaaattacccacttggtttgggctcttcttgggcttgtgatggtcataaaattgactggacttcatatatattccattgggccaacttctaaatgttataccatggttcggttccatggacttcaaaatgctccttaggttcaagctgctcctctgcttcaagcttttcctcggctacaagctcttgatcaaattccaagtcctttgtgctttctatgattacatcatcctctcccacttgaaaaggatttgacctcaaatacaattcacctacaatgaaaagaaccaagtaagattcattgatattggaactcacattatacttaccttgcagctcaagttcataagcattgtcgctttttcttcttcttcggttgaatggacaatcgatctttggcatcaaaacaactccaattccagtcctcttaaagagattggacgagagaagatctaagtctggtggctcctcttttatacctgcaatgttgtcaaaccctttggcaaaaaacaagtgcgttatcgtagtcatgaaatcactataaacaagtaaacatggctcagctttaatcaatgcaccattcttgaaatgttcatgtttttcttttatcctaagacaagagtttgattccaaatattctttaattaaatctaactctttctcaatgtttcctaaatatgataaactcatagtaacaattattgaaacatgagaaacaaatcgagttaaagagttacttacctgagtaaggttcacagtgtgttcggtgcttggtatcatcatgactaatggaagtggcgttggatcggggggttcattttggatcaagacattgttggtgaccaactcattctccctaaaggtatctaaaaactctcctggccgccatagataagtatgaaatgaaccaagtgaagaaagatcaattttaggctcttcacgaaaaagtgaagtaaaatgaccaaaatctcatgtggtataagatttgaacgtcctagataatctcctggtctccaaatgttactttgagatacatcatgtatggatggtagtcctataggtttatccagtgagaacatgaccttataatcctgcaaaagagacatcatctcactcggcagcaccggtgcacagttagtcaagctcatgagagcttcttcatagttaagcaataaacatgggtgttttgataacaaataattttaaccttactagccctcacaaaaaaaattgattgcttgcctatacattttcccatgtgatttagccgaagttgattttgataatcttcacgaggatctcttgattgactcatatgatgagtgtttatctcccgatcattagtcttcttgattggcctccaaagtgtacaaccttcaccaaaagaaagcaaattagctttcattcgtttttgggagtttagataattacctcgagttctaaatggtggtgtagcatctggtggtttatccttgaaaaaaatattgcattcagctccaggtgattgtttgtgaacaatgacagcctcaacttgagtttatcctcctaattcacgtggttcttctttaggtaactctcggtttagaactggttgagatacatatggcggtcctttcttgttcaagatggtgatctttgaaacatagtcaactcgacaagcttgtgaagtggttgacaccaaatgatgattctcctcttttgtgcttcattcagttttgtcattctcatgctccatagtatgacctgaatcaacatcctttgacaagaacaagtgcatgacacaagaactagaattttctaaaccttgactaactacttcactacttgagttaggtgagatcagtttcgattctaatgaagtattagttagctcaagttttttagggcaagttgcaactaaatgtcctttcttacgacaattataacaagtgaatcccctggattttaaaagattacaagacttacagtgcattggctcaacgcttaattcaagtgatggttttaagctttgcttctgaactacaactttttcggtgaccatttttggttgagatgttgacttagctttcttgggtttgttgtaagcattgagaatcttcagaatttcatccttcaactgttgttccgctatggggctaagggttctttcttttcttgaactgctaacccttgggctgtgacactgacttttcgagagcgatttgatgcttgtagagcatatttattccttagaagttccttaagatctctccacaaagtgataggtggctccttataatataaacgatcatcaacttcttgcaaccaccatttgtaagcgtctcccgtgaggtggctaagtgcacaaacaaatctcatctcgctcaagaagtttttgtaggaaaaccactcgtccatgtttttctcccactctaggtaatcttcttttcctgaaaatttaaaaaatgcattagtcggtttataatcagaatgaaacacagatttggatttgggagtgtgagggattttctgtgggctgctctgtgttgatctcagtgagttgtctggtggcttagaattaagctcttgttccttcctttttcgtgctctgtgatgcccttgacgaatttgatctaagtggctgtcgaaaatttgttccatttcaatggtaagagcttcaattagacgattgttgcggttgtggcttgatctctcctcagttgttgacattgcgacctgagaaacaaagcaaaaatacaccagtaacaagtgctttttgtaatagaaaggattcaacacaagaaacacaaaatgacccttcaacttacacaaaactctcctacaaccctaatcacgactgttcgacttaatcggacgctaaaaattatcaaatagtttctaaaaattctaaaaacaaatttacaaaatactagactctttttcgaacccgtgacaagtgatttcgcaaattcatgacacaccaaataattatgaaaattaaaacaagatgacagacagaaaagactcaacctccaagtgttctctgataccacatgatatgatcttggtgaggaatcaatcccaatttcgacacttggaagatctggagtggatattctcgaaatagagacgacacacaactcaaagacgagatgatggattgaatgacgccacaaaaggatgcggaaaagcctttttataagtcgagaaagatcaaaatttcacatacgaaaatggatccatgatctatttttaagagagagtttttgatataaagatagatgagttctcataagagattacaagaggtttataaagaagaaggaagtcttggaacacactcacaagactaccttggaaaatgaatagaaataaaaactagtttgaaagtttaaagataacccttccacttattggctccaaaatgactcttgaaatgctattttcgtcactcctcttgaccagcaaattacccacttggtttgggctcttcttgggctggtcataaaattggctggacttcatatatattacattgggccaacttcagaatgaacaacagtaaacgaaatcaagaacagaaactaaatactgaatagataaagagaaatccatattacaaaaggtctagaacacaaggtctgcggaataaaactagataaaaacttgtctgcaaaaatgtgaagtacatgctacttatagccaaatattccgaaatcctaatacttaaaccgacgaagtattgggacggattaagaactgtacttgacccacgtggtcgagtgggaggtcgagtgaatagctggagtcttcttttcttccttgtgctcgagtgtctggttgagtgcgggatgacgaagactctgaagcttgccatcgagtatgtagtcgagtggtggtgatggagatactcgacttcaaggtagagtggcgagatcgagttgtggtctggcaatgaaggtgaagacactcgacctcggagtcgagtgatgtgatcgagtgatggtcaggtgatgggatgaagacactcgacctcggggtcgagtgatgtggtgaagtagtgatgtcctctactcgaccagggggtcgagtgatctgttctgatctagaagctcctactcgacctcggggtcgagtggtttgacatgatcaggtccgcttcttccagatagctcgtcaacagctccaaatcacctgaaatcaacgcaaatatgcaacatgcatgcaaatctatcctaaacatgtaaagtgatgaaaaatgatgagaaatggtataaaacagtgatgatatgatgctaaagtgatgacaaatggatgctcaaaacatgcaaaatacacacttatcaactccccaaacttagtctttgcttgccctcaaacaaataatcaagaacaaggtggaggtgaggtttgaaagcggggactcagagccaaagcaccagataaaccagatgaaatcaatgtccaagttgaaagttctaaggtgcaagatcgaattctacttaaaaacattagccatgcctcatcatcaatccgactcatatgctcgacctacacaagttttcaaatctaccaatccctttaacattcattagttctggaacgtgaatcaagcaatgcatcatcaatgaactcatttggctaaggtaaaaggtcaagagacaaagatggtcccttacagaataggcttcagtaacaggggatctctcaaaaaatgattaagctttagtagaatgctaaaggtaagtcccaagctatgcatacagagataagatcccatctacccagaatacatcaaataaagctctaatggtaatcccatctccaatcccaatataaaaacttaactctaccctttgcattcatgaatcttttaagccttttttctaatcattcttttcttttctcttaactctaggagaagctttctcaacactttgatacatctagcggatttggatttctttaacaactaaggttcctgtttttaaacattctaaaaccaagggcttttgcccatcttcaataactaacaagaactctttcttttctttacaaatcccaaaacctttactagattttttctgcttctttagcttacttcacctagagtcttttaccttttcttatcaatgaatcaagcccttttcttcttttaaacacatcccaacccaaagtataagcgcccacctagtcctatctagtccgaaaaatgcgaactagaactacatgagacactatctctgtcgttacgaacctaacactttctaccaagcttaatcggaataagacctcacaaacactcacaagtgatatagggcttgaaagaaagtctaggtttgggtttgggtttgggttaactgctctaataaggagagtcagctacttgaattaaaagagtgatcaaaatgaataagaaaatccaagtattttagggtatccatgagttcaaatttgatgcagacatgataattaaagatcagattcaggttcaaattgatagggaatggtatcagatcatgacagtgtggtcgagtagagcaatctaggcatggttcagttttatttcaaattcattgactacgcaacagacaactagcaacgagggcattgagtttatccggtgaaccaaaatgcttacaacgctatctcatcattatcccctatgcatatgcaacaatcctaaatgaaacactctagactcgatcctaaatgtaatgcaactacatgaacactcttttttttttgtgaaatcgttttctgaaatttttcaaatttttttttggtttttctatgccttagatgaatgcagactcaaaaatatacacaatgcaacacacacttcctgagccctcccccaaacttaaatcacacagtccactgtgcgcataaacttggaagagagtactcaggacaaatccaatcacagaaataaaatgaagaaacaaatcacaacagatggtataatacaatggtgaattgacgcgcttacctcagtcgaagaataaacgtagttgcttgtcaatggctgcctgtgattgctcccaggcaatagacgaaccaccttgttctgtatcagctccaacaggtgggtactcgacctcatcagctctgtggcggccagcaccgctctgtggatacttgacttctctccttatgctgcggccagcaccgcggtcgagtgaccttctcgagtgaatgaggcgtgatatgctgctagatcgagtgagtgtagccttccttcttctcttgtgctcccgggattcgaatgacgaatgcctagccgggacatgtgagactctctgctcgctaagctcaggcctgtgctcaggctcatcaaatctcctcgatggcatctccagaggaggttgtccctgtggaatagcagtggtggaggaggaacaactcagcttatctgtcagaagcttgatagtcttgaaacacttggcgagcagcttatcctgcttcttgcaccacttttgcagtttactgttgttcttatgagcttcagtcaagctcttgctctccctcgctggaggtacatgttcaccaaagtgatacatgctagtgtcgaactccactgctctgtcttcatccatcccatccgaagcagcttcttctagaagatcatcttcatccaatgacggagcgttcccatagtagaggcgtccaacctcaggccgaaaatcaatgttatctccctctattatccgtgtaacctcagggctggggagaaggatgctagctctcttgtctgtagaatgctcaaacctgaacctgtgcaagtcgtcaaccattgcaaactccaggaattcgcagtgacgtaggtgctcgatatccattgctcgcggctcgagtccatcagaagtgattgggactccacaagcgatcagaatcggtgtcacaacaccacctatgcacagagcgcctcgtgctctcttgtggttattgctgacagcccagctcttatatccacagtagatggatcagaagaagtatcgagagaggtgtgtcattgatttcaccttggagagacatgccattcttagtttggcgcagagttcccttgagagccattgcgatcatctccatatcagagttagtaaccgtccctgtgatctcttgggagtagagtacattggctatagaacgtaggaagtacttgatgacagcgctgcgtatctgattgctctttgacctggaagaattcagcggtacagagctgccaatggtgatccacaagtctttcaactcttctctgtcatacttgggccttagatcccgttccactggggaaaccaaacaattcttccaatcgcttgattgataacctatactcacgaccatacacagagaatctcaagaatcccaatccttcacaatccaactcatcagaggtcataccttggtaaagctccacttgcagcgtggagaggaactgaattgtctcatcttcatatgctacatacggataagccatcagagtgtccatatgacaactctggtacaggtgctgaacatcctccaacaatccgagttgtgcaagtgtggtcaggcaaggatacctcatgctacagaactcattcagcttgaagagcctaatatattcctcagcaggcaatacgtcgggcttgtgcagaagtttggtagctctgcgagtatgctcaggcatgtactcatcttccagatattcgtctataagctcatacctctctgtcatcgctctcttccctcgggctatctcagcttttcttctaaagctttcatattctctttgttctctctcaggccttgaagaagacgactctgtgtcatccatgttgtagtcaggatcaacagaagaactgccactgtaattgctcatgattcccctgtagaaatttagaactcaaagctcaaatgtcaataggttagtctcaaagatagcaatgaagccaaaattgttatcaatatgcaatgaaatagaccctattgatcgagtacaattctgtactcgagtagactgagctgttcctgagttccccttagacgaattggatcgagtatcttctccgaatttgagttggaatgcttcagtaggtcgagtgagtcgtgaagcctagaggtcgagtaacttctctgaagttgaaaggctctgttgaattcaagaacaagaaaccgagttgcttttgtaggggtcgagtgctttatggtcgtcgagtgaattgttgaaatcggttgaggcggcgtcggtcgagtgcggctacgagactgggaaacaaggtcgagtagcttcttttgaaagagacggcggttgatgtggatgaatttgtcgagtatataaaaggaatcgagtgaagtggtctggtcgggtgacggagggaatgaactggtaacggcggcgcggaggtcgagtggctctaggaggtcgagtgaagttatctggatcgagtggctctttgaacggcgattcgtggtgtagagagattggagtgtcggtggtgagatgaaaagaggtaggtcgagtggatttgttgaagtcgagtgaagcttcaaaaagagtggttgaggttgagttttagattctctctccagtttatcctaagcgcgtggcccacactctgttgactgagaaaatttgcagaaaacctactgtaaactgcaggaaatccctgcaagtctctgtagcttctccctgcaagtctctgtagcttctgttggtcgggtaaaataatgatttaaatttttttgggttttaaatatcactcacactcgaccaatgtactcgatctctaggctctctgtagagtaaaagttttgaatttttactctagcctcacgttattcctctaatcctgagaaccacaaacacaacaaaaacaaatcaaaaataacaagaaagtaaaaattattcacaaggataatcatgggacttcctcccaagtgagcttgtttaaagtctctagcttgacacctcacacttatcaagaggaaaatgaactatagagagggtctgcataatcctctctgataccatcatcatactcagcgtcctccctggagaattgtgcagcagaatactcaattcccctctcttcaaaatatgcttttttctcctctggagggtaatctgtctcttcagaccatcttgaagtgaacttctttctcgggatagtgtcaatcccgcctttaggttgagcttctttctgcaactgattcagcttacttctaagttcctcaacagtgtgggctagcttctctatagtttcatcttgcttatcagacctctttttaaattctttcactctttcagtctcatattcttctcttgagatcactctatcatttccagaggttcttccatcttctgttaacccttgtggagttttgttgatgccaaactgcaacttgatatgctttccaaggttgagacttattttcccttccctgacatctatcactgctcccactgaagctaagaagggtcttcccagtattaaggaatccttatgctctacttccatatccagcaccacgaagtctgtaggcacttctactccattaatcatgactggtacatctttaagcatgctgaagggtcttctggaagacctatccgcaaggatcaaagtcaggtcacaaggtttataccgaataaactctaaccttcttgccacagagagtggcattaagctgacagaggctccgagatcgcacaggcaatcgctaaaagctaattccccaatggaacatggtagagtgaaagatccaggatcttctaacttctcttgaacaatcctcttatcagcagctcgagatggagtgcatcactttcatcatctgaatcatgatacatcttgatcctttccagtatcaaatttctcacatctttgtgaggatcaggaatcaggttgagaacttccatcagtggcatcactacttcaatctcgtccagctgcttcgctgcaacagacttgtatttctccatccacgctttcctgaatgtccacggaagagcacgtgagggtagtggagtaggtttgaatcgttttaccattctctcgattatggcggccttctcttccgaggtggattgagtgagatggcgagaaccagcagaatggttgaatttaacaatagagacttcaacttgggtagaagcctccccttcttgaacatcactgtccccaatgatgaaatcagggacaggtcgagttggcagctctcgatcatggcatatggtgatggcgttagcagctgcatactcctttggattctgtattgacttcccaggaagtcctgtaacttttggtgtagaggtagatgatgattgtccttccaaatatctgactttggtattcaatgcctccactttggtagctgcaatccagcttatggtgcaattcagataatttcttagcaatttccattgagctagatgattgtccctgtagcagctgttgtaccatctgtttcatttcagcatcaggagcagcaggaccttggttttgctgaggtgcaaacccaggtggtggttgttgttggtagttcccctgaaattgctgtttgggaacgaaaccttggttgtatggaacaaaaggtttgttctgcccttgttgttgctgtggaggatacacctgatcctgagattagcaacgttggtgctgcggtaggagaggttggggttgttggttttgaagttgttataccctttgtagccaccttggttgttgttgatgtagctgacttcttccaacaggttaccctccccatcttggacttgaaactgctcgtcatcaacaaggaagtgcacatgcttctgctggctaagaagaatcctgtccagcttgtcattcagcgttttgatctccttcctgtgtttgtcatcagagtcagctgtgcctttgacggtcctatcgcagtcctcgttgtaattaccatctgattgagcaaggttctcaaccaattctcagccttcttcaacatctttgttctggaaatttccattgctggcggtatccagaagcattctgatgcgtggtaggactcctctgtaaagagtgctgagcagagaggctttagtaaagccatgatgagggcattggttggtgtaacccttgaaacgctcccatgcttcacataagctttcaccagtcttctgtgagaaaccagaaatctcatttctgagtcttgcagttctggcattggagaagaactttgatagaaaagccttcttacaatcatcccaagtggtgattgagtcatggagcaaattcttctcccagatgtgtgctttgtcgcccaaggagaatggaaacaaacggagcttgaatccgtcttcactaacaccattgatctttgttaggttgcagagcctatcgaattcatcaaggtggtcgagtggatcctccattggcagaccatggaatttgttcccctgaatcatcgagatgagaccactcttaatctcgaagttgttgttctggatagcaggaggtgcaattcctttcctctgacggtgatcacgtggtgcatctccagcaccaatgttggcagggccattttgttgattctattcttcagccatttcgactggttgctgaggtacaaggttgactgtgtttctcctttctctgagttcgcgagctatgtggtcgatgttgtcgttgaaaaggaggttctgattgcctgttgatcgagttcgcatacaacagaggtgtacctggatcaagaagacaacaaggaaaacacacagttagcaaccgatttgaaaattgaaaaagaacttgatctaagcaagtctgaaatctcaaatgtaacaaacaaacacccaatcggcaatggcgccaaattgataataggtttttaatcaattaaacctaaaacactatcatgtcgttgtagtactgaaggttgtcaatccaaatgggtgtgatgctaacaatcaagatgtgatcagaagtcactaagtcaagccaagcaataacaggttttggtgtgttctagcagtcctaagtgaacctgcagaaaacagaaaatcaagcagaaacaaataaacactcgaccaacacagctcgttacagagcactgggtgtggtcgagtgacaggtcgagtaacagacagaaaatgtaacagggatactcgactgcacagtctgttgccagacaactgggtggtcgagtaccaggtcgagtaacagtaaagaattgcagaaactaagcaacagatgacaggatgcagtaaacagcagtagagtaaacaataaaatcaatcaaataaagaattcccgagaatggggtaatcgagtagtttcgtttcctcagtttacaagtgattgacatgctcaataaattaccctacacaacaagttcattaaccaaatctaagtgccaccgcaacagagaccctcaagttaacctagtcccagactcaatcaccattgacgagagctaacctaacaagcattacgaatgaacaagttaaagccaaaacgctccctgcaaccaataccttggtacagggccacgaatctctgaaattagtggttcagacatttcatcgaacacctattgggcgcggaaatgtctgggctcaaattccagttgatcagaaagcaataggcattaagaacaactaatccagaagggatctatcaatcaatactcaaccacctagcatactgagaattctacactactctaacccatcctcagaaacctattcactactcagacatcataacagaaagcataaacgttgaacaacttgaaaacatgataacaactgtgtaacagcaggatgataacagaatgaacaacagtaaacgaaatcaagaacagaaactaaatactgaatactgaatagataaagaaaaatccggattacaaaaggtctagaacacaaggtctgcggaataaaactagataaaaacttgtctgcgaaaatgtgaagtacatgctacttatagccaaatattccgaaaccctaatacttaaaacgacgaagtattgggacggattaagaactgtactcaacccacgtagtcgagtgggaggtcgagtgaatagcttcttttcttccttgtgctcgagtgtctggttgagtgcgggatgaagaaaactctgaagcttgccatcgagtatgtagtcgagtggtggtgatggagatactcgacttcaaggtagagtggcgagatcgagtagtggtctggcaatgaaggtgaagacactcgacctcggggtcgagtgatggtcaggtgatgggatgaagacactcgacctcggggtcgagtgatgtggtgaagtagtgatgtcctctactcgaccagggggtcgagtgatctgttgagatcttgaagctcctactcgacctcggggtcgagtggtttgacatgatcaggtccgcttcttccagatagctcgtcaacagctccaaatcacatgaaatcaacgcaaatatgcaatatgcatgcaaatctatcctaaacatgtaattaaagtgatgacaaatgatgagaaatggtataaaacagtgatgatatgatgctaaagtgatgacaaatggatgctcaaaacttgcaaaatacacacttatcagggacaagtatctagctccattgagattgctaaaaagatatctgaattgcaccaaaagctagactgcagctacaatgacctgaatgcaaaagttgaggcgttgaattctaaagtcagatacttggaaggagaatccgcatctacctcttctcccaaagttacgggacttccagggaagtcaattcagaatcccaaggagtatgttaatgttcatgctatcaccataaggagttatccactagagagagacccaagtcagtcactgaggatagtgcatatcaagatggggaggattttagtctcaatgaagatcaagttgacaaaccaactgaagtactcgagcccatactcgaccgtgatactcgaccaaccaatccattaacatcatccgctgctctaaaactagttgctgctaaaaacaatgagatagcattcattcctcctccttacaagcctccacttccatttcctggtcgacacaagaaagaggtagaagataagtatagagctatgtttgccaagaatatcaagaaagtcgaattaaggatacctcttgctgatgctctcacgcatatcccggattcccaaaagttcctcaaagacttgatcatggagagaattcaagaggttcagaaaacaacagttttgagccatgagtgcagtgccatcatacaggagaacgatgtctcagaaaagctaggagaccctggttcattcactctaccatgctccctaggttcattgactttcaataaatgcctttgtgacctaggaccatcagtaaatctcatgccactctcagtagctaagaggttggtttcaacaagtataaaaactgcaatatctccttgatcttggctgataggtctgttagactacctcatgggttattagaagatttgcctatcaagattagaaatgtggaggtgcctacagactttgtagtgctaaacatggatgaagaaccaaaagatcccttgatattaggaaggccgtttttagctacagttggagtaatcatagatgttaagcaaggaaagattgatcttaatctggggaagaattttgaaatgaagtttgatatcaatgatgctatgaagaagccgacaatagaagaacagaccttcttagttaaggaagtggatcggctagctggtgaactgcaagtggaacttaaagaagcaaataattaaaaaactgttttgactaagagtggtaaacctgggtatctccctagtgaaactttgagttctgagaagtcattagagtcacacaaggcagcagttggctcacaggtttacaagggcttgatggagtctgacacgaagattataaaagctaatgaagtaagttcaacacatgctcgaccaaatgattccaccaacaactcaaagaagcctccaacttgtcctgaaagctcatgctcgaccaaacaactcaaggcaagcattcagacgtcagatgattggttagaactcaaggggagatctaaatggtaggacaaagccatacaaaggccaacacatattgtgaaagagctgaaggatcaaatcaaggagctcaatagaaaactcaaccaagtaccactcaacatcaaggacgcccctgacaatggagccactattctggtcagcaaagaaggatgtgaattcacatcggaatggtatagaggagaagactatcttaataaaaaaagaagcttactatgaggacatggccactgagtacccaattgcagacttgtcaagaaatcctaatgagtatgatgatcactctactcaagaaggagaggagacctcatttcctctctccaatccaccttgagcctaatgagtatgagaagtcaagcttagagacataaaagaggctcacttgggagggaatcccatgtctatctttgtacatatctttatttttccttattgtttttgatgcatttggttagtgtcttcaggagaaaagtataaagagctgagtgaagtggattctggctctgagagtacagaagtatactcgaccacagagcaatgaaaaatactcgaccatgttttagcttatccacgctaggagatcactcgatcacggtgttggccgcaacagaagaagggagatcgagtatactcatggcggtactggccgccatagaggcaatgaggtcgagtaccgacatgctagagctgagacagaactgggcgactcttcactagcctgggagcaatcacatgtagccattgatgaccaactccgttcattcttcgactgaggtaagcgcctcacttcaacattgtactatatcatctcttgcttatattttgtttctgttatgtgttttgtcctaagtactctcttccaaattttgccacacagaggactatgtgatttaagtttgggggaggtctcaggaagtgtgtgttgcattgtatatactcttgagttgagtctgcattcatctataaaaaaacaaaaattgaaaaatttcagaaaatgatttcacaaaaacagagtgttcatgtagttgcattacatttaggatcgagtctatagtgtttcatttaggattgttgcatatgcataggggacaatgaggagataaccttgtaagcatgatgattcactaaatgtgttattagttctttgatgcatttgaatgactttgaagtaaaaccgcaccattttctatagaaaccacttgttgcatatcatgacatatttccctgtcaatttgaacttgaatctgacttataattatcatttttgtatcggttttgaactcatggatagaataatatttggattttctttcatttatttaccactcttgcttatccaagtagctgcttctattattggagtagttcccccacccttaaccaacccttctttcaagccatgttatttgtgagagcatgtgaggtctattttcatgattgagcttggtagaacgtgttaggtttgagccgacaagagtagtatcccatgtagttccaatccgcgtttttggacctggtaggactaggtgggaacttatttggggattgagattgagtgtgaaaagaaaagaaagaaaacgagttagaatctttaggagaaggaagctgaaaatcatattgataagatatactctagtaaaaaactggcaacaacaaccgaaaaaaaaaagaaaaaagaatcataagagccattagagtttaagaaaaacccaattcactagactagactcatagagtttaagaaaagcttctacttaagagcaagagccaaagaaatgaaaggaaatgacttgatccaagaaaaaaatcgaaatatgcctttagtgcaaaatggtagacttaggatcatcattgggtttagagataggaccatctacttgttattcacggtttatgtcattgggtagatgaggtgctattcttgtatgcataggttggcacttacctttagcattcttctaaagctcagtcctttttcattgagagtcccctgttattaaagtctgaaccaccttaaagggaccatctttgtcacataacccgtcctttgccaaatgagttcactagcgatgcatatcttgattcatgttcctgagcttaatgaatgttaaagggattggttgatcttgacgtattgtgcaactgagtgtgaattgggatcataacagagcatgctaaagtttttaagtagaagtcgatcacctcgcattttagaactgttagcatatacattgatcttaattgtcatatctcatgctttggttctgagtcccggctttcaaacctcacctccaggttgttcttaattgtttgcttgaaggcaagcaaagactaagtttgggggagttgataagtgtgcattttacacattttgagcatccatttgtcatcactttagcatcatatcaccactgttttataccatttctcatcatttatcatcactttgcatgtctaggatagttttacatgcatattgcatatttgtgttgttttcaggtgatttggagctgctggtgagctaattggaagaagtggaccagatcaaatcaacatactcgaccacgagctcgagtacagtcatcctggagttcctaaagtactcggccacaacctctacagcaaatcactcaaccgcgaaactctatccaccactcgaccacgaggtcgagtagatgacttccccacttcacaacaccactcgaccccctggtcgattagctgcctgcaccacttcgattcaccactcgactactaggcaacatggccgagtatcaccatcatcattcactcgaccaatcactctaccaccaagtcgagttccaccatcatccaccactcgacataatactcgactgccagcttcagagtcttctcgattccgcactcaactagacactccaccataaggaagagcagaagactccagctgatcactcgaccagtcactcgaccacctgggtcgagtaccgttcttaattcgtcccaatactgtgtcgtttttagtattagggtttcagaacattttgctataagtagcttgtactttatattttcgaaaacaagtttttttccgtagacactgtgtgttcttgacattttgtaatctggatttctcttaatctattcagtatttgcttttcattttgtttactaagttgttcatcctgttatcatcttgctattactctgttgctatcatgttttcaatcttatcatcgtttatgctttctgcaatgatgtctgagtagtgactaggtttctgaggatgggttagagtagtttagaattctcaatatgctaggtggttgagtttgatttatagatcccttctatattagttgttctgaatgtctattgctttctaatcaactggaatttgagcccagacatttccgcacccaaaaggtgttcgattaaatgtctgaactactaattccagagattcgttgcactgtaccaaggtattggttacagggattgttttggctttaacttgttgattcgtaatgcatgttaggttagctctcgtcaatggtgattgagtctgggacttgtttatcttgagggtctctgttgcggtggcacttagatttggttatcgaacttgttgtctagggataatttattaagcatgtcactcacctgtaaattgaggaaatgaaactactcaattaccccatcctcggaaatttctcatctaattgatttcttgtttactatgctattgtttactgcatcttgtaacttgttgcttagtttttgcaatttttgcctgttactcgacctgatactcgaccacccagttgtctggtaacagactgtgcagtcgagtatctctgctagcatttttgcctgttactcgacttgtcactcgaccacatccagcgcttggcaacaagctgtgttggtcgagtgattttactgttctgcttgaatttctgtttcctgcatgttcacttaggactgctagaaaccccaaaacctgttattgtttggcttgactctgtgaactctgattgcatcttaattgctagcatcacacccatttggattgacaacctaaaatactacaacgacatgattggtgttttaggataattgactaaaaagtaaaaacctattatctaatatcaccgtgttaaccgttcccagatttgatctctatttttcggtaatggatctccatatacaaaggtaagattaatagttttacctttataaatggcttcaatatcgattaaccggttactttgatagatgattgaaacattaaaatcattgttataaaacagagctaacctgccactataaccaataaggtcaaccttttttaagtttttatagccaaaatgaccaacaaatgtttccatatatcctatagattgttttttttctgagagaaataataaatctagtcgatgttttttctataaatcccttaaataaccaatggttgcctaagctgaattcttagattataaccgataatataatcataaatggatacttgtaaaattaaccataagaagactcgatagtccgccttaaccgaagcaaaacacataaaaaaggaaaagactagtttttttttattacaacaacctcacaaacaccaatgatctccaagtgagaaccaaccccacaagaaaaaattgaaaccttacaatagatcttcggttctaccgaatacaaagttttaaaaataataaaaaattgcaaaccatgttcatagaacgaacttatttgactcacactttccctcctccactccaaccaaagtagcttacaacacatatttattagtcttttggaggatctcgctctccataaagagagcttgtgcccaccgtagggccaccaggcttagatacagtccgcttccaaggagaagtcagggttccttttccttgagttaacccccggaagaccagccttatttttaaccactctcttctttgcaggcagctcaacatccgcaatctctggatttatcacttcagtaccattgtcttctccattagtttgtgtttcttcctccattttatcaacctccttagtttcctcattaaccattacctcctcctgtgacacttcctcattagactgctgagaaggatctgttatctgaaatgtatcctctttgttttccataatagtatccaagaaacttaaagagttttcctcagcaagtgtgtaatcttgaaccatgagctgattcaaataatccgagaaaagatcacgctgctacaataaatccgtagtagctttctcactctccttaccaacagtttcctcatcaccatgaaacagatttttacgcaccgtctttactgcgaccgcttccagccccaaggtggaggaattgttcgcagcaatttctgaaacatcaacccccaaatcaccagaaactgcttcaagcttacctgaatatgatcctaggaaagcatccatcatctgttgatgatctgagaggctatgactcgtctcaccaaaatcacagtaccaacccgtccagtgggacccagtcggtgctgcagcgcatcaaccctaacctctctcatgtgggcccttctagcccaccatgtaaattattgttgcgcttgacgtttctcaaacccaagacctcaccctttaacaatcttcccataggacaagttgttaccaattaacccacatgagagagattagggttgatgcgctgcagcgccaaccgaatcccatagagtgggttgttacaatcaccatcttacattttatatttttttaattagaaaattttcaaataaaacaatttgctgcaggatttaaattttataaccatcataattatctttttaaattttacatttttaatttaaatttccacataaaaatatttgcagcataatttaaatttagttgcaagtttaataaatatacaaaaatgaatattgtcaaataaatatttttgctacataatttagatttatctacaagttttataaatgtagagaataaaacattataacttcaaaagtattaaccgatgaagtggctaaccgcgattggtcgtttaaaagcttagttggacagcctgagaagcttatagcttctacttttctattttttaaatagtaagatgattaaaatattaattagtgagatgggtaatcgtgattgatcattttttgtagaaaaataagaaaaataacaaaataagaataaaaatagaaatttctaattaaaaaataaataaaaattgacatatttgccatctttgtataaaaaatattaaaatttaaaaatattagtcagtgagatgactaaaaatattaattagtggaatgactaatattacatagattccatatatttttctaagtttacataattactatattttaatataaaaagtaattataattgtaaaaatgttaatttgcaagtttctccatcacatgatgcgttaaaacttttaaaataaaacataagtatttataacattattattataacctcattaagtttttaattttgtttttatggttggttttaaagaatgaaaacactatattacaaagataaatagagttttatccaattaaattaatgttaaataagttatatagttattttaaacttcaatgggctttttaattattattattatctacactaaataatttttttttttaattacatgctaatttaattgaccaataacaaatattaaaagaaatttgttaattttccttattgttaataattttttccctcttttatatatagacatataaattagtatatttagacttattacgcttttttagttttttatacggtgattttgaaaattaccctatttttaagtttttatttgaaaaatacacttttccatatttttaattaaaaatacaattttaaatatgtgaaatgacaattatgtccagatttaaaacaaaagaattattttaaattaattaaaattaaatacgaatttttgaaaaagaaaagaaaaaacttaatttaaatcttaattattatttttaactattttttatatatcttaaatattaaattctaacatattttatcaaaaaatattttaaagtttatcacttcatatttatcacattatataaagaaattaatctaactccaaacacataattctttatttcttttgcttcttctttttcttgtaacaatattttcctttaaaaatttattcaagataaaattatatggaaaattgttagttagttattagcaaatatttttaaattaattttttttttgtgtcgacaaataaacaaaactgattttattttaaatataaatgttttcaaattattagtaaattttagtaaggatatttttgtaattttatattccatttatctcttagaaattatattttaaaagagaaaatatggataggttatttttcaaacaaaaacttagaaaagatcaggcattattccaaattttctctttttatatccaattaaattaatgttaaataaattatattgttcttttaaatttcaagggcattttttaattattattattatccatagtaaatgattttctttttaaaattacatgctaaattgaaatgaccaataacacatttagatctaaatttcttaatttttcttttttgtttagaaaaacaatttttattttattttatatatagatatataaattagtatattagatattttttttttttactttttgtatttttttccaaaaaacaaaacttaaatctcttctgacacatgtcaacatctgatcgatttatttgacatgtggtgcaatcttatgattgttttgttaacggaaatttaacggcatgtcttaaacggcccaatcaacgaaacttagctattttattgagaagtcaacaaaaacttcatgattattctaaatttaaaagttgaggctttttttttatattttttcctctatataagaaagaaaattattgagtctattgaaaattgaagcaaaaaaatggaaaaccgagaacgacgtaattgggctgagtaagaggccacgtattaaagcccagattgttatggtcggaaagtttaagattagagaccacttcacgcgacttaaacaacgaaccaaacctctctctgctcagcttttccgaccaaaagatccaagcgcaagatcaactcaaaatcaatggattatctcggaatcgacatgagctgcgcgatcggatctctccggaacggtgacttcccggagaaagattgtcttcttcctctaatttcaaagcttctcggttattgcctcgttgctgcttcaatcaccgtcaagctccctcaggtattacaatcaaacttcgtctataaactcttaccctaatctcaaaattgtaaattttattggtttttattgtagataatgaaaatcgttcaacataagagtgtacgaggcttaagtgttgtggcatttgagcttgaagttgttggttacacaatttcacttgcttattgtttgcataaaggtcttcccttttcggctttcggcgaaatggcttttcttttgatccaaggtatacgaattacaatcaagaaccctaatcttgaaccctaataattgacactaatatgatttctcttattacctttgcagctttaatcttggtggcttgtatctattattattcacaaccagtacctgtcacaacttggattagaccacttctgtatcctttttggttataggaatttctcaactttgatttgagactctctgttttagttttttcttaatgttacgccgatatagatattgcgctgtggcgccaactgtgcttgctggacagattaatccgacgcttttcgaagctctttatgtgaggaagaagttcttgttttatttactttaggctctgtgtgtgtgtgtgtgtgtgtgtgtggatagattgtgatagtgtatatttgtgttgtaggcttcacaacatgcgatatttctctttgcaagactccctcagatatggaagaactttaaagtgagtctatactacaatactcattttcactatttttgtgattgatgtctcttcttgttgaacttggtgttttgagcttaagtcacgtgttaatgttcagtcatgcctttatgttcctgtgatcaatctatagttaaacttttatagtatagtttaccttacaatcttttgctggatacaaacactgttattattgttcatgattcatagatactcgttttagccatatatatatttctatagattctgcagaagtatactttcagaagtatatatgtatgaagtccaccgggcactgcttatgattaacattactttatctctatctacagaacaaaagcactggagaacttagtttcttaactttcttcatgaactttgccgggtcaataggtacgaaggctccttcgtcggatgtctcttctagtttccagtggatatgtaataatctgtaatctcataatactttttctgtttccctcgcagtgagagttttcaccagcttacaggaaaaagctccaattagcagtatccttctcagataatatttgcttcctattatgaatgctgagcatatatggttttgtaggctttatagaaagctgttgttttcctcaacctttttgtagttcttacgggtttcgctcttggagtcgtcaccaacggaagcatcctgacgcagattctcttgtactcgaagcctgctgctgcaaaggagaagaaagccaattgataggtagaaagatatcctaaatcaaatactggtgttgaggctccaaaaagagattagtcaatgttgcattcacgcctttttctcttttaatatgttcaaggatgttcagactttagccggctactggcttcgacttgattctgatagtgaagtggctgttttaagtctgattgattatttattttgtgttgtgatcatagctaaaatctgaaactacacgaagttgcattgatgtcattggtctgattaccaagatccaaatctgatggaactttgggtttggtctaaggtcagactatatgtttacgtttcatttagatatgcatcagatcaactctggcgacaagttgtgaagacacactctttgacaaaagaacaatttctgaatcaatcaatatgacaacaaacaaacaactgctacacaatacgaagcacactatcaaacagactaaacaagaaaggtaaaactcggttaaataccgtctccaacgtgttaaggattgactggtttccacaccctttgcatagtctattcattccgggacctgcttcgacttcccaaccttctcagtgcacaagaaacaaagttcctctggctcaaaaaccccaatcgtaacttaaacgaggatgaccggctggtgctaccagatgcaaggcctatggttggaatttggagtctggaaggagggaactcaactgcattctcctgtgctccaccttcaccgacactaccctcaacaattggtgtctcgggcgcatctaaattgacaacaagcaacgcccttcttttccttaacaaatcagctccttgagtagtcactcctctacacttcttaaccttcacttttagcagattcggacatccgttcccaagagctttgatgccatcatcagtaataggacagttcttaatacaaagcttcctcaacgccaaacatttctcagcaatacaacataactcagtgtcacctaccgtatcacttccacacaatgccaatctctccaagttaagacaattcgaaacaatcgcttccaaacttaacttagtaggattcacaccaatcaaaaccaactcctgcaaattccaacagtacttagcaacaactataagcccctcatcgcctattcgattcgtcttccatccatcaatatgaagcttccttagcaatttacaacgctcagccaccaaagctaaaccaacattcgtacaatcaggagttttcacaagatgcagaacctcaacacccgaacatttcgataacgcggttaaacccaaatcactcatctgaatcctctctaaatgtatctcaacaatagcgttaaccttatcacgaaccgcctcaaaaacccgatcccaatcccctgaacacctgaaaatcttcaaaatcctaagtcctttagctccacttaacaatggagcaaaacactgaccattatgcagctcctttaagcaaataaccttcaacgaacccgcagctcccccaggtcctataagctcagcaccagcaccgattccgcgtaaccgtttaaccgacaattcctctagacctaaacaagtattcaacaaagcattcattcctttaacaccaaacccacaagatccaaatgaaaccttcttcaaactcctacaattctcagtgaaacctataatccctaaatccgaaatctccggacaaccgcgtaacttcaaccgcgttaaattccgacatctaacagaaatcataacgaatgcgttgtcacatataccaagtgatctacggtcacttctaagaacaagtttagtaacagaatcaaaccgagtaaatagagatggtatcactgaaataagatctgattgtgctttgagagagagacgatgacgacactgtccttcaattgttaaccaccgacgacacaccagtgagcaacgttttaggtcggcgcaagttagcgattggaaaattaaagataagcattcgtctggtaagttagaaatgtaatcgtacggctcatcggcaccagagttttgttcccgtaaattaggtagtaccggagaagtgaaggtagttttagatcgccggaatttggaagtggattggcccattcgacggcgatgcggttcacaatgttcccgcctactccctctggttttggataaattgtcgcaaacaactttttttctttttttttctttgctaaaaatgtaaatattcatttttttctttacaagttttaatatacttcctactaaatatttataatttaaggtttttgcacataaattaaaaaaatatataaatttcatttaatttatctcttttctataaaaacatcattaattataaccaatccaaccaataaacaaatatgatgtaaaatataattggttaaaaactattaaatacatttaatatttacatagaaaagtgaaaacaacacttatattgaaaaaaataaaaaacctttaaactacatttaattaaaaacagagagagtatatatattttttgggatgtggagaaataggcaagaatgccaccctcgaaccgtagcaaacaaagattttatggaggctgaggattaaaagccgaatggataatgtccaaaaccaaataagaccacaatgatgtaaaggccaaataagaccgcgtcaaaataagaccaaacccaaatagattatatttaattggatagtcatagaatctaaataatatatttttttatttttttgttaaaatcacagaatttattttctaacaaaattaaagaattatattttctgcatatcagaaaattttatttttcccgcaaaaagtgtagaattaatttttgtagtaaaaatgtcaatgtaaaccctaatttttaaaaaaataaagaaaaacaagtatctaatatttttttttaaatgaccactttgaatttagacatgactagacccggaccattttaatttgaactgatttaacccatgattttggataaattgtcgccaactttttttttttacaagtttcaagatttttctattgggatttggggatatatgagcaggctgaggattaaaaaccaaatcaaactgtaccaaaaaccaagattttatggttttggttctaattcggttaatagatttaaccaatcaataatttcagaaccaacgagtctcaaaaacaagaaactagttagtatttgaatttttagtttagatatttcctcaggaaaaactctctctcttctctctcaaaaactttagagagagagagtttgattttcggcaaagtccgatcatgatctcatatggccgttctaacctcgccgtccggtttatccggctcctgtacagcatcgactagcttctaaagtagtgttggctggcttttgtccggcaattttgccgtcctgtttacgatgtcttcggctggctttattatctgagttggtgatgctgttttaggtgttgtgtcacttaaaagatggatttctccggcttgtttcttttgagttctcggtttgtagaagtctttacagagataatgtcttagtttgaaggaaagaagaatctttcaaagcatattatgattgtcttaaagctattagtttctttttagagtttcgattaacttagcaacggtgacaaacaaaggattcaacgaccgattgtatttcggcgatgatattctcaccggaatcgatgctcaacggcgaaggttgatgtcggaattcttacgattactcatccagcagcatgtgtcgcgtttgtatccagttgctgacacgtgggcttgggtggagtacaaacgaattttcttatgcagaaggcagttatcggataggctcttgttgggtctcaaatatttctgtaaacttttttgtgggacttttagtatagcccatgtatgatccagttatgtttaatacgatactacacttgcgaaaaaaaaaaaacaataaacttaaaatgaaacaaaattcattttcttaggcggcgacattacacaacatatggattcatcaaagagttaaaaagaccaaaagaaaaaaaggactaaaaacagtttgcttcattcactctcaacatctctatcagtctttctacctagtgtaccatttcaccagacaaacaaaaaattgggcattgatcatcttcttcagacaaacaactccattgtcttcaagttccaaaaatatgtctgtctactggttgattatccaaactcttgacaacatccatccatggtttctctatcaccaggattgagtttttagaaaggtgacccacgaataaaacagggtggtttgaaggtaagatttcgaagttctttcgttcattactcttaccctctaactgatactcatctaaccgacgttttcggtttgtaccctttccctttttcaagcccaagttgacaagtttaccttctagcgttttagacaaattgccgtttggtaaatcatactcttcatcttcttccacaggcttcccgaagtcgatcaaacatttcgctctgatatgtaaacagtatttgaattataaagggttctatgtataaaaggcagttgtggactgactagggtaagtagtgtaaccagtacctggaactgtaaactatcacagatgatgaatttggtgacggggagaatgagagtccaaggacctccccaggaaactcttgatacctctttggcagaacataagtgtttagcaacgaccacttgcctaactgtctagcttctacatcaaaagcaaagacctgattcgaggaggttgagatcacaagtgcattgttattccagggatgaaatccagcagcggtaacagatgcaccatcgagtcttgaaatgaaccagtgctgcctgtgatttaaaaccaacatcagaatacaaatgataaatattaagcaagcaaagcttcacaaagttctcacctttgtgtttcgaggttgaatacatagatgtccccaaagcaattgatagcagctagccactgaccatctgagctagtaaacaattttgttattggaggctccttaggtgttggagcttcaccttcatgctcctccctagatggtgtaaatgcatatactagttccaaactacttatgtcaatagtctgcaaagaaaatatgatacagaagttagggtaacttcagaacaatacacataatttgaacataagaattagattactagcaaagcacgtacatatatccttctatcatgccctgctattattagacgagagcagtccgaactgaaaatcatggaatgtgcaaatggaagttcaggaagtcgccttctactaacactccatggacactttgtaaattcatttttcttcaactcgaacagactggggccaatttggtcagagtaagcaaaatgtgatccggtgttagaaattgcactgcatatgatctttcgggcatctctacttttaacacgaaccaatgactttgttgaggcacgaccactagaatcactgcttatattaagtcgaagaatatctaaagtactaataccctgaaccagtagaagagaagtcttattgaacatcgaattatgtaccatttgcatgggtattctctgaggcgcaggacatatatcatgtggggagaacttagtaaattcctgaattgaatatgcaaaaagctttgcatcatcaccagcagaaataagcatcggaacacccaaatgagcccatttatgataagtgaagtcaaccggcttcccctttttgcgatgtttacgactcgctttatctggcagtatatcatccggaaaaggatctgcaaaaaaaaggggggacctaacagctgtatgtatgttcgtgtgtataagaattaaagaccaaccagcttttagatatatgtgtttgtgtgtatattggctaaagtgtgcatcaaaaacgaaatttgattgcagagcatatttaaaaaggcattctcaaactttgaataaacataaatcgcaataagactctgaccttctcgactaattggtacagcaactgtaagagctctgatgtcatgtgtatgagccttgacataaccaatatagtcccatttctgagaggaagaaggcttcaaatcttgagaaccgttagtactaccagagagcttataaaggataacctacagaggatgaccagagaattagaatgttgaaaaccattgcaatgaaacaaacacaacaaacatttcagaatagtacatatatttaacttctacaatttgtcaaagtatctgtctctagtatagtggtacaataatagatcccatatattgtcaacacgaaatatttcaatcagcaaaaaaaatctacattaaaaacaggtcttcacaattaccttgataatctgatccatcatcaactatattctaaaatcattgtataacagttactgcattctagtaatttcatttacctgtccatccgcaccagcagaaaagactcgattatggctgggggctgctgcaagagtattgacatcacctttgtgattagagtgtgcttccaaaagggttccatgctcactatcccaaaactggacagttcctgtactatctccactcacaagaactgaacacctagagtaagcatgtagatactcagcaagagaaaaacaaaaacagacacaaagttaaagctgaacattacaatcagtacctcaacgaaagaagtgaccaaacacagatctcagaactacttcctagtccaccaagaccagctgtaattctgtatacctcatgacacgaggtagcgtcccagcatcttatcagcctacaaatgattgttgcaacagaagaaacagttactcagaataaacttaacacgtatatccaagtaaacaatgaatctacaaaaactcacccatcactgctccccgaaaagatcctttttgcatctggactccatgttacacttaaagcacgtcctgtgaagataatattctatgaaactaagtaaacgaaacaaagattgacgattgatataaataccataacagaggtggtgaaagatgactcaccactgaccctaggcaatgatctatagtaagttaacttttctaaattagagatacggtacagtctcacacaaccatcatcacaagcagctgcaagaatcctatctatctcctcctctgacttctcatgaaactcatcggaatcagaaccatcttcttcactcccaatctcttcctcatcattcgatttctcactcaagtatccattcttaataccttctacatcactcgagaatccgctaatcggagccaatgccatttgccatatcgagattccaatagactcaagcacaatctacacaacatagaaagacacaaaacactgagtatcactctcaaaatgtgaatcgaaaaactgagagatatttttgaaccttctgcttcaaatcgaaaagatcccattcagaaatagagccatcgatgctagaggagaataaccgaccagaaggaagccctatagaaggagaacagcaccacgcaagagacgagattctcgaatttggatcgccatggatagtctaaccccggaaaaatccgaaagaaggcaacggttaaattaaaaccaatcaaaaaaccacaaatcaactcgaacatacttcacgagattccgattcgattgaaatcggaatagagaagaagctactagcgtagagtacgtacgagttgacagtgccatccgacggcgccgggggagacgagccagatttcaagagaaccgtcctcgcgagcggcggcgacttgagagtcgtcggagctgttagctagggctaccaccggtgatggtttccagtcaacggagctgcaacggtactcgagcatgacggaagcagaaggagaagtgtacactctctgagagacggagatgagagaagaagaagaggaggcgatgaagtattaggtttttgaggattttacctaaggaccttatgggggcggcaatttaaaatgggtctgggtccggttccgggtcgcccgcacacgattcgacccgaccggaatcattcattggtttgaaatttatttaatccctatgaaaagtacatattctaaacccgtctagttaaatcaaaaattaagtttcaatttaagttaatttataggtaatgtttttagatagatttttttatttcaattcgatttcagattgattatataaggaaatatctatcaaataaaaactcttaacaaaatctaaacaactccgctaattggttttaaaaaatcgagtcatataccacgcaatcattcctacaaataaggtaattactagatattgtagtcttaatattctctaaactataaaatctccattcatatctacaatatatgttacttaacgctgccggagcggcagctacgaagtaaaacgacatatcatgaaaagtaacaactaagtaaaaaacgataccaaaactcgaaaataacagatttagatgattcgcggatgaatggtgatgagtaccaacgacatcagatgagtcgctgaaatttaacagcagcatctcaatcttcatcggcgttcatcttctgcgacagtttttctctcatcactgtactttcttctctttgcctaattgtttttcttcttttttgccgttgccgctccgttaagtaaaagaacatagcctatctttatatatgacaactaaaactttgtcattcaattagtatgagtgaacattgtaccaacttgaggaacacattattctccattttcaaactcggcaacatttaattacgataataaatttatacattaaagaatttttaagaaactaatcttattcgcaaaatcataatacggaatatgcttcctaacgattataaattgtgacccaatactaaacactataaatatatgtttcgtaaaagaaacataattcacatcaatcaataccaaaaaaacactaagaatctctcatgtgctgaaaaatagtaagtttgaattggacaacgtaaatgaggtgtattaatcgaaatgttctgattggattttgattttaacgaggtgtcatggcctatctccaccaaagtactttcaaaactaaaatctatataaaaacatgggcctaaacttccttatctagaaaacttaggccggagcaaataaactgaactgaatgtaccgaactgaaaccgatgcaaacaaactgaaccaaaccaaaccaaaaagttgaaaataaccaaatggatattaaattctataactgaaagaaccgaaacattttgggtacaacagaaatattttgggtaaccgaaaatatccgaaatataattataatttcaaaaatattagttatttctaaactaaataattaaatatatatacaatagtaaaaatactcgaaagtaaccgaaaatatatgaaaataacaaaaataaccaaaatatctaaaaatattcatagaaaaataaccggatggatattaaattttaaaaaagcaaaagaaccggaaccaaaccaaaaccgaaccaaaatttcaaaataaccaaatggatactatactttataaccgaaagaaccgataaccgaatggatacaaactgaaactgaatggataaccgaatgcccatgactaagaaaacttatctaagggcctgacttgttgaaacgcagcggttacggttatgactgcaagagtttacggaatcgaacggttacggtttcaagctttataaaatattttgaacgactagtttagcgattaaaaataggtgcgattgcgggagctttatgattgactaacggatttacgtttatggtaggaaaattacggttttatgtttttggcgggaaaattatgggtttatgtttttggcgggaaaattacgggtttatttttttggcgggaaaattatgggtttacgtttttggcgggaaaattacgggtttaccggtttttggcaaaaaaattaagagttaatgtttttggcgggaaaattaagagtttatgataatgttatcatcatgatgatagctatcatgactatgatatgttgatatgattatgatgaagataatatgatgatgatggtgatggtagtatgatattatgagagggtaatgatgatgatgatatttagttgataataaatatacggatgggtggatgaagccatttgaaaaaagatttttgatattcaatcggtttagaaattttgtgaaactcaaattgatatcggtttagagatttaagtttgtttaattcattttaaccaaaattggtgggttcattgcaacccaacttatttgatcaatataaccatttgactcaataacttatttgaaccatcaactcatttgagtcaaatatttcaactaattagatttcatggattgagttgaattgggttgatccatgaaacttaaaccattttgacaaccctaaaaatagcctataaaaaacaattgaaaatagagtaagtgtatttttccaatgtgacctttttttattagatacttattaacttgataaacaacctgcactatatgcaggacaaaacagttattaaataattttaatgtattgacgataatgaaggtgttctatttttatattgttacataaacgatagtgtattaatgattatcaagattaggtaaatttttattttatgtatttctaatgtttatgtttattatgctctctatatatatatatatatatatcttaatagatacacaaaatgttaagtatttccttttgtatagatttgtatattttaattgcatatattaatcctagttttgttttaatataattgagtaaatttaaaagcagaaattaattggagaaaaaaatcataagtaaaactaagggaatattaggctatgagacacttttttaaaacttaatttggctatggggtactttagaggtagtgagcatttattttaagtttttttactactacaccctcaacccaacctaactaatccaaactaactatggttaccaacctttattttttttctctcttcattcatttttctttctctccactttacaaaagtaaatacaaaacatttgcaatatttattcttagaaaaaagacaattgttccatactttttctctcttctctctcatcaaaaacaccaaaaagtagatctaagtttttcttttcttttctcttcttagatcttaaaagctgaagattttccagatttcgattcagtttttcctttaatttcataaagttgaaattttcatatattttttctgggtttcttcttctcttattgtatccatcatagtcttagtcaaattccgtctctttacaaattttagattcgtccacaaagtgtttgttgaaattcctcagagagagagagagagagttgaattaaagaacccaaacatatattcttactataaatttgtaacttaaaggtagtttttgtgcgattttcattaaaacacattagcaaataatgataaaatggaagaaatacgaaaaatcataagcagagtgataggcgactagggtttcaagaaaaggatgatctataagcaaattactatttttcccttctcatttgtatgcaaattactattatgcaaacaacgtggtcagagttaggtggatgtgcatggatggtcgataattccaaatgattgaaatgaccacatggtcagagtttggtggatgtgtgttgacggtcattaattcaggaacatatttagggttttcacaaaagaggctagaacaaaggaataaaagaggaatattcattaggtaaagggatggggtctatttatagcaaatactaggttgccctaattcgctagaagacaaaatagagaggcggtttggtcgagcaggtgcaaatcttcaagactcaattttcttcacttgctcgacatacaagtcaagtataaaggccgagcacaacataaatcttcaaaatggctcctgctgcacattatgttgtaactgttgcactgctgaaacttctgatgcaccactcgaccttatcccgtgcgtagatctcgagcatagcttcatttctttgtgtggcatctctttggcttgaccactcgaccacatcccgagcattgaccccgagctcaacttcttaggtccaaaaactcccaaaataggtccatacccacctgttttacctgtaaatcactccatatgcaaatatgctatgcaatgcaatgcaaaacatgaaaaagaaggaaaatggactatgaatgcataaaaagagacgcgaaactacgttaaatgcatgaaaaacaagggcttaaactggtaaaatctagcgttatcaacacccccaaacttagctctttgcttgtcctcaagcaacaaatagaactaaggtaggagtgaggtttgaaggtggggattcagagccaaaatatgcatgtagagtaaatgggttcaatgtccatattgataagttgaatgatctttacttaaaaactttagccatcttcttcacaacacaacctaacttcttacttagtccattcaagcattcaaataagcatattccctttaacattcattaagtaagaaccatatatcacactatgcaatgtgtattgaactcatttggctaaggataaagggtcaagagacaaaaatggtcccttaaagaataggcttaactaacaagggatctttcaagaatgattaagttttagtaaaatgctaaaggtaagtcccaagttatgcatacagagataagatcccatctacccaaagtataacctatgaaactctagtggtaatcccatctcccgtcccaataagaacttaactctacccttttgcattcatgatcttttaaactctttttcagctcattattttctttttctcttaactctaggaaaagctttcttaactctttgatacttctagcgggtttggctttctttaacaactaagattctgtttttaatctcaattaagcttagggctttttacccttcttcattagctaacaataactcattcttttctttaacaatctcaaaccctttactagaccttttctaacttctttagcttacttctcctagaattctttttccttttcttataaacaatgaattcacctcattttctcttttaaactcatctcaaccatgatacaagcgcccacctagtcctatctagtccggataacgcgaactagaattacatgagacactatctctgtcgttacgaacctaacactttctaccaagcttaatcgaaataagacttcacaaaacactcacaactgatatatggcttgaaagaaggcttaggttagggtgtggggaaactgctctaaagatgagagtcagctaattggatcaacaagtgtggtgaaatgaataagaagatccaaatattttagggtaaccatgagatcaataagcaatgcatagtatgataattacaagtcagattagggttcaaattgatagggaatagcttcaaatcacaacaagtttcgactaaagaaaatcaagtatatgaattcaaaagatggttcagtcttacttctagttcactcgattaagcattagacaactaataacaagggcattgaatctatctagttaacattgcaaatttacaaggctatgatcatcattatcccctatgcaagtgcatgatgcaacaacctatatgaaaacacactaaaagcagctctaaaatgtaaatgcaaactatatgacactttatttttttggaatcatttttaaaaaaaaatcaaatttttatgggttttctataccttagatgatgcaaaaatttgaattagaaaacagaaaacaatgtcaaatacttcctgaactctcccgcaaagttaaattacacggtcctttatgtaataaaaatttgatggaaagttcaagagaaataacaagaaaatctaatatgcaatggtatttacaaaggttttggagttgatacctcatgttttaagtgattctagataactagtggaacagaggcggctatctcgagtgttgcactaagacattaatgtcttactcgacccttggtcgagttcgtgctctgactctttttaaaacctataaactgacacacttaaacagaaatatcaaaaataacaagaaaataagttatatgtacaaagatagacatgggacttcctcccaagtgagcttgttttaagtctctaagcttgactctcatactcattaggctcatgtggtttgttaaatggaaatgaggtcccctttggaatgatcttttcaactataaagcctgaatctttgtccattcattttgagttcagcttttgctttgctgaccaaggtggtggttccatcaggtggaatgtctttgatgctgaatggtacctggttggatttcccatggagctccttgagttgaaccttcaaccctctcatagtgtcatttagctctcttatggccttttccagtcatttagacttcttctgaagctctaaccaattatcagatgggaaagtgttttgctctacatgcatgtcgagcttagaggtcgagtgtgagcattttgaatgagtagagattgaacttgacctactggtcgagtttggtggtcgagcatgggttggacatgcctcttttgctgccataacctgtgtttttgactaaagcacacctttaatgacatctgtccatgctaccaccttgtttgaagcaaatgccttctttgagatcaaggtctcactaggaagagacttagcttcaactcccttagttaaagaagtttggagttgatattcaactgcaagctcttctaacttttctggaacactctccttctgtatagtagtattgcactcttcgctcttggttaaaggagtttggagttgatcttcaacaacaagctcttctagtttttctggaacactctccttgtgtaaaatagtattgcactcttgctcagcacaaccatttcctgaacttcttgggatctttctttcatcatctctttgtgatggtaagcatcaaccaagggtatctttgcttttaactctttgatgcacttgatgaacatcatcttgtgtttcttaaagatcctctcttcaatctgtgcaatccttcctggaaatggcagtttaagttcataaggaggtggaatagggattgggttactcgggtcatgtgctcgttcaacaagccgagcaaagaagtcgagctcaatttcttgagtcgtttttgcagttaaaacctccctttcttgatcctcactgtcctttgtgacaaaactatgaattgtggagatagcatgagcctactccttggggtattgagtagctttcgtagggagttggcttagatgttgtggtactgaagtagaggcaacttgcccttccattgtcctgagtttggaacctagtgattctatttgattttggagatcaacgaaagtagaatccatcttggtatgcatcttaaccaaatgcttttctaacactgtaacaccattgttctgagtttggactagttgctgaaacatagctgtgaagtcaggaacagctcgaggtggtgctggttgaggtggaggtgggataggtggttcaaattgttgtctctggctgaaaccttggttgaagctgttgttgaatggaacataaggtttggattgaggttgttgttgtaattgaggatatacgtgatcatgtggattggccacattgttgtttctgtatgagagattgaatgaggtggcttgtaactgttgtagccaccttgtatgtagctcacttcctcatatgggtaagtctctccttcttgaatctgttgttgctcttcatccgtaatgtagtgaatatgtctctcaacgattggtcgtggtagagcaatgaccaacttatcaatctttgcatgtagagcctggatatccctctgatgcatttcctccatctcagtgttgcctcaaattgaacgatcatactcatcacaatagttcccatcagattgagctaagttttctacaagttctcatcccgatgctacatctttgttgagaaaattgccattagaagcaatatctaatagcatccttatcttgggcaaagcttctctataaagtgtgctaagcagtgaagctttcttgaaaccatggtgagggcattgagtagtgtagcccttcaagcgttcccaagcttcagaaaatgattcagaatgcctctgtgtgaaacccgagatttcattcctcaatctagttgttcttgagttagcgaagaacttagctaggaatgcctttttacaatcagcccaagtgcctatagatgaagcaggcaaagtcttttcccaaagatgagctttatctctaagtgagaaagggaatatcctgagcttgaagctgtcctcactaactccattgatcttggttagactacataatcgatcaagactatcaaggtgatccaatgggtcctgcattgaaagtccatgaaacttgttcccttgaatcatagagataagaccacttttcatctcaaagttattgttctgaataggaggggggacaataccagctctctgatagtggtttctaggtgcatctccagaaccaatgttgcctggcaactcattaacattcgcctcattagccatcactattggatctgaagtggcttgttattctttgagttcacgctgaatcctgtcgatgtcgtctctataccgcaagagattatcagaaccttgagaacgagtttgcatacgttttgatgttgcgcggctgttatactcgacgtgctagtcgagtatgagtacctacaaaacaaaaacaagcaaatgaagaaagaagttagtaaccagaaagaagtaaatagaacttgaaatggatacaacagaaatattttgggtaaccgaaaatatccgaaatataattataatttcaaaaatattagttatttctaaactaaataattaaatatatatacaatagtaaaaatactcgaaagtaaccgaaaatatatgaaaataacaaaaataaccaaaatatctaaaaatattcatagaaaaataatcggatggatattaaattttaaaaaagcaaaagaaccaaaaccaaaccaaaccgaaccaaaatttcaaaataaccaaatggatactatactttataaccgaatgttagtgcattgtgatctctggttttgatgtgtgagtgtcttatgcatttgatccgtgttttcttgtcatgtctttgcaggtttactcgtgacacatcttcgaggctggttcgaaagattactagagtatggtcaaacaaatttgatggtgtcttctatagctggtcatgtgttcctcgggatcgacgagaaagatatttcctcgagtttgcggtatagtttttttctcttgcattcatttaaatgtttagctgtgaattatcttcactaacatcatgtctttgttatttgtagaaaacacaccattgggatcctttgataacaagaacagttcaatactattttgaaaatatatatcgccgacggatgaaagatatgattagcactgtgaggactagtcgagagtgtcctaaatggatcatcgattcccatatctgggaaacgatgtgtgcatattgggatactgaagaagtaattgcaaagagtctaacatattccaaggctcgcatgtctgaccgtaatgggttcggtcctcacatccatttatcagggccaacgtcgtatcaacaaatccaatcagaaatggtaaattaattcttgttctctctgttatttgttttacatagtccattgcaagtttagatgttgtcttagtccttgttcatttttagcattgtaggaagaggaattaggaaggacggtaggttttggtgaggtctttgtcaagacgcataccaaaccagatggcacttatgtcgataagaagacggagaagattgttccgaactatgagcagaaattgcaggagaagttgtctgaaatggaggcagagacttcaaatattttagacggggaatcatgacctcggcagctcacagcagatgactgtgctctcatcttcctataggtaaagtttacattttcataattatggtctgcatattctcatgctctttagtaattgtttgtctctttcttttcacagtctataaagacagattcacgaggaaattattatggagcgggcaaccttaaggagcatcttccggatctagtcactggaaaacgcaaacacttaggagaatcttcttctttcgtggcattgaaagtgcaactgaaggaagctcaacaaaaaattgaagagcaagctgcttataatgcaaaacgtgaggaagagcaaaccaaggctgtagctgagcagaaggacaagttggcacacttgtctttggttgagaagtatttgcgccaaagtgatccggcctttctccacttcatcgagtcttattcacctgaatcaactatagagcctatctcatctccaactacttcttaaggtacttctccctctttcaaaactagcatgaacttgtcaaaacttgttgtcttttgagaatttagtgtaatctgaatcttgtattttggttacaatataaatgaatttggtgtttgtttgaatcatgagtttggttttgaaatttagttaagaatttagagaaagcattacaagattaagcaatataaatcagaaatacaaaataacgtttttttcttttctctgaaaccgtagtcgttactcagtcacagattagtcgcagactaatccctacaataatcgaagtttatatagtttaatcgtaacttaatcgtaacatagtcgtaacatatagcgactattttacgactaatattacgactacgtgcattagtcataatttagtcgtaaattggcgactaaaattacgactattgagtttagcgactgtggatgtgcgacaacagtgattagtcgtaaaacagtcgtaatctatcgctttatgactactttgcgactaaaattaattttgcacaagaactaaacagaacgagcagaatactaaatccattagctaactaacaaacttaatcaagttatccctagacaatagattcaaaaccagatcaatccacttccatgacaatgatcttcataactttaccacttcctaatctagatttccattgatgaaacatagcaaagcaggctttaaacaccaatctattaaagtcaataagtagtctaaacatccaatgtcttgggctagaatctacaaatctctaaaattagttggttcagacatttcatcaaatacttgttagatggagaaagtctgaaatcaatttcaattgatcagaaagaaaatagtattgtgaactcctaaaacagaagggaatcatgcaaatataaacttagctagctaaagaaaagaggaattcacctaaacataacccatcctcaagaactcagaagaagactactctagaactatgaagaacatcatacaaaacccagaataatcatcaaacacagaaatcattataaacttagtatgcaatagatctaaggaagataaacaactttgtagaagaaaataattgcaaaaaattaaagattcaacaagaaattaaaggaacatatttagggttttcacaaaagaggctagaacaaaaggaataaaagaggaatatccattaggtgaagggatagggtctatttatagcaaatactaggttgccctaattcgctagaagacaaaatagagaggcggtttggtcgagcaggtgcaaatctttatgattcagtttttcttcacttgctcgacatgcaggtcgagtataaaggccgagcacaacacaaatcttcaaaatggctcctactgcacattttgttataattgttgcacagctgaaacttctgtgcgtagatctcgagcatagcttcatttctttgtttggcatctctttggcttgaccactcgaccacatcccgagcattgaccccgagctcaacttcttagttccaaaaactcccaaaataggtccaaaaccacatgttttacctgtaaatcactccatatgcaaacttgctaatgcattgcaaaacatgaaaaggaaggaaaatggactatgaatgcattaaaagagacatgaaactacgctaaatgcatgaaaaagggtttaaaatggttaaaatctagtgttatcagcatcgaaaccacatgctgatgtttctaattctgagattagcgatctgtggaaaggaggaccaaggtgtcagattttggattggtgtttagctgatgatgttatcattggtgaaggagagttttgctcagctgaacaatcatacaagattggacgcattccaattgatcgtaatgcagctgcgattttggttaagtcagttgtagatgtagaagcacctttgtggaggcctatgccaactgtttccacacttggccaatatgttgggacaaaaattgcatggcaatttgataagctcattttggacactgaattggactctccaacatataataagactgttgcttcatcggtaaaatattaaatattgtactgtaagtttttttttttcttagcttaatatgtcggtaactgatctattgttgtttttcttgggtttttataaacactccataggctgcagatgcagaagattatgagaacaatattcaagtggatgatatacaagcatacaaggataaaactttctcaaatagtagatcatttggggtaagactctaaagctcctctcttttaaattgattaaattgtctgaattgttgttgttatggacttgtgataaatttactggagatttcttatgtgtatgctgtttatttttctttggaatgtacttgtaatttgctgcctaaaattttcttttgtagagtgccaataacagctataacaacaacaacaccaacaacgagaaaaataagtgcatcctctaagattgcactggatctggaaaaaaaattgcagagggttgagttttctcaacaaatccagaagatagagttcattttgtccctttgggtctcaatgcaagcaaggtatgggtggatgttcctaccactgaaaatgcaccagcttggtgaccaaatgcagacattaaaatcattgttgatgctttggggaatacaatagcttggccaaatgacaaactcatttacatttgattctggtcttgtgtttctattatgtatgctttggggtgtacttcttcttcgactgaattaaacatgttatttggttttaacaacttcagctttatgaatatttttcttcatccaaaaaataggccacgacaattaaccaaacaaattgcaacatagctgaccatgtacaaacaatagcatatccattaatggcaaaactaaaaatgctacgataagaactaatttataatataaaaaccaaataattcataacttaaaaagacactattattaaacatacaattgcatataataaaacgctatagtaaagacaactacggtagcatatcgaaaaaccgctacaataggtcgtcggcctattgtcgtggttgatgatatagcgtttttaaatacgctatggtatcaattgacagcgttttttggatgctgtcattgcgtgattttcctgtagtgaggcaacaataagaaggtttaaagtttagggcttggggtttagggttgatggtatatggtatatggttaaaggcttagtgtctatggattaaagtttagggtttagagatttagggtttagggtttagggtttagggcttagggtttagggattagggatttatgctaaatatttgtaggcaacaataagaaggtttaaagtttagggtttagggtttagggtttatgatatatggtaaaatctatactttaggatttagtggtatagggtatatgtatatggttaagggctcagtgtctatgagttaaagtttagggtttaggtttgaatttaggagttagggtttaatgtttagagtttagtatctattgtttagggtttaggatttagtattaaggaactatgattgtttacaatgactttagagtttatgattacatggttctcattaaaattatatatttcattgttgtccatatggattagatcatctaggccacaattgttttgttgatttaggtgggtttttggattttggattttggattttggcttttggcttttgtttttgattttatgagtttttgattttggtggagattttagattttgcaaaatcttaaatggtaacttttctagtttttgatttttatataattattatttagaaacgttttaaaattatgtattgtaaactttatttttattttttaaaaacaaaaaaagagtttacgatagaatttgttgaaaatcccaaaaaagtgggttttggattttaagaacaaatgactagaatctataaaaatctagattccctataatttagggaattaattttttataaaatcataaatgggtgaaaaagtggattttgcaaaatcaaaagccaaaataacctttaaaaaccagtaccagtcaaggccctagattttttgttttctgaatctgtttatgtttacgtgatacaattaataataatacaaataaatatagtaatatggatttcaaaatgaaggaaaaatgttattattatatattttacaaaaaaatgattaaagatttttaataaaatagaaaatgtgacaaattaaagagaaattaaattaaaaaaaaagggagagagagaagaaagtgacaagagagataagaaagtgacaagagagtgaaaataatcatcatatctgttttattaattttaatttgactgtcaagatttaaagagacaatctgacggaccagatcattccgtcaaaaatatttcttaaccatgctacttgacttgaggtgaagagaataagggtataatggtattgatttttttggaatagtaaaaaaaaaacctcaaaaaagtgtctactccctccatgtgcctcatatgctcatagaaacttaaaaagtgtcctaagatacatttggatgtaaatatcctaacaaaatttgtaaatatcctaacaaaatttggatgtttaattaaatagattgagaaattttgtgagaatgacacataaacatgacattttcgttaatcacccataaggataaagttattttaagaaatgtttctcaattaatatataagggatattggcaaaaagactataattataattacaaaatctaacgacgtaaataaaaataataatctcaagaacaaatctatgggcctaggcccaaccaaaataaatgattaagggcctgcctgatttaaacacaacgtttgcggttatgaatgcgggagtttgctgaagcgggcggttgcggtttcaagcgttatgaaacattttgaaccactggtttaatggttaaaattgaagcgtttggaagagttttatgactggctaaccagcaggtgctactacggttaaattaaaaataaccaaaaaatataatatataattatacaaagtataaaaataccaaaaattatattattatgataaactgtaaaattgaaatataactaataataaaataaaattcttcttaattattcaaactaattaaattttgtactcaaatatgcatttggttcattaaaaaacatcatcaagttatatgcaaattacaaaaaaaaagaatatgacaaactaaaaaaaatatttcaatttttagatattccccggattaataatattattacaatacttagttagtatcttatcatttttcagtttggtttgatgctatgattttggtagaaaaaaactagcgttttaagaattaaaaatcaccaacatatatggaagttttcgagagaagtttacgctgaaaaatgttacagatgacattgttgatgtaatctgcaaagaagcaaaaaattgttacaactaagatgtcaattttttatttaaagtctaattaaatttatctctaaggtatgtttactctcaaatctctaatgatcaattcgattcttgtcactatttttttgttgttcaacgtgtatctatgatccatttttggtttaagagcttatttccgaactaaatgaagtcttagcagaaagaaacatcgaggaagaaggtcaatggaagaagaatcttaaagaagatacattaaagatttttgagttttttcctcaaaatattcaaggatcttatctaatttactaagcgtcattgtcgatcttaatcaataactactaactaggtcagtatccgtgctacgcacggtatctttgatttaatcaatcatcaaatataagttctgtgtattccacataaactctactttattttcattatatgtaaacatatagttgtatatcatgtatcattggaatcaaataaatatatttagtctcgtcaaacaatattttcttaagtatatttagttttctcgggttgtagcatggaaacaatgtctaagttggtatgtacgtttgggaacgtaattgtatattttgtatatgtaggtttacacatagtagctttgtacgttttcgtgtatgtaagtgttatagaagtttaacagaatctcataatcagaaaatttctaattatatatatgtttatatttacagaatgtgaaactaacatttgatgataaaataattatattatatgagacataagccatttgtgtaataaatagattttactaaattttgcaattctgatagagaccgacaaataaataaatattagaattagagatataaaacaataataagatgttaaaaaagaagcaataatacgtaatatttagtaacattattatttattttaggatgaatcatattaaattttgtcaataatagcgatgcgatattgtaagatatcaagttttagaaggtattctaaattcgaaatatgtaagagtcataaccaaaatcatacacaataaataacaagacgaccattaggccggtaccaaaaaataaaaatagaaacttgttcatacagaaataaaaataatataagaccgagttcaaaaagataaacacaaaaacattattttaagtagatgttcaaccgccattccttgcaccttcatcacgtagcctacaaaacaaacaaatgtggcatgcaattataaataatagtatagatatttcgtttatataattactaataacgaaatgtaagaatatatgaatagatcaaaacttacatctcatggatctcgttagactcgggaatatcaggatccggaaagacggttgatatcgggcctgcgctgcaaacacgtacgttctttggaccatcaaaataacggtcaatcttccaccacccaagaacagcgacaataactccaccaccatatcgatgataattatgatcaaagtcaagagcttccttcttagtagctagacattcaaaaacacggtttctaaacataaaatcaaaaatagtattagaatagtataatttaggtaattcgaattaaactatcaaagaaggaaacttactcattgtcacttattttgaatgttagcgtcaaatcatcgacgttgttttgcttaggtcttgtgttaatcaattctccaacatcatagatcgctcccaccaagtctccaacaaattacataaattaattaaaataaatcagagtcaaatatatacagttgatattgaaaatgacaaaactaatgaacactaagatgcatgatataaaataatgaccacaacaaattcataaaaatctcaccgactaaaacagatttatcgatttcatcatcaataatcgaagagaaggatgctagacgattgtgaagaatagcgggtaccagacttgttaatctaacgacagtgtcaacagaaaatccaattttgaaggtatgagttgttgccctgacagaacacgagttctcaacaactccaaaacttgttatcgttacccattctccttcattaataaaatgtttatagtgatccgacatcttatatccaacagtagtttcaatagtcataccctacggatcaaacatactaatcaaaattctaaaacatgcaaacctaaaattatcattacaaaacagtcaatacttacatgttcgtcggcaagaatcaaacccataacctttgaagatggaaccagcgaaactaagaatgtcctcacaactctcccacgaatacaccatcctgtaatagacggtttcaacagtgaaagaggatgaaacgattccatcttttggcagaaatttcttagttacttttttgtattcgttttatgagatgccaatgatagcgatatatatatatatatatataagagagacaaatacaccgtagaggcatgttttagacgcaattttttaaaaaagtaataatagtcatgacgtttcaagtcacttcgtaatcttgaagattctgtaatatattttgaataactcaattattaataaaattataaatttggcgagtcttatattttaggaaataatataaatattgtatcgttattattaattggatttgttatataaataccaattgttttaactgcgtggataaattactaataatcacatgatcctataatgtttgagacatataataacaaaatttccataaaagttaataattatgcagagaaataagtaacaaaattttaaaatatttttaataatagaagtgattactaattaggaaacaatatatatatgcaaatatattgttaacaacagaatctataatttaattatattatggcacttatatataagagttgaaataataaatgttttcaacttagaagattatctaacgatgttgattttaacgacatatttctttggacaaatcttctaataaactctaaggtttggtttttatttttctttgtttaatagtatagatatctaactcatattttagattacattgtaatcaaaatttgcaatccaaatacgtattattaaaatcaataaaatatcaacattatttaaaccaaaataaactaataattggctaatctaaaagcagttataatttgatctaagtttacagttatatagttatttaataagcattaaataaaaagaagcataataaagttaaagtttaacaaagtctttaaaagtacaactttaaaacataatagataagtttttaaacaaaacgatagataggggtctggtgttgcattttcagttctcgtccacaacttcacctagctcaggtgtttgcatccgttgaaggaattgagttctgaaacagtaggaaaatagaaaaattaaaaataaccaagaccaaaattttaaaaaatacaataaacagttaagggataataaaaatataaacgttcttacctgacgcgatccatgttaatttctgggtaactttgattgaatgtaattcttgaagcaccattatgtgagattagacattgacgacctaaaatattaatgtttttattatatgaagtagctatataaattatagataagataaaatgagtcttaaatataccttcatgatcatcaacattccaaaatcgtagcacacagattgtaggattcataccaaagttccaatgataaccaagttctataccaaattccctccataattgcacaaacaactcacaagtatatccgcttgcaacacatatcagagatttacccctaataacaatatcaaattattccaccaaacatctaagttctatgaattaaaccaactataaagataacaatatttactatgtttgtgcattcaaatatataaccaaatagatgacgaactatatagtggaaaatactaaccaagaatttttaatctcaaattcgagaaattgagaaagtataggattttctgaagcttgagggacaaagtccagtcttgttatattcccaactctgacgacaataccataagcatctacaaacaaaaaaaacgataatatgaaagattaatattttcaaaaaaatagactttatattagtgaaaaatctaaataagaaagttaccatggacagttgaagaatcaatagtcttgttttcgatcatagagaaggcaacaaatcggaaaaagttacttgattctctattaggcacaggagacattttggtagtctgaatgaacttgattctcaacttattatcggttaagggaggttttctaccgccgcctgatttgatcaaaggtatgttttccaagaaaccaacctccttcattgagaactgtagggacgtcatatccaatgtagaaataagcacaaatggcatcaatcattgtgccctaaaaaaaaaattgacttatgaattattaatagattagatccaaaaaacaaattaccatctcgtcgcacaagatcatttggtaacacttcccaccctcatgaggaagtgttatccaccaacatagtagcttcacaaaaacctttcaattttttttttttgagaaagttgaaatagatatgagatacctttaaaataaccacctctatcatctctcaacatctttttctttttgaaactaatagggtagaagaaagatgtcgaaggtaaataatggatgaaaataagagaggaggttacctttttttcaggttgtgtcctttgacagtttagaatattacttgtatattaaatagaaaaagttaaatgtcatgcaaatcttgtcaatcgaatttggaatctcgatggtaaattatagtgctttttatggttacttacgaaatttaataaattttgaaagaaccaaaatgtgacataagttgtcatatctcttggatgagttgactaatcttgttatcaatcttggaaaagatggaaagaaaagatgtgaacaatagatttaattgagaaagcaagtctcataaatagattgaagagaatatagatgttaatatttgtatctactcaataaaatctactttattactccagaaaatatgtatgagagcaaaatatatttagaataaactgatctatatatatatatatatattacattccttagaaattaaattctaactgttatatatgtatcgattatttttaagtcacaaaagtaatgatgtgactttcatctatatccaaaaagaaactttaaaaggagtacctaggttttcaaaatcaatattattttaatacgagagacaagatactgaaagataatgcttttgtagggttataaatataaagagtccaaatatttaagattactttttgtataggacaatgacattgagttgaaaagaaatgaacttaataataaatgatccttatgtttccaagaatgatttatctcaaagtttttaatgttttattcttgatacccaataattttaatttccttttaaaaagaatcataaataatgatatgtcaaataaaataaattaaaaggatagtattttaagagaaataaaaaaatactacaactatatttatatgtaatcgttgcaaatttatatatgagtttgtttgtagatttttatgtcatacttataaactttgttaggagtttaacaaaacataaaatatataaaaataaaaagggaatacaatacttaaataggttcaaaacataagcaaatttttttaaaaaaaataacttacaatgataaagtttgcaggaaatttaaataagttcgaaacataatttaaataagaataggagctgggaggtcaaactcctaattatcttcaatcactttcatccttgggttctctggaagttcatcataatcttcgaaaccgcggctgtaaaagagaaaaaaaaaaaattgtattgattaattgatgttatggttaaccaatacaataaaaaaatgataaaattcttacatgtagctttgaatatctatctcagggaaattggttggattgaggtaaattcttgaacatccaaattctctcttcaaaacattctcacctgttccattagtttcatttaaaattatataatacaaataacaatcataagtaaatagaattacaatagaaacaaaaataactaaccctcaatctcagctattctccaaaatctcacaatggcaacaatgggctgatagttataagccgctgaactaatacattttgagaaatttgtaacaaaaagttcacagtatcttccaacagcatagcatttcattttctctcccctaaccaatatgataaaatattagactaagcaatgcattattaagctaatttttcagacagatgacacattactaaacatacttaaaaacactacaacttacatattgtccaaaagttcgaatgagacatatcttgattcatagtcggtttcaccttggcgacaaacaaatagaaatttcttaatagccgagatatttgtcaccacacccattgcatctaagtatagaatactatattaataccatattcaaaaaataataacataaactactatcaaaaattaattcttaaaatgagaagaacatagattgactaaaaacttacccgtgacataatcccaatcctcaagacatggatacttaaggtcaatgggaaaaatgaagtcaaagaagtctcttttcacaagttccggaagagggtaaacacttgtttcccaaatgaatttgatgtggaatcgaaaggaagaatacctaacccttgattgaggaacaacgacccgaaagccagagatgtgaatccatgtgccaggcttgagaaacggacggaagggattgtgatagtttccttgaggaattgttgcatcaacacggttattctgaaaaaagtccaaataactcaaagattaaatagtttgtgatgatctgtttcaataataacaaagtaaactgggattaaaagaaaaaaaaagtgaaaatacaaaccttgtcatcatgaagaatcatggtcgtaatttcaccatgactatttggaggatgattccaaattgataggatcttcacgttaatcttccagttagttgaggtatccctcaaatcggtgagtttgtgaacagacattatgtgtatccaaggaagttttttttttgtttagaaagataaagagttaaacctaatttttttagacttgaggtttttgattttatataattggggaaagatacaatgatgaaaagttgaagtgtaaaaaggaaacgaatcgtctagaaccaataggatttcttataggttagaacaataatgatgacatttatttcttagcgtgttactaaatattataattaataaaatgagaatctatgaaaaaataggaataggttattttgtttgagttatcatgattaatcatatttaataagacggattatttagtgtacaaaatctttgctaattctgattttgtagaatatttaacacaaaattagcaaaattgtttattgttcttagtatgattaacattataaaaaccaaatcatgtgtttcttaataataaacaattttcttttctgaaaatttgatgttttgagtttttttcttctttcatcaagattgatgttctacatcaacatcattactatttttattgttaaccaataaaagaagagagaaatataactaatattatagttaaactaacaaaataataatatttcatgaaaagttgttattcttactttgtgtaaaaattctacaacataaaatttggtgaaaataagagagtaatcaaatctcagctctgtgtattcaaaaaatttagatttaacaaaacaaaacgacatataattgaaataactttattaattcccaaaaaaattccacaaataaaataaagatattttagatcttaaaaagtaaaataactctgataactttaagcaaataaataagaaagaagaaaacgatcaaagctggagtagtcattgagcatcattcgccggagccttcctcagacatggtcatcctagaacacttcttcctacttgtggaagcctgatcatttccatcaacatcatctgaatcttttcgttttgatgatggagtagaggttgacgacaaatcgacatcaaaaaggtcaacaccattagtgagcataagggaactctatatgaaaatacaaaaacattttaataagacaaccctaaaaaataaatataaataattggaatagtttaatgttatttgacaaacctgttcgatcgaaattaaggatgatggatcaacgtatgcatcagagtcttcttgaacgatttcatcaacaatgttaccggtgtagactcgggcaacagtgaatgaatcatatccaccaaatatgttttccctttgaatgcaaaatagaaactgaaaagtcttccctttcaaaccattgatcacatcaggcaaaacagttgggtcttcgatctacagaaaatatagattattataacatgaacgtggtcattttaatgaaagagtttatttttaaaaaggcattatacctcatcaaatgacccatcaagcaattcaggggcaatagtgccaaaaatttcctttgcatgactgtcgaataacatgcatctagcttcaccggtttggcccataatatggagatgtaaccaaaacctaaaagttaaataggattattagcttctaaacaccaaattataattaataatacattcaatataaagatttcataaagattaacttggcaacaacatattttgcaaaaccattgcatatttcacaccaaaatcttggcttttgaggtagcttgacatcttcaagtttgatagcttcctcttcgacaaccttcttgttgtgagcacgacaacaaaaatagtaccacggccaatctgtatcaattgccgaaacagtgcaaactgttttgcacttacccaccttcaaattaatataaagaggaattaacaaactaagttaaaaatataaaaaggtaataaaaaggtttgtaggaaaaataaattaatgaatagtacatcagaagatgtgaggacgtccttgattgtttgccttggataatcaccatcgtcatccccagttcttggtgcatagagcctcttgtgaaaagatccagaacttcccaaagttaacccatcagttggtatgctatatatcaagaaaatatacattgcttaatattatgtagaaacaaatatatttagtgacaaataaatacaattacctttgcttaaaaagacccaactcagccaacgtgggatccacgaagacttgtgaaacatcaaaagaattggaaacactcttagtatctgttttaaaaatataaggtcgtgtttttaaatagtatagatatgtagtaacacataacaatataattaccgttgtagagattgatcttcgcaaatcggattaagcaaacaacagtaccatcggctgactcctggcaagcttggtcaacaatctcagcatactttccccaaagtgtacatgccaagcgagtgtcactaaaaatggaaagaataaatttattaataaaaagtaaaaaaacaacaaactttaaataagaatgaatatgaatatagattgtttgtactgctgatctctcaaatggaaatcgatttttttggtgggcttgttgttagcgttaagatcttggattttagaccgatcgacaacctgacccataacatctgtatagacaaatagaataaatctatgaatataatgactatataagagataatgcatgtatgttcgaaaataaaatgaaaacttgaatctaactgtgcaagatatttgagttagcggatccagagaggatcacatcaaacttagcaagtgagaggaacaaagcatcagaaacggtatcacatggagagaccgtggttttgaaaacaaaaccaatcttgtttcaagtcaaaaatacgatactggccacttgtaagatttagagtgattgtcgtaataatcttccaaacaccctcgattaagcacctttcaaacttcttgatatgctctcttctcacagcagcatacatcttatcaccatatatgacaaaataatttaaataataattagtaaatgaaaatgatgcttgaacacactattaaggattacgaaaatataaagtagaaactataatacgtacaccttaatcaaccaaaactatttcgatggattcaccagcctttacagaatattgcctccaaacatgaagcaatttaacctgaatacgccaagcgttcttgtaaggttttagcgatttcaagggagtgaatggaagaggattggcgagcatcattttaaaaaatgaatttggaaatgaaactgtgtgagtgtaagctgagtgagtagattgaaatgaggcgtccgatatttataagaatgagcagtttggtcaaaaaaacatgcgcaaaagatattatccttggaattcaagtttattcgatataaaaaatccgatgattataggaaaatatttatcatttccataaaagtaggtatgaatatagggaatacttgaaaaaaatgtaagataagtgcaaaagagaattgaaacgaaatattagatatgttagaattatggagaaatgtaaaataattccaaaagaagatcgcaaagaaatattagatgtgctataattatggagaaaatgtaagataattcaaaaagaagatccaaacgaaatattatatgtgctataattatggagaaaatgtaagataattctcaaagaagatccatacgaaatactgtttcatcgtcatccacgaagatacgccaaatatttaatgaaattaatacgattagtttcctgaaatagagtcggatgaatttatgcatgaaactacaaaatcggacgacttgaaataaatctattcaacggccaggattaaaaggagaattccattttttgttttattaataaaaaatgcacgtgtatttttttggaaaatacgaaatcgaacggataaaaacaattcaattgaatgaccaagattataacgcataacccaaaagttgtaaaccagggtcaaaaagatccgcgtgttttttaagtgaaggcgagagatcgaacggacacaaacacttcaatcgaatggccaagattataacgtatgacccaaaaattgtaaatccgggtcaaaaggatccgcgtgttttttaagtgaaggcgagagatcgaacagacacaaataattcaatcgaatggccaagattataacgtaagttaagtgattctcagttaaaggtaaatttttccatgacattaacattttaaacatatgattttaaggtaatttttttgttttaactgagaatcacttaacgtacgtctcaaataatagtgtagatcatttgagtacgttctatacttctatgaaaaagattgattatccatgtcatcaatccacgtcattacacataatccacgtcatctgaaaccgcataaacctttcggtttcctcccgaacagtactgttcatcagcggaaaaaaaaaactgtcgctctctctctcgacgggaaaacgatatctaaccctaatttcgccgccgttttctctatctctcgtctgtttcgtctgaaactctaacagcggtgtcgcattgcaagttgagtaaagtcacatccctatcaattcgcatatgaactcaatttgtctaagttccggtaagtctataacctaactttacttcaaattttccgacaagaatctgacatctaagttcaatagcaagtgattcccgtcactgaaaccgtttttcgaaaactatcgcgatgttattgatggtttttaacgatgcttattccggctggtttttgccgtcgttgattgacatatggtgtctgatttgttatatctatttgatttgatggctgagttactatttgtttgccgactgatttataatttatcaatgcatctgtgtctgagtttgttatatgatgtggttgagttatgattttatcaatgcatatgtggctgagtttgttatatgatgtggttgagttatggtttatcaatgcattcgtggctgagtttgttttacgttttgtctgagttatggtttaaccttacatccgtggccgagtttctgttatgatgtggttgagtttgttttatgtttgggctgagtttctgttatgttatggctgagtttggtttatggtttggctgagttatgttatctgtggctgagttgttttatgttgtggctgagtttgttttacgttttatctaagttatggtttaaccttacatccgtggccgagtatctgttatgatgtggctgagtttgttttatgttttggctgagtttttgttatcctatggctgagtttggtttatggtttggctgagttatgttatctgtggctgagttgttttatgttgttgctgagttaatttatgcttacggctgatttatggtttatcagatgtctgaagaccaagcaagggattaccgtccaagactttacctagcgggggattctaatctagaggctaaagccattaatcagaacatcaagatgggagatttccctctgattagagaatcaataggacaagatacatgagatcaaatgaaagagacacctcttggattaattgctaagctagttaatagccattttctttggtctggtaagattatacattatctactctacagacagttaagaatactgaaaaaggagatttgttgtctcgtggctggtcaacctatcaggtttggcttgaatgaatttggtcatatcacgcagtttaacacagatccactaccgagagaacagtttaagcatgcagtggactacaaaacgttcttcagggaattgggtgtgccaaccggtgaaggtcttaagttagatgaacataggcgaggcttagtagtgtgcagagcatggcctcttgaaaagcgtatatggtttggcttgcatcctaactctaggataccatttgagagtgccaaaagagtttttgatgacgaaaccatgaagacttatccatggggtcggtcagcatttgaaacccttgttgtttctataaagttgccgaggcctattggcaagtcgtacaccatcagtggtatggctttcgtgttacaagcttgggtgtatgattcaatcaacaccattggagagcgatttgggaacgtagtcaaagaggatgagatttcgttgcttagatggggttgcaatcgtacccgtacaataatagaatcggccattgctgaagatatcacaaacataacgactactgcaagtgcacaatatatatgagtagtactttaggatcgaatccacaaggagagaagtagttcaaagaaatccttcagaagagagtgaagctaggaccaaacaaaaagagagggggttgttgtatgcagtgaataagcaaaataaaagacaagtaactaaaatagacgataagcaataagagagaagtgttaggtctttgggggtttctccggatatcatggttcaaaataaaggtatagatcccaatttaggtgataatatggttagtttttttacttcccaattctcgttaggtgaaagccggctattctcactatacctcgccactcagttgcccacacggctaggaggtgctaacatagtttcgagatacagatgaaagcattaagttcaagtttgattctagtccataagtccctatcacttggcgggtgagcaacgattatagttctttattcagttgagatagttcaagcaattatacaagattttgccaagtataaaatacctaagatcaagtacaagttggcgtttcagacatacctgcattaagattaaattcaactagaaagaatagtgtaaacgatcaagcaaaaccatagaaaccaccaacctaaatcagatctaaagtccccatgaattcccctttgaaaccccctcaaacccaactagagatctactcgctcatggcaaaggagctaatcaaaagttgggttgagtaagtcataataaaaagacaaataaaacttaaaaggggttcagagattacttctttgaatgtagaacacaagaggcaaagctccaccttaaagaatcttatacaaaacgaaagagaagaagagggagatggtgatcttcgagctcaagaggtacggtggcgagttggcagctctcggcgacggctaggttttgcttgtgatgaaggcacacctagggttagtaatgtagggaaatatacgattgaaagctcttgtatcaatggatcaagagtattcgttcgtagctcggatctttagctttcttaagtatctatggatcaaaagaaagaagaactcaaagacttcagatgagaaaagcttctcttttataaaacgaaaacaaccaagttataagcttacaagaataagagtatttatactctcctaaaaacgaaaaccctaaatgatgaaagcttgtcgactaagcaacactaaaccgtcattcaaaataaagaaagcccaacaagagtattatgaaaacttaaaaggaaaaacccaataaagagatagatggatgatgacgctacatcaggtcacccggggtagaaagaaaatttgttctcgaatattcagcttcctcactagcgacataaggaaccagatgtttcacattgaagacgtctgcggtctgcatatgtggcggcaattgaaggcgatacgcattgttgttaatcttctcaagaacttgaagtggaccaatctttcttgacttcagcttattgtacgttcccggtttaaaacgatctttggtcagcaccgcccaaactaagtctcccacattaaacgtaacatcccgacgatgagcatcatcagctttcttgtacttctccgttgcaatttcaagattggaatggaccttttcatgaacagctgcaaaatcatcaacaaaatcacaggctctaccatgaaagcgagtacgatctggagagataccaagatctgcagggcagcgaggtaacaaaccatagaccacttgaaatggactaaacccggtactccgattagagctctattgtgagcaaactctgcctggcaaataaccgtatcccaagatttgatattatcaccaaccaaacatctcaaccaaatcacccaaagctcgatttgtcacttcggtttggccatcggtttgaggatgataagccgaactcatgtccaatttcgtacgtagcagccgccacaaagatctccaaaaatgacttagaaaacgagagtcacaatccgatacaatagacataggtaaaccatgaagtttatatacttcccgaaagaacaaaatcgcaacttgtaccgcatcggtggtcttcttacacggaataaaatgcaccatcttggaaaaatgatcgacaacaacaaagatggaatcattacctcgttgtgtttgtggtagtccaagtacaaaatccatgctaatgtcagtccatggctgtgttggaatcggaagaggcaagtataggccagcattagaagctttacctttagcagtttgacaaacaccacaacgaacaatgaatctttcaacatcacgtcttaaggttggccaaaaatacgatgagcttatcaattgaagtgtgccatctcttccaacatgaccttctccatgaagctcgctaattaacttcaacctcaagctacaatcaggaatacatagccgagaaccccaaaacaaaaatccatcataaatgagatactcatcaccaatcccattggtcgcgtcattccaaatcttagcgaaaaaacatcagtaggataaaatgtaggaaggacttcaaaacccgtaattgacatatgaaatgtcgtcaagagagaatgtcttcggcttgaagcatcggctaccttgttcaaagtaccagctttatgtttaatcacaaaggagaattgttgcaaatatgcaaaccaggaagcatgtctcgccgaaaccttgtcttgagaacccatatgtttaagagcatcatgatctgtataaagaacaaactcacgatgaaaaagataatgccgccaatgttttatggattgaaccacgacatataattcaacatcataagtgctgtaacgaccccttgctccagctatcttctcactaaaaaatgcaacaggtcgacccaattgactcaatacgccaccaatacctgattttgaagcgtcgcaatggagttcaaatgcaacgtcaaaacaaggaagaacgagaaccggagctgttgttaactttttcttaatcatgtgaaatgcagaatcaacttcttgtgtccatgaaaactttgtagctttcatacaatttgtaataggcgccatgatgctactaaaatgcgagacaaaacgccggtaaaaatttgtacctgattgtggagttggccaagactcgatggtacttacctttgccgagtccactttcaatccatgtctcgacactatattcgccaaaaacagaacttcctccacaccaaacgaacacttctgcacagccccaaataatttctctcgtcgcagcaccaagagtacctcacgtaagtgactaaggtggtcttcaagggacaaactgaaattcaatatatcatcaaagacaactacaaaacgaccaatgaacgggcgtaagcttgattcataacacgcataaatgtgcttggcgcattagagagaccaaacgacatcacaagccattcaaacaaaccttctcttgttttaaacgccgttttccactcatcactaggacgtatacggatttgatgatatccactcttaagatccagcttggaaaatatcgtagcagagccaatttgatccaaaaggtcatccaaacgcggaattggaaatcaatagcgaattgtaattttattgatcgctctactatcgacacacatacaccaagaaccatccttcttaggaattagcaatgcgggaacagcgcaaggacttaagctttcacggacatgccctttagaaagaagttcttctacttgccttcgtaattcatcttgttccataggactcatgcgatagtgtggtcgattaggcaaaattgcactcgaagccaagtctatacaatgttgaatatcacgtaatggaggcaattcattaagtaactcttcaggaaaaacatcttgaaattctgctaacaattcacgaaatgcgtctcgtaccgcagcgacaggtgaagacatgtaaaaactctataaattaataatgtcgggaccggaaaaatttgttaatttaaagaggtattaatttatcgataaattaataattattaattgatagagatattttacaaatttttgtaatttcttacaaaatttgatttaaaaaataggtttttctatataatcaataatctttttaaaatcaattacaagtataaaaccattattaggtttaaaacaaaataaactttttgtacttggtaaaaatattagatcggaactctacaaaaaattaatttaaattgtataaaagaaatactagagtcatattttactaaatttttacataatatatattcataaatataaatatatatattcataaatttatacaattattaatttataatattgatgggaccatatatttacataagattttcaaaaaaagttactatcttattaatttatcaatttgtatcaatttttacactggtcccaactcggaatcggaagaatttattaatttatagaaattattaatttatctagtattaatttatagagactgtacttgtttccatcattagcacaaatgctacttcctcctcttgaagttcttcgaacagttgagacttatttattaagagtacaggtttcgtctcttccaaagacacagatttcttctcaatatcttgacttgtaaccaatggctcagaacacttttgagattgcaataacgtaaggcgttttccttcgtatgaaaaactatgtgtgtttgtgatatgtctataatttgcatgatttaggcattcattcttcaccactttgtcattgtttcatccataaatcatctcattaggagtcgttttagtgtgttttacatacttaggacgattttgcattaggattgcatgtgcatggcatatttggttgttttcaggtattttggatgcttttggagttcaaacagaggaaaaacagaatatgaagtcggaatgcccaatgacgccttcagcaaaagtactctatcgcagcctcggagccctgccagggcaaatcactctatcgcaaccccggagaagcaagcagctcagtttcactcaatcgcgaagccggaggaatcaccccatcagaaccactcgatcaccactcgaccaccaagaagcctatctgctctttctgcactcaaccagacaagctgagaacaaagaatagaagagaagccgaagaagccactcgatcaccacctcatgacatccactcgatcgcactcgatcacaggatcgctggaccattcaatctcgacttcactgcatcttagtcgattgcaagacggagcccctaaagcccagtttgatcaatgacatactcgatcactaggaagctcatttcagcccgtcagatgccaatgacatattcggtcgcaggatcatgacgtgaagattcgctatatatttagtttccttatttgtttcatttctcgcttatataaactgcctcttagggttttccctagggcatccgttattatctcgcttttacattttcgcaactttcatagccgcaatgtttctcctgcgactttgtattttcactttcaagtatttgatattaagttttcgtttaagtctttcgtcatttctgttatcatgttttcaatcgttgctttgctattgtctttgattatgtctgagtagtgaactgtatttctgaggatgggatagaatagttgtggtttacttggtcgttttaggttgttgagtttagaatactagaatcccttctggattagttgcgcttattgcttgtttcactggctaatgtggagtatgagtccagacgtccagcgctcataaggcgtttaagcgttgaatcctattaattccagagatatctgactctaccccaagggattggctgtagagagggtattgactttaacatgttgattcgataatgcctgcttagttagagatcgctaaagggatttaggtcagtgtctagctttgcttgaggatttctatcacgggagtgaattaatctgttgttgaacttgttgtctagggatagcttctgtgaagttttctcaaccgcctgaatagattaagtagaccacactattcgattatcccatccttaggaatcgtttatccatttgattgcctgttatcatttctgctttgtcattcacttgcctgctattgccatttctgcttttagtttcatttcatttctgttattgcatactaggaatgttagaaccaaccaactttcttcttggcttgacttagagttttctgatcatatctcatctgtttgcatcacaccggattggattgacatcctaaaatagtacaacgacaagatagtgttttagggattaattgagtaaaatcctactatcaatttggcgccgtagccaatttagggtttgtttgctatatttgagatcattagaaacgttaagatcaagttcgtttttgttacacaagttactaacattgtgccttttctgtctttgtgtttcaggtaccttgcaacctgctttacagaagtatctctgattcgtctattatatcccggctgctatctgttgcatgcatacacggtcacaaggaaatctgaacctcctattcaacgataacatcgacagtattgctcgccaacaaagagaacacacagaaaccgacacaatggctgacgttgtagatgagcaagagcaacctaccaacattggtgctggtgacttccctcacaaccacaaccagcgtcatggaattgttccacctccagtacagaataataactttgagatcaaaagcggtctcattgccatggttcaggggaacaagtttcatggcctaccaatggaggatccgctagatcatcttgacaagtttgaaaggctctgtggccatactaaaatcaatggagttagtgaagatggtttcaagcttcgcttgtttccattttcacttggagataaagcctatatgtgggaaaagacgctaccccagggatcaatcacgacctgggatgactgcaaaaaggccttcttggcaaaattattctcgaactccaggactgcaagactccagaacgagatatccggattcactcagaagcaaaacgaaagcttctgtgaagcttgggagcgctttaagggttatcaaaccaaatgccctcatcacggatttaaggaaacttctcttctcagacactttacagaggcgtcctacctaagatacgtatgctccttgacaccgcctccaacgggaatttcttgaacaaggatatcgaagacggatgggagctagttgaaaactaggctcagtcagatggcaattacaacgaggattatgacaaaagcatccacaccagtactgaatctgatgacaagcaccgccgagagattaaagctctccatgacaaaatcgacaaactcctccaagtgcagcagaagcatgttcacttcgcctctgaagacgaagtattcgaaattcaagagggggagaatgatcagagcgctaaaatcaattatgttcagaaccaaggcggctacaacaaagggtacaacaattacagacccaacccaaatctgtcatacagaagcacaaatgtcgccaatcctcaggaccaagtttaccctcaacagtagcagcaaaaccaacccaaaccgtttgttacttacaaccacagccaagggttcgttcctaagaagcagttccaaggagggtatcaactacaacagccaccacctggtttcacaccacaacaacatcaggcctctgcaccccaggaatcagacatcaagaatatgctccaacagatcatgcaaggccaagccgcaggggtaatggaatccgcaaagaagctggctgacttaaacaacaaatttgacagacagttcaatgaactgagtagcaggttggaatcattgaacacaagggtacgatatctggacggcattactacttccccacctgttacaaacaacccatgccagcttccaggaaaagcaatccagaaccctaaggagtatgccactgcacacgcaatcactatcagacatgagcgagagctgccaactcgacatgtctctacatcaaacactgaggacagtgtaattcaagaaggggacgcttccactcagattgaagtctctgttgctgagatcggctattcagctcaacctttctatcaggctcagtctgacttggaggagaaggctgctataatcgagaggatggtaaaacgattaaagccagatccatcaccctcacttgctcttccatggacgttcaggaaagcttggaaaagtagatatgaatctctggcagaaaaacaacttgatgagatggaagctgtgatgcccttagtagaagtcctcaagttgatttcagaccctcacaaagatgtgagaaacctgatactggaaaggctcaacatatatcaggattcagatgacgaagacgatgtcattatgcatcaagccgctggtgagaggattattcaagagaagctggaagatcctggatctttcactctgccatgttccattaggcaattgactttcagcaattggctatgtgatctaggagcctcagtcagtttaatgccactctttgtggcaaggaagctgggattcgttcagtacaagccctgtgacatcaccttgatccttgctaatagaacttcaaggagacctttcagcattctagagaacgtgccagtaatggtagatggagttgaggtacccattgattttgtcgtgcttgaaatggatgaagagtctaaggatcctctaatcttaggaagacctttcttagcctcagtgggagcagtaatagatgtcagatatggtaagattgatctcaaccttgggaggcatgtcaagttacagtttgacatcaacaaatttccgacaaggtcaccaacataaggaaaaaccttagagatccagagagcggttccaagtgaaggctttgagatcaaaagagggaaagagcaaatttcggttcaaactccgccatcgaactcgactactcgatcgagtataccctcctcacttgattggctggaactcaaaaggaagactgatttccagaacagaaccattaagaagctgagctacactgttgaaaagcttagagacaaactaagtcgaatgcaaaaggaggttcaaccccagctcaaacatgacaagatttcaagaaaggagatcacctgggattggttagaagaggaagactatcctccagaggaggaagcagcctactatgaggaaagaagaattgaatactcagctgtgcaactgtcaagggaggatgctgagtatgatgatgatatcagtgaagaggaggacttctcaagctccctctgtcacattttctccacttgattagtgtgaggagtcaagctagagactctaaacaagctcacttgggaggaagtcccacgactatccctgtatatactttttatttatttgttacttttgattcgttttggttgtgtctttgattctcaggaaatgaataacagctggagtgatcaacaaggatgtgatcgagtgttaaaatgaaaattttacaaaaaaaatttcaaatactcgatcacaacataggagtgaaagctcaggagtacgatctagcagtttcgagataacaattttctactagatcgcaaggaggagtgaaagtgtccacagaacgtcaatgacaaacctcagtcccattaagtctactggatttcaacctccaccaaaactccaaaaagcccatgctgtgtccacttgtagcccatgacacggaattaaaggatcaacagcccatactcgatcacaaggcgcgtgacttgaaggaccccatcctgccgacataaagcaccatgctttgtcaccttatcactttgctgacatcataacgggcatttcatcccatccgtctgtttaaaagcaacacacctcttccactcattcaaatcggaaagggagataagtgtcactacccttcacttttcttcatcacttgtgatttcaaaacatctctcttgtttatctctctacttcactaccaaaaacgctctcaactctttcgttgttgctagctgttattgattagaacagaacctcagaaactactctatcgcaaccctgtctctcatttgcttgcttcactcgatcgcgacctgagctctcactatcaaattctactcgatcgcaactctatatcaataggaagtcatttctttcattgtctttgtttgtttctcactaacctactgagctttagttgtgagtttcaaatcgatttcagcttcaagatgagttcacacagctacgaatcatctatggatgccgactactatgttgatgatgctgaatcttggtcaactaggcccgagagagaagcagaggagtataggcgatttgtggaggaaacagagcgagcaatcgccaatgacaggagaagagaagcgatagccagagggaagaggtcaatgacggaaaattatgagctaattgatgaagagatggaagatgatgcggagtacattccggagcaaacccgcaagaccaccaagtccctaatgaaagaagacaagctgaccccgggagactactacaaggctctcaaaagaaattcgttttggggaacaagatatcctcacccggagacaatgatggagttacgcatcctggaagacgttcagctcttgttcgagaaatgccacatgacaacactcatgtctcatccctatcctacctatgaggatgagacacttcaattcctttcatcacttcaagtggaattatttgaggggttgtcagctagtgagttaagagaagaagggcttggttacttaagcttcaccaacgacgaccgcgactatatcatggtgatcaagacgctagaatccatgttcgggtttcccaatggcacgggaacgaaaccgaggtttgcccgagaagagttaaaatctttgtggaacacgattggagataccaccagcttcaactccgctagatccaagagcaactccatccgcaatcccgccattcgctatttccagagagccatggccaatgtcccttacgctagggaaatatccgctactgtgacgaaccaagacatggagacgttagacgtggcgctgctaagtttcctccgttacaccaaggacgggaaaacgatgaagggagataccaatgacacacctccgtcaatgtatcttctcaatcacttatgcagctacagagggtgggcgatggccaatgacaagaagaacgcgaaaggagccctttgccttggaggagtggtcacaccaatcctcctatcgtgcgacgtcccgctgcgaccggatccaatccaaccacgttggatggatatcgcccatctcaagcttgcccatgtgatcgagcataaggtctatgacaggaggtactctttcaagtttgatcacccgtcaacaggcgaagcaactattcttctcccattcagtgaaatgacaaccaccacggtgagagacaacatcgacttctcgccaccacaagaaatcctccatgttgtgattggaggatccgcgtcccggaatgttgaagaagtagaaggtcagagtgacaatgaggagaccaattgggagaactatgacacgagccgctaccactttgaagaacataagcccccttcacgagaaagcaagagtctcgctgaagcacatcggaagctcagtctaacccaaaggtgaggcaagtttcaagacaagatcatccataagtgtgtcaaggccattgacaacatgcagaaggcaatcagttgcaccacatccactagtgcgatcaccagagacaacccgctagaagacatgccatccaggcgtcatgacattgccccgccaaggcaatctgcttatcaacagagagaacgcgctgtcccgcaagaacccgcacgacactcgtcttacgaggtcagggagcacaagaggcggaagagcgctaggatggtccgatcatcaagcaagagtcggataatgtcggatcagagaacacatgagcgtcgtgctccacaacctgttggggttgcgatcgagcacaatgacgaggagatggcggagccacaccaagaaccggtcatgcctgctgagtacgctcaagcagatatggatgactacatctccaggacattctactgaggtaacacaccaaaaccctttgtaaataccgcttttgtttttgtttctgtgtttatcttgaattctttcacaaattttgattacacaagggactgtgtaatttaagtttgggggagggttcaagacgtatttgacttgttttttgtgaatatcatttgagtctgcatatcatctaagtcatagaaaaaaacaaaaaaaattttgaaattttttgaaaatgaattccacaaaaacagagtgatcatttagttgcattacatttagaatcgagtatagagtgtttcatataggattgttgcatatgcataggggataatgaggaaatagccttgtaagcatgatgattcactaaaatgagttattagttctttgaggcatttgaatgactttgaagtaaaaccgcaccatgttctatagaaaccactcgatgcatgtcatgacacctttccctgtcaatttgaacttgaatctgacttataattatcatgtttgcatcatttttgaactcgtggatagaatacatagttggattttctttcacttattcaccactcttattaatccaagtagctgcttctattattggagtagttcccccacccttaaccaacccttctttcaagccatgttattttatgagagcatgtgaggcctattttcaggattgagcttggtagaacgtgttaggtttgagccgacaagagtagtatctcatgtagttccaatccgcgttttcggacttggtaggaataggtgggaacttatttggggattgggattgagtgagaaaagaaaaaaaaatgaaaaaatgggttagagtctttaggagaaggaagctgaaaatcatattgtggtctaatgaatgtttgggaagcatagaattgttaagatatgctctaaaaaaaatagatggcaacaaaaacagaaaaagaaaaaaaatgataagagccataagagtttaagaaaaacccaattcactagactagactcatagagtttaagaaaagcttctccttaagaacaagagccaaagaaaagaaaaggaaatattgatccaagaaaaaatcgaaatatgcctttagtgcaaaagggtagacttaggatcatcattgggtttagagataggaccatctacttgttattcacggtttatgtcattgggtagatggggtgctattcttgtatgcatatgttggcacttacctttagcattcttctaaagctcagtcctttttcattgagagtccccagctattaaaatctgaaccactaaaaagggaccatctttgtctcataacctgtcattagccaaatgagttcactagcgatgcatatcttgattcatgtttttgaacttaatgaatgttaaagggattggttgatcttgacgcattatgcatttgagtgtaggtttggatcacaacagagcatggctaaagtttttaagtagaagtcgatcacctcgcatcttagaactgttagctgaaacattgatcttaattgtcatatctcatgctttggttctgaatctccaacttcaaacctctccttccgcttatgtcttcttgtttgcttgagggcaagtaaagactaagtttgggggagttgatatgtctataatatgcatgatttaggcattcattcttcaccactttgtcattgtttcatccacaaatcatctcattaggagtcgttttagtgtgttttacatacttaggacgattttgcattaggattgcatgtgcatggcatatttggttgttttcaggtactttggatgcttttggagttcaaacagaagaaaaacagaacatgaagtcggaatgcccaatgacgccttcagcaaaagtactctatcgcagcctcggaaccctgccagggcaaatcactctatcgcaaccccggagaagcaagcagctcagttttactcaatcgcaaagccggaggaatcaccccatcagaaccactcgatcaccactcgaccaccaagaagcctatctgctcgttctgcactcaaccagacaagttgagaacaaagaagagaagagaagccgaagaaaccactcgatcacaacctcatgacagccactcgatcgcactcgatcacagggtcgctggaccattcaatctcgacttcactgcatctcactcgatcgcaagacggagcccctaaagcccagtttgatcaatgacatactcgatcactaagaagctcatttcagcccgtcagatgccaatgacacattcggtcgcaggatcatgacgtgaagattcgctatatatttagtttccttatttgtttcatttctcgcttatataaactgcctcttagggttttctctagggcatccgttattatctcgcttttacatttccgcaactttcatagccgcagtgtttcctctgcgactttgtattttcactttcaagtatttgatattcagttttcgtttaagtctttcgtcatttctgttatcatgttttcaatcgttgctttgctattgtctttgattatgtcagagttgtgaacagtatttctgaggatgggatagaatagttgtggtttacttggtcgttttaggttgttgagtttagaatactagaatcccttctggattagttgcgcttattgcttgtttcactagctaatgtggagtatgagtccagacgtccaacgctcataaggcgtttaatgggcgttggatcctattaattccagagatatctgactttaccccaagggattggctgtagagagggtattgactttaacatgttgattcgataatgtctgcttagttagagatcggtaaagggatttaggtcagtgtctagctttgcttgaggatttctatcacggaagtgaattaatctgttgttgaacttgttgtctagggatagcttctgtgaagttttgtcaaccgcctgaatagattaagtagaccacactattcgattaccccatccttaggaatcgtttatccatttgattgcctgttatcatttctgctttgtcattcacttgcctgctattgccatttctgcttttagtttcatttcaattctgttattgcagactaggactgttagaaccaaccaactttctacttggcttgacttagagttttctgatcatatcttatctgtttgcatcacaccggattggattgacatcctaaaatactacaacgacaagatagtgttttagggattaattgagtaaaatcctactatcagtttgcaaagccatcatgcataattcgtcgatcatactgccaaggacgacctaatagcagatgataagcatccattggaagaacatcacatcacaccaaatctttataattcagaccaatagaaaacgggacacgacaacgcttcgagaaataagaatttgttgatgaattaagccaagctaagcgatatggtgttggatgagactccgtgaacaaggccaatttagtaactgcttcttgagaaatcacatttgtgcaactccctgaatctatgatcatgcgacaaactttacctcttatggtgcaagtggattgaaagatattcgttctcagccatgattcttctacaccacgcggtaagagatgattccaacgcaacattaacattggacctgaatccccatcaagttcctctgtaacttcctctgtttcatcttcttcttgttcatacacgtcgtataccggttcatctttagccataaggccacgacgagctggattaggacaagctgattgcctatgtccttggtctccacatttaaagcacttgaaattagctgatctctgctgtcccattgttgtggtattctctggaatttcagaaattcgcacttgatccaatggttggctagttcctgtgtccgttgctgacgaaagacgattgcgagatggattcgaagacgtgttctgatttctagcactttgttcaattaacaatgcacgttgatgagcttcagagagagttatggggttgaactgcagcaaggtgttttgaatctgagttcgcaaaccaccaatgaatctcgacaccaattgttcttcagtttatgtcaaagaattccttgccactaaggaaaaaaattcagacgcatactcatccacacttttagtgccctgtctcaagttttgaagacgagtatacattgtacgctcataattgtatggaagaaaagctctacgcatgaactttttcatattttcccacgaggtgatgctatctttacctgcccgaaaacgtgttgctttggtctgttgccaccaagctgaagctcttccacgtaaacgagtagcaactaagggcacacacatcgcatccggtactgatttaaacgccaatagctcctctgtcatacttaaccaatccaaaaaatcttcaggtcgtaatccactagaaaattcaggtaactccaacttaaattcagactcccatcgattagcatcattatgcccagctggcacaatctctcgatgttgatcattaacacgttgttgctgcctccccaaacgtgcaaacgggttgagatcatcgacatcttcttcctcctcttcttcttcctcgaagatttgttcttcccgtcgcggtacaccctgaactccacgctgagcttggagaactgtctggactgcggctgcaacaacgacacttaagtttgcttgaaaattttgttgcatctcagccatcattcgtcgaaactcctcattgtgttcatcgagctgtgcttgaagactcttcttcggtggcatgatgaaggatcatttgtctctgataccaactaatgtagggaaatatacgattgaaagctcttgtatcaatggatcaagagtattcgttcgtagctcggatctctcgctttcttaagtatctatggatcaaaagatagaagaactcaaagacttcagatgaaaaaagcttctcttttataaaacgaaaacaaccaagttataagcttacaagaataagagtatttatactctcctaaaaacgaaaaccctagatgacgaaagcttgtcgactaagcaacactaaaccgtcattcaaaacaaagaaagcccaacgagagtattatgaaaacttaaaaggaaaaacccaataaagagatagatggatgattacgctacatcagttagggcttaaaacaagtatttatacttgagggccaagaaataggtttaggggtaagaacgacaatccgcgaggtgaataagtgatcgggccgagtcgtgggcttaagggaaggtgcctaatgacggtggcacaaagagggaaggacttgggcgtgacctactggtcgttgataggcttctcggagctgcccgggttcaagtctccttggccggatgctttctggattcattatttccaaacggccgattcttgacatgttttcactcttcgggtaatatcttctaaacggcttcatggatagcttcggttcgacttcaacgttaatcttgaatcttctagctttccatgcataccgaaatatctcgctgccgtgatggggaaaacctcgaaaggatgctaaacttctaaagtactggaattgatcgccttttgatacttttagcttcacaactcttaaaaaccttcttggcacctagaatacgtgtttctacttttcttggctctagaatggcaccaaatgctctctgaaacataagaaaacaatagctaaaacgggctaaaaagccgtgttatcaatattctcttgtgttgtagctgcatgtgcataaaatggttatgaaggataatgtaagcgagctgtttcatacttggccagatgaagtaaaagacccaacacttgatcacttgatcgaagacatacatgaggattagtttgttagaggttattgggatgtgaagaagaatgagaagaagaagaaaagcgtaaaagataaagcagcggctgtaacgcccccgaatcgctctatggccgaacaagataagggcaacctagaaacactacattgatagctcacacagacaacccaatttaggttccaaatagatttagacccttagcaggattacccacatgaaccatctctcacgaacgcggtttaggcttttcaacccttgccatgatcgtgagttgtgttagcccggacaagactaatatcgaatgaaacactctttatacaaaaataatcttttaaaacatataaattctcgtacaaccaagtatccaaaacttttttacaatggcgcctcgagcctatacgctcaaatccaacaagaaccaaaatcattaagttttgcaaaagcaacaaactctatacggcctttcctacgtcatgagcatccctctaatggttcccacgagggttttctacaaaacaaaaatggtgtgataagttatctaagattacttagtgagctcagtctacctacaatagatattagttccccatcccgaaacacgcaacagagaataacaacaaaatgtagattgccaaagcacctaccaaatacatgcacatgcaattaagactccagttttattaagttttatagggtctgatatgctgccttcaaacacccccacaccaaaaacacaaactcccgggatctcccgctttacaaccacaaaggcatgtagacaactcggccagggtagctagccccgtctctccgagcccttcgcactacatggcgatcaagtaacatcattacaagaccccacgatagcacggttcattaacgaagtcagacataccatgatcttgatacgcttatggtttctgtctcctaccacgagcaccacacatcaagacccaatatttcaagatattatgagacatatggttactcaaacacatagaatcatcaatatccttacttaccacaacctcccaaccataagccttaagcataagaaactaaaagatctcatatgcggcttactaccatcattcacaccattaagcaatactcatataattcatgaaataaatcaatgaatacaagagtatatatgatcatgcaacaaacaagtaatcaatcacccaaataaacactcaaacctatcatgtgccatatcacacgcttcgagactcatagagattcggctgaaggtttaaggttagcttcaacgattcttggtcgcggacagggatttctcatttacaaacaggttctcttgatcacaaacatgaattccttagttgggggcaaaggatcttcatcacgggcaaagtttctcaatcgcgggaagttttttctcggttataggtgatcacttaacaacttggcagccttttgtttccctctctttttcctctcaaaattatttgggtcgagttgtgtttatataggggcgacaagggtgagtcagcatatacacgtgtcattcgcaagggcgagtcagcagtccacgtgtcatccgcctatgatgacacgctcgccgccttaacggttgggcgacacgtggcagcaaaactttggctccacgcaactcaaattcggctccaagcaactttgcttgagccccaagttagccggtccatgcgtccatggcgtggtcaaagggcggttaacgcccggcagggcaacttcgcctacgacacgcccgtgttgccgaatcttgcccattcttgcccacctttgcccattcttgctcaaatagttatttgttttgccctttgattgtttatcagcttttgggcacatatggtcaatcaaccatgtattcgaggcaactttctcccgttttggctttgccccggatgatcctatttcgaactagactcggcatgttcattttttccttgcccatctctttggcttttgtcccttaactattcttttctcttctggttcttcctcgatcattcctagatgtttcccacgtggccgcttacccctctacgagggtcactacaacggatgtgtttgaatctccctctaagaagcagaaagtctctcacagtgaggtgttcaatctggtggaggaaatgcacaaaagaagaagaagaagaagaagaagatagtagatggttaatctgatgaggacgaggacgaggaggatgttcgggaagacgtgtcgttcgtggatgtggtgtctaaattaatctctcccttaaactcaaggtttgacactgttgatacaagcatcaaagaaatttcctcctgtctggaggtgattggagatcaagtagaaccgaggatggatgcaaagtttgaaaagcaggtttggatctattgagaatgaggtcaaacagatgaaatagcatcttaaggccattgggggaggccttagtggccaaactggcaaagcggacttagaattattctctagagtcaaaattagagatatgtttttaacagctgaggagcaagaaatgattcgacccaaaaaaaaaaaaaaaaaaaaaggtccacggaaatctccaaataactactctgttactaatcctcttccggtaagctaactgctgagttatcaatacgctatttacttacaattgagttataatcatgttatggttgagttatcgttatgttattaagttacgactgagttacatttatgtttttcggttgggttgtctttacctactttacttttgggtaagttataactttttatttagttacggctgagttatcgttatgttatacggctgagttgtctttatcttacttacttttggctgagttaacattatcttatttagttacgacagagttatcgttatacatatgactgagttatctaatatatccctatttttaccggttttaactatgttttaggtatatgttttagagtctatttgttatttctagagtcttttctagtccttttcaggtctttacacgtttgtgattcatttggagataatagagaattctggaggaaaacagagaacttatgctgtagaagaaattcggagactaaaaatcgaacgactgcacccctggtgtctagtgaaccaatacctgacggcatttcgaagacgcaacttattgaagttttgaagatttccaattttggcccagaactttctcttatttttatagaaggcacatcacgttttaggtcatatatatatagtttttaaggtcattgtttagacctaagtgatataaccctatttttaccggttttaactatgttttaggtatatgttttagagtctatttgttatttctagagtcttttctagtatttttcaggtctttacatgtttgagattcatttggagataatggagcattctggaggaaaacagagattttatgctgcagaaaaaatcctaagactaaaaagcgcgtaggtgtcaaaacaccacccttggtgtcgagcgatacccatacctaacggcaattcgaagacgcaacttattgaagttttgaagatttccaaattcggcccaaaacttttccttatttctaaagaagacccatcacatttttaggtcatatatatatatatatatattaaaggtcattgtttagacctaatttatgttttgttttgagatacacttttggaaagaagaatccaatccctatagagaggattctgaactccttttactcttcttcttattattcaatgcaaactattcagactttgatgtgtgttactttaatcatgtatgagtaatcactttgttgggtttagggagtctcaatagggatttagatggattagtagatcgaaaaccccttaggattattcttagagttcttcatcttgattgttcttactgctagttttagattgatcacctagaacttgatattagataataggtatacccgccataggtacttgttatcagaactatcatatatgagcctaagtatttaagaaagaacaagtaggctcatagaaaggctctggtttagatacttaggtgaactaatcaaacttgataataatgcatgctttagcataggatttctcggcttctctggtgatcttagctctaggcatagagagtttcgcggaacgccaccggttattcttaaatcatagtttgagttcgagaacggtgcgataagaatcttaatattagctagatctacaatttatctttttcccaaacaattccttagacctgatcgatgctttaatctcctgaatctacaactcaatttatttgctttactgtcttttactttattctattttgtctagcttaatttaaatcatcataggtctattgtgtgaacatagagagctcagtggaattcgacccttaagtgctaacgactatctcttatttgagggaataagcttcaggcaatttgagatatatcactaagctttgagaggctaatctccttatctcttttgtacttgggagtaaaccctctagagactccctttagagaagatctttcttactctttctcttgttattttcattattgatttcttattcagactatgatttgtgttcctttgatcatgtttgtgtagctttcttgttaggttcggtgtttctcattagggatttagatgatttagtagattgtccccttgctaggttatctgttaggattcttcatctttagttcttcttaatgctagttctagagtagctaactagaatttgataccagataatagatatacacgtcataggtatctgttatcagatctagtatttgattagcctggtctataggtgtgtaataagaattggcctatttagtaaggtgaactttattgaactcgtttataatgcatgcttaagtataagatttctcggcttctctggttattcttagctgtaggcatagggagtttcgcggaacgccactggtcattccacaattatagtttgagtttaagaacggtttggtaataacctagctatcactagatctactaatcatctatttatgagaataccctaagtctgactcttttcccatttgatttacatcttgatatttattgcttttctttgtttcttattttataatctattactttagcttaattcgatatccatagtctattgtgtgatccgagagcttagtgaaattcgacccttaagtactgcaatcgatctcttaattggagagtggtcttaaggcaatttgacctacatctaatttggcgtcgttgccgaagttctctacgattcaccattagattagtattagaattttgtctaagcttttgtttttgtttttctttttagttacttacattttctcttttctttttcttgtgtgttccaggtgtttgtctaatcacagaaccagaattaagcgagaaacatgaacgagagtaggattgccgggttaatggctaagattgacgatgtccacaatctacttgttgaggatgtcaattattttggtggaagatgtttctatgggaatggtccgactaccactcataagtctcagttccagcaatcgtgttagagtagaagtagaatcagctttacaaagaactacgatcttgcttcttaccaagccccccctccacccgcacaaagaagcaagatagaatcaatgctggaacagattctggaaggtcaaaagaggatgttagagagaccaatccctagatggaatgagagtagcctcactacttcttggcatgctgcttcgatggaaagtggatatgagttcgtgaaggttgaggagagtgacaaatttgacgttgcagaggcagtgtcgaccgacaccatcccttggtgttgatcgacaccatcacatatatacgagacatcaggctgtgatgaagcaaaattgattaggctcgacattgatctccagaatcgctcgacacacattgatagtattgaccgacaccaacctgaggaagtgtcgacgtttgacagagcataattgaccgagattgagagagcatgatcgataccagatagtagtgtcgactgacactcacctagtgtcgatcaacactggacgcaaactgcaccaatcagccttgactttccacttgttgctgaactagtctacacacctgaaattccttgtccattgcctcaacagtatatgcaagagattcaggaggaacactgcaaggttccacagcatcgggagaacaacaggaagaaaaatattgttcaaaatagattgtagcgctgaattgtcaacatgctaaggaaagttaagttgtagcacgagtgtcgatcaacaacaccactcgcgtcgatcaacacacattactcgttgaagcatagtcatcaccaagaggtacttttaagctgggatcactgctataagtccaggcactgctgtcacgtcacccactgcacctgtcatacttcatccacctcctaaacggccaaggtactcatctcctcctccttaacctccagatgtcatcaataagagtttaaaatttccaaaaactgttttacggttaagcaagccacgagtttctcgtcaagcgcttgttcgttattttgatgattgtgtatgagaaaggagtattccaaccatacctgagtcccaccctgttgatgctcctctcttcctagatagacctcatgtgctaactgcttatacgccagcatggatgatgagaggtctttctccgcaatatttactgccaccttttgatccacctgatcccatactccatcaaagtcaagctattgactataaacaagcgcttagtgggaagcaacccactgatattattttctttttcttttcctttttttttatttttttatttttctcgcttactcttgatttgaatgccactagagatagtaacgtttaagtttgggggaggcagttactaactacgtttttcgtttttgagtcttattcttactcttatttttcttatttttgagtcgttttattgagtcaaaattttgttaggaattatgatctctattctttagattattgcttggttgattaatgctgtaggttcgactcaatccaacttttggaaaatctaaatggcaaaccaacaaacttgagaatccattaaggctggagctaatctcactgctctgccttttacctcatcaaattggttagtgttcatagaacttgactccttgttcatacatgatattgagacctatgtgaaaaagaaaagtattcctctccccttataaaaaaaagaaaaaaagaaagcaagagattgatatgattttcggtagtgtacaggggtaggaatgtttcccatgacccattattatacattattaggaatgatcaattacaaaggttagaaatatgccgagggtgtcaatccagtatgcgagctcccctttgtttactctttaaaaagaataagtctgggggagagaaagaacaccaaaataaaataaaatataaagagtggtcaatttatcatggtatagtacaagaatgagtctagaaggttcttgaatattagcttgcttgatgagacccagcgatgaaagcctggtggatatagttgtggaacttaggtatggaatctagaatgttgtgtatgcttgcagagaagtacatgttggtaaggatttgattagaactgctacgcatatggatttggttaaaatgatcatggcaatagactagagaatattgggagttcttttgttttcaaacctcttccacgggttcggcttttgtgttttgctttagggcaagcaaaaggtaagtttgggggagttgatatatccctatttttaccggttttaactatgttttaggtataagttttaaagtctatttgttatttttaaagtcttttttagtcattttcaggtctttacacgtttgggattcaattgcacataatggagcattctggaggaaaacagagaacttatgctatgctgcagaagaaatctggagactaaaaatcgcgtaggtgtcgaacgacaccaccccttgtgtcgagcgacaccaatacctgatggcaattcgaagacgtaacttattgaaattttgaagatttctaaattcggcctagaactttcccttatttttaaagaaggcccatcacgtgttaggtcatatatatatatatatagtttttaaggttattgtttagacctaagcttggagaggataatctccttatgtcttttgtacttgggagcaaaaccctgtggagactccctttagagaagatctttcttactctttctcttgttattttcattattgatttcttattcagactataatttgtgttcctttgatcatgttgtagctttcttgttaggtttagcgtttctcattagggatttagatgatttagtagattgcccccttgctaggttatctgttaggattcttcatctttagttgttcttaatgctagttctaggtataagatttcttggcttctctggttattcttagctctgggcatagggagttttgcggaatgctaccggtcattccacaattagagtttgagtttaagaacggttcaataacaacctagctatcactagctctactaatcatctattttatgagaataccctaagcttgactcttttcccatctgatttacatcttgatatttattgcttttctttgtttcttattttataatctattgctttagcttaatttgatatccatcgtctattgtgtgacctgagagctttgtggaattcgacccttaagtactggaatcaatctcttatttgagatagtggtcttaaggcaatttgacctacatcattatcgttattttacgcttgagttatctttacgtttatgcaagcgaaggaagttgtagatttggtggtagagaaagatgctggtattgttggggtcagtaggaatcttgatggcaaatttgttcagaccactgatgtcaaccaagctaacattgatttcattgagacatctcctggtgcccggactttacgcgctttgacgaagacgaggagaaattccaaagcgaaggcagattcaaagaagtaagctttcgttaaagagaaaaccgcaaatgagcctaccgtcaaagagccagccgccaaaaagaaaagaggaagaaaggcagcggcgcttcctcctgctccactcacaaaggtgcctacgaagatgaagatagaagatgttgcttctgtccccaatagagttgaggaagtcattgaaaatgctgacaagattgacggtgagaaggtagatgatgatgattctatatttgatatcatagaccagttactagctgaagacaatcgcatgctacatgagtctgatgaagatgtggaggaaaccatgaggcatgggagagtaaaagctaagaggagagaaacagttaagctggccccaaatgggagttcattaatttccagtcgataatttgaccacaaagacttttccatttatcggagacaatggactgagctgcatgaggaagggttgtgtgccttcaggaggaatctatgatcctatgacactggttgatccggccaaattgcagaaacttaaggattatttgttaagctccaacaagtatgttcctttatactttattaagttgttaagtacggcatgcttacactatttgtgtatattataactttttattatttgttagggatatcccgctggacagtggagaagacgatgttgacttctacggagttatcatgaccgaaagaaaggactggccagaccgaaaatatggattgttgtccgatagtgtaagttattgttatattctgtttgagttttttatactttatggctgagttatcgtgttgtttaggctgtgtggtggtattgttttgtttgagttaaaataaattatggctggtttattctggtgtttaggcttagttgtacttggttattgttaagttatggtattgtactatttaagttaaagtaaattatggcttatttattctgatgtttaggctgagttgtacttggttatggctgagttattggtgtgttttgtctaagtagtttttattttttgtacagcaaatggctgcgtatctgaaagtcctcgccatgaggtacaagcgagatccctgcccataccacaaccaacgcgtcatgattctatacccgtggttcacgacttattgggtgactgagtacagagagttcaagatcaaaacgaagaagtttactttcaaaaacaccgcgtatgaattatgggttaacggtacgacagcagaagtcccgacatggatgaagtgggtaacagatgtggatcacttgtatttgatccaccaaattgggtgacgcttcacgtgaacttgcttaggtcgcacatcgattgctatgattgcatcgtcggagagcatacaccagaaagcgagttaaaaatactggaagcttgtaggtcgttaacgaggatgattccacagatgatgaacaaactggttccttccacagtccgtaaaccgaactacgaccaattttaatttcggcggaagaacaagaaactggtcccgcaaaacagagtagctagggattgcggcgttttcacgtgttagattcttgaatgtttattgcttggtgtaaattttgat

SEQ ID NO: 541 - DNA, 126087 bp, Arabidopsis thaliana
aagcttgtaggtcgttaacgaggatgattccacagatgatgaacaaactggttccttccacagtccgtaaaccgaactacgaccaattttaatttcggcggaagaacaagaaactggtcccgcaaaacagagtagctagggattgcggcgttttcacgtgttagattcttgaatgtttattgcttggtgtaaattttgatggcatttgtgatgcaaatatccaggctctacaggttaagatggcagcagagatctacgatgaggcaccggaaaggatgcttcacagtttgaagagacgtgattggccttttcgaacatatgtctgtgtttttggatttttgagcatgtgattgtactaaatattgacactttaggattgataatgctttatgtttgtatgaatctatgatgttgaatgtacgatgttcaaattataagttaaatcgatgtttgactgagtaattagaacgagatggctgacttctcaccgcacaattcgtgttatggctgagttattctaacggttaaggcatacttattgtagattaattcaatgtttggatgagttattagaatgtggtggttgacttatcatcgcacaaatcgtgttatggctgagttattataacgagttggcgggcgtatcgtagattaattcaatgtatggatgagttattagaacgtggtggctgacttatcatcccgcaaatcatgttatggctaagttattataatgagatggctgacttaattaaaataggcagtacaacgaagtccaattcaaaaacagacagtacaaggaagtccaattgaaaaaccaaatttagctaagctcacgaatacttgttcatgctctcatacttcttctctagcgtttcaaatttcttttccataagaaagatcttttctgcctgaccctcgacgtgcttcttggctgctaccaaatcctgcttcatctcattcttctcctcttttatcttgtcaaactcgtcacacaatggaacagcacaccacctcttgaaaccgcagtctcgaccgggacccttataaatcagacataaatcatagggatagaaaaataaaaataaaaaaagaatcataactcaaaagatgcttacatctgatatttcatacggacaactaaaataaagttttccgcttgtaataggatcacgagaagtggcaacgacaaccgctgcactacaaccacactcgatcggaacacccttatcacgcctcctgttttcgccgtacaccattctcatccttgtttccatacgatccagttcctacattaccaccatacaatagaaagatggctaacgatttgcactattcagaaggtcgagataaatacctcatttccttctgaaaccgatttctcatcaacactagagtcggcgaggacaagagatctctgcaccatcatcttgtcttcaactagtagggcactaaagcactaaatctatatagtcatttatgctaaaaagcactaatcaaacgacggcgtcgtgtattggtgaataaatgtagaagtggctgagttataaaagctttgtggctgagttacaaacatattaatattctttattatatcattatcgagattacaaaaagtgttttttatggggaacccccaacaataattgggtctattttcacacaaacacaccaacaattaataatcgaaataattcaaattagtaaaaaattaattcgtataactaaccttcaaatattcaaatttttttgtttggcggtagaatactaatacgcaaggccggtcctgactatttaggggccaaagcaaaaaaaaatatatttttaaaggttattataaactattttgaaatttgggggcctttttcttagaactaaatgttttagggggcctatttgcaaaacaattttgatataaatttaggaaaaaaatgggggccacatttcaaagtttcacttggctctcctcagggccggccctgctaatacgatacggccgagttatgacagaagatttcgtggtttgaccgagttatgagaaaacaaatgttattaataggctcatttgtgtactagcgttattgttggttctattaatgtcaagatcgataatatcaaaacagaataaactttttacactaagagtccattgacaatctatgttgatcaaacttgtaggaatggaagttaactagagcttaacaatgcatgggaaaggtgttggataaattatatagagtacaaacattagctagtttcatgatcactagttggaaaatgattataataagtgaattactagattataccaactaatggcttaagaaagcaacattcatcatttggccgagttataacagtcacatggcttagatatgtctacgttacggctgatttatacaggaagattttgtggtttggccgagttatgaaaaaaaacaaatgttattaataggcccatttgtatactagcattattattggttctattaatgtcaagatctgtaatatcaaaacagaataaattttgtacactaagagcccattgacaatctcatttgattaaacttctaggaatggaagttaactagagcttaacaatgcatgggtatggtgttggatcaattataaagagtacaaacattaactagtttcatgatcactagttggaaagtgattataataagtgtattaattgatagtaccaactaatggcttaagaaagaaacattcgtggtttggccgatttataacagtcacatggcttagatatgtctacgtgacggctgatttattacaaaatacagagaaagagtctccgttattgaccaaatacgacgtctccgttattgaccaaatacgacgtcgtttttgacataaacgaaagatccaatctaataaatccctaaaatcaaaccctaagcttgaaaattccaatttccttttcccgatttgagctcgatttcttcttatttttcttcttcgaattccccatctctagctaaagaaatgagtagtaattctgtgaattcgatttcaagtactcaatacgtaagccgttggggatgtgcgtttccatcaaagtgtcattgcggattagacgtggttatctatacatcgacgtcagtatagaaccctggaagaccatacttccgttgtcctacgggtaaagatgtaagtataattgattttgggttttatttgttttagttgataattggtttgtgattgaaaatgcaggaccatttgtttaaatgggccgaagatggtacatacgaagaggttgtagacagtttgccgaaattgtccaccattgacaatgagaacaacgcagccaaatccgaggttgcagtcgagatcgaagcgttacaagtgatggtgaaagaactgaaggaagaaggaataaggagcaaaagggaaaactagacatctaaattgatgatcaaactttgctttttgtgtcttggctttgttatcattttcattgttcttagtatcctaatgttccttaaaaacaaagaacagaggcttcttcttggcttctagagttgtgtctttttgtgtttatcttgcttctagagttgtgtctttttttcagtattagcttgtaatgaaatggtactgtggtttgggagtagttaatctaatgttatgtctgagttaggctaatattattgatgagttaatccaatgttatggctgagttaagctaatgttgtggctgagttaacctattgatatggtagagttaagctattcatatggttgagttaagttttagttacgcctgatttatgataaattttaacaagtgacaacaagtgattttatagagaagacgattaaaccattacattttaagttcataggaaagacaagtaagagatacaaaagcattaaagatatgaaaccgacatcatctgggccaaattcaataaacatgtcaaccaaatcattccaaactgttgtagtcatccactccagcttgtcgcaatcacgcgcccatccccgtttcaacgcacacatatgttaggttttatgagacaaagctcacaagagagagtagacaatcacttggtgattgaatctccctttaccaatacaaagggaacttgctctcaagagcaagagaccatcaatttgtgatagaatccacgcaattaaccaccaatatatccgaatataatagggagtaaatcatttatatgaaggaggaagcatctagtttgagtctaatccttgtctagtacaacaacacttgtagtttgtgtacttaagataaagaggatttagaatcagtaatctagatcttaagtactaaataaagaagagtttagagtgtatttaagagtgtgtatgacaagcaataggctgccttaaggcagccctaattcgtgtaacactatctctctacattgtaactcttttgttaaacacaagtaaagaagagagagctacacaaaatgatataaaagatgtctattgttcttgttgtttttacaatgagaaacaccgccttaacaagcaaagaggagagttcgaactctacacaaagacctaagagagaaagcttgaagagagagatggtgaaacccaagagtgaaagtgacatgtcctaacgtttatacacagatgtgacctcttgaattcaaacttgtttccctcttcttgtctaaaacgaatgggcatcttccttggcccttctttctttcttttgggtctcaacacacattcaagcccacctcttaaactctagccttggcattatgcacataaacatgtatgtacgggtttgagttgactttaccgtacagacagacagttttcttcttgaccgaggcttgatcttcttggtagacattgacttgatcttcacggctcttcccttggcttatttagctttccttagagccacaattcttgccttcattagcctttgatgaggaaatatttggccttgtccttatgacttcggccttgaggcctttctacttctcttctttattggaggtgtctcggcctcatcggcctctctctccatttcctcatacacactaataacatattgtctcggttcaacgttctacctaccaaattaaactgcgtctacaccgttagagtgtgccttgaatcccacgtgtaattacgctataaagatagaaaatagtaagaatttggtttatggtttattgactgtgctttaaatcaaagatcgatgcttaccatgaggggaaaaaaccatcgtcccttgacctcaacgggagtcaagcggtacgtcggccacgcatggtgaaagttgcattgaagtatctctacaatcgcgaccgagatttggtgattgtatctgaaccacgtaatagtggttttgtcaactcatgtacctaaaccagggtttagaactggaagattcacccgatcaggagcggtgagtatcgcttcaacatctttgagaaactgttaatgaaagaaacaacggccatgtcgttaggaagagaggatgagacatgtaatgatgtgatgaagaaacatatatatagagaaaaaagacaaggaaaggaatacgaaaaatgggaaaatggtcctaggttacggctgagtttggcgagaaactgtactgttacggattagttatgcgggaaagatagggaacggaatatgaaaggttgcgtctctaactgtttgacgggaaaattttataggttactgttgagtttgggggaaaatgtactattacagatgagttatgcgggaaatgtaacaatgttacggcttagttgtcaaaaattataaaaaggataagaaacggaatacgaaaggttgcgtctctaactgtttggcgggaaaatgtacttttatggctgagttacccgcattacggctgagttatcaatagttataatgctgacggttacattcgatttactaactaaccgatgttaattcggtttttattcaatggttacatccagccaaattaaaaaagtttcccttcctataaaaaattggctgctcccgtagactccccaaacctaaactctcacaaacagaagatctaaggttgccctaatcaaatctatttttttatttttcttcgaccctgaatttcaccatggtgtatttccacagtcttcacgagttgtctcctttctcaactagatggatgatttgtgatatggttcttagagtgtacataaagtttttcagtggaaacacattcgaactacgggtcgtctttgtcaatgaatcggtaaaacaatattcactcttcttacaagttatatttaaccttattcttattccctatataactcaccctccgatgttgttttcatagagaacacaaattgaggctacattttacttctcccttttacttctatatgctccaagagaatcaaaggaaatcaatctccacttttcgtgtaagtccaaactttgaaccaatcaaagcaacaccccaccattatgagattgagttcatggaagaaacattggtcacatgttcatacccaaggaaagctgtattacttaacaggttcacaccttttgactacattgttgaagacactgttcttacagatactttggtcggtaagtaatacgtcgctattctttgtttggccttttacttttgacatgcatgttttaaacttttatttcatactcccaaattttcttggtgcatgataagcaggtttttcaggtctgcttatatgctgaatgctgtgttcagttcaattcctctaaaacacaaacatgtcgatgcagttatacagggtgtcaatctagtccactgtattgctagcaatcaagatgtgtacaaaaactactaagtcaagccagattataaagatggtgggtttctagtaacaatcctaggtcaggattcaaacaagtaaaaatgagaacttaacagccctactcgatcattgggacgagtagaaccaaaattaagaactaaaatgcaatcaacatgggatgcaaatagaggatacaaataacaggtaaataaaaatgcaatcaacaggggatgaaaatcaatctaatagaagttctacggatggattcattgataagggtaactttagggttcatcaaatggctaataggcgaaaggtagatacccatgacgatagattcaaaaactgggtcaatccactctcgtgacagagacccccataactctaccacttcctaatctcaactctcgttgatgaaacatagaagagcagggtttaagaaacaatctaccaaagccaataggcaaacaagccaatcccttgatcgagtctacatatctctggaattcgtaggtcagacatccatttgaacgtcttttggacgttggacgtctttgatcaaatctccacattagccagcgaaaaccgcataggggccaagcgaatccagaagggtataaacctaaacattaaccacctaactaacctagagattaccctaatctaatccatcctcaagaaccctaatcactactcaagcaacattctcaagaacacaaacttagaaattactaaaatcataccaaaatgtagatctaaacaagctaaacaactttacttaaacaatcaaatgcaaaaacgaaatagattaagagtaattaaagtttcaagattcataaacacaaagaaaaactgaaagataaagcatagatcctttggacaaaccccaaatgatctatttatactaaaatgttggaaacccaagattcactagaagacaagagacttgaggcggtttgggcgaatactcgaccttggggatcgagtaaagagggtgctgcaaagtctgcgcctttgtgtctatgcttcgagtgatcaattggtcgagtagatgcttcatcctctcttatccgtatgctgagatgtctggttgagtggggaaagaggaagatccgaagacgttttgatagctcaacaagtcttgtagagatggtcacccttggtcgagtaaatggatcgagtaggaggggcgagtagttgaatctgctgcttcatctgaggttgtcttgatcgagtaggagggtcgagtaaactgcagcctcctttgaggtatcctggatcgagtaaagaggtcgggtaggatgatgcctcttctgtagctgcctggatcgagtaaagaggttgagtaggatgatgcctcttctgtagctgcctgaatcgagtgaatggatcgagtagagtccttttaagctccttttgcacctgaaaacacaacaaaacatgcaatgtgaatgcaagatgatcctagatgcctaagtatgcaaaacaagctaaaatggtgcaaaatgatatgatacaatgaggaaatgcaaagctaaatgatgataaacatacacctaaaatgagtaaaatacagtgttatcaactcccccaaacttatctcttgcttgccctcaagcaaacaaaaaatcttaagttgaaggagaggtttgaaggtggggattcaaaaaccgaagcatgcctataaaatgggtaagctcaatgtccaggtagctaattttaggttgcaagatgatagacccttactcaaaaatgttagccatactcgtcacaatgcaacctaacaacttgccttaatctattcaagcattcacatcaaccaattccctttaacattcattaagcacgaacaatggatcaagcaatgcaatggttatgaactcacttggtttcgggcttaggctaagagacaaaaatggtccctctaatggtttggtcgagtaacaggggactctaagagaaaagattgagcttcagtagaatggtaaaggtaaaagccaacggacacatacaagaacagactcccatctacccaatgatatagtatgatagctcagaagatgatcccattcccatagatgtcctaactctaccctttttcttattctttctctctttttggttcaagttctaaggggttctctttgaaacgatttaatagtctagcgggtttggttctatactttgacaaacttaaggcttttcttctattcttagcacatagggtgttttacccttttctttgaatcacaatgcctaacttctttgaattccaaaccctttactagacttaacacttttgcatcccccttagaactctaaactcttactctttttttttttttcttttcttttcattctcactctcattccgttcattccatacacaatcccaatcccaaatacaagtctccacctagtcctacctaacccaaaaagtgtaggctaggtctacatgaaagactgctcttgtcggctcatacctaacacgttataccaagctcaatcgaaaaagacctcacaatcacacacaaatgatctttggcttgaaataaggctaggctaagggtatgggaaactgctctaaaaatgagagacaactacttggattaacagagggtgatgaagtgaataagatgatccaagtatgtatatggtagccatgagttcataaacaatgcatagacatgataatttcaaattcagttcaggttctaatagatagggaatggcgtcagataagcgagtttcgatcaaagtagtatagtccaattagaaattcaaagcagggtgcggtcttacttcagagatacaatcggttatgcaacagagaactaacaacctggacattgaacttacttcattgaatcaaaacatgcttatcggtttgaaatcattattatcccctatgcaaatgagcaatcctaaatgcaaacactctatatacaatcctaaaatgatatgcaatctacatgacactctttttttttttttgaaataattttctgaaaagttttcaaatttttatggtttttctatgccttagatgatgcaaaatttgaaataagaaaagagaacacaatgttaaacatgtcttgaaccctctcccaaacttaaattacacagtcccttgtgtaataaaaatctgaaagagaattcaagaccaaagcacaaaacacacaaagaaaaataaaaaaaatgctatggtatatacaatggagaggtggtgttacctaagttttcaggtgaagtaggaggagacgaaatcgtccatactctcctttctgtaactccaaggaacgggttgtgctgaactcggattagctagatgctcgaccctttgctcgggttattgatcgagtggctcctcaagtggtgcagtagagtggcttgctccagtgtctgatttccttgttcttcttcgctttttcaacttgctcctcttttctttttctctaggttcgaaggatgattgccttggtggtgcaggtgcagcatggtgttccctcggctcatatgaagactgtcttggtggtgagggcggatcaaaatgcataggttcgtgacgagtggatccgcttctcccaaaaggcatgttatgtggcattgctgtagttgaggaagaacaactgatcttaagttggagattgttaaacttcttgttgagtgccgcgagagccttgtcctggaacttacaccagctttggaggaacccaaggcgcttgtgaatctcctttgagtctttactttgccttggtgctgagtactcctcacagtaaaactgttgtgtatcgtaagactcgtccataggttctgcctcattatcagaatgatggattggagcctcatcatcattcattccttccatcggcacagcttcatctcccgaaatatagaggttctccattggtgggcaaaactcaatgttgccaccatctctaatcgaagtggaagcggggtttgggaggagaaaaatggattgtcctgctgtgggatgatcaaacctatacttatataggccattcttttgctgcaaccaaaaactcctggaattgataaggtgttccatatcaatccatatcggaggaatcagcattgaatgtagaggtacattgcaagctctcagaattggtgttacaacttctctcacaaccatttttcctggtttctgaagtcccttagcccatcctctgtaactcagcaggtgctcgattaggtagaatgagaccgaagtgtctgtctgatctccagctagaactgtaccatccgatgctaaaccaagcaactcttgtagtgttgtctccatcaactctagttctccattgacattggtttcattccgctctcttggaaatagtgcacttgccaaggacctatgaaagtatctaaccaccgcactccttatctcattgctcttggtcctatacgatgaaaatccatgcttagaaccaagtgtggcccagaatgactgaagctctctcttgtcaaaacaatgacttgtgtcttttccgcttggaaatccatacatcagctcgagatgctctattggaagccgatactctacgtcatacacacaaaactccaagtatcccaaacttccgtctttcatcgtcctctgactctccatataagagcaattccacggatgaaagaaactgaatggtctcttcctcatacccctccattggccgaaacatgtgaatattcaggctgcactgcttaaacatgtagtctacatcatcatacatgtcgagtctctccatggtctcgggatgacggtaccgagttcctaaaaactcattgcgctacagcagcttgtagtactcatttcgagttgcacacttctccgattccaaatcatcatcgcctcctttctctgtttgatcatcttcctttggtgaagccatatcttcctcggagtcttcatctaccagctccaacctcctccccacgggcttcttcccttgtgtgatatctgccttgttcctcgcgaattctcttgcagaagacttactcgacttttgggatcgagtatttccagctggagagctgaaggtctcttcttcttgcatcacttcctcctcttggctcgattcactatgatcgatctcgaaacttgtttgatctctcctactcgaccccaagggtgatggttctgaaggtcctcgagctgctgcatgcgaagaaggtgttgggtacctctttaatggggagagagctttgttccgaatctttgacaaaagcgagcgcctgttcatcgtcacgaactaaggtgggagaaactcaaaaccaaaattcagtagattaggagattgaatgatggaagaaacaaatgaatttgtgaaaagtttttgataagaaagggaagtgaaggagataaagagaggattgtagggattcaagatgaggatgctttggtatgggagatggagagatgaggttgttgagttcgggaattgcaatggggggaccaaagtgattatgggggggacaagaagacaaagggacaacatcgtttcaatggaggcgggtcacgaggcgtcggtgtctacgaagagagtctctttggtttcttcactcgatcggacggtgaggaatgctccatctttatttactcaatcaaacggacaaaaacgaatcgtaagaaatcactcgatcaaacggtggtgatgctcctctcatttggtcatccaaatcaatggctcaaaatactcctcctcattttactcgatcaacggttgagatctttcttgacttggtttgaaattactcgaccgttgactcccttagggtcactaaaacaaacatgaaacacttaaacaaaaacatcaaaaataacaagaaaaatagaaagtcatttacatggatatacatgggacttcctcccaagtgagcttgttttaagtcactaagcttgactcttacagtgcttagtcagaaacaaggttgaagagaggaacagggaagtcttcatcttcagtggttaaattttcagtgcttgagtcatactctacatcctctcttgagatatggtaggatgagtactcaattgatttttcttcaaagtaagcttctttttgatcagcagagtagtcttcttcttctgaaccaggctcctttgaccaatcctcaaattcaaaactggggtagcttttaatcatttcttgaagttccaagattgcatggttgagtcctttcattttgtaagttagctccccaatggtatcctcttgagctttgtattctatcctgagttccagaagttcttcagtaacagaatcaagtgtcaagtgttcttcttcagcataggggttggtgggctgtttaggcgctcctggagaagaaattggaataggagtttcctcctcactaaacaacttgctctctaggcttctttcctctaagtgaactcctttctgatcttctggtgtaaaccattctgttgtgaaatttttgtcctccttgatagctagtgcagtttctatcttctctgggtcaataccatctgaaaactttttaactcttttttcaaacatccaaagttgatctttcagcctcatcacccttgaagataatccctctatgactctactttgccatttaattttttttttcatttcataccagtcatcttttgtaggaccttcagtctgagatagcctttctgttgctctcttcttgtggtcaaaagttctcttcagcttgctaatttgagaagtataattgacttttggtgaggtttcaacttttgtttcttcatcaacatccatatcttgaattccaaaactctgacctcctgttgttgattctttagagcttctctgatgtcaaacttcatcttgatgcctttttcaaggttcggattaatttttccattcctgacatctatgactgctccagctgaagctaagaatggtctgcctaggatcaggggatccttgccttcttcatctacgtccaataccacaatgtctgtacgtatctcaacatttccaatcttgacaggcatattttctattagaccatgaggatgtgcaacagaaccgtcagctaagagtaaggctaagttgcagaacttgaattccatgatccctagccttttagctgtagagagaggcataaggctaacagatgctcccagatcacaaaggcacctattgaatgtcaatggtcctagagagcatgaaagctgggatcatcaagcttttcttggatgactttcttcttgtatgtttcttgagtggaggcactgctaatcatctcttgattctgctctttcttgagcttttttcgagaatggtgagtgttcagcaaaggtgtgtgctctatagtccagatgaattgctgggtggcaggtgcagcaatttgagttgaatcccccccttcatgaatcatattgtcctcagtattgagtgtttgatgacttggtggagactcatcttcttggtggatggtgatagcattagcagtagcatagtccttagggttctggactgctttccctggaagttgttgaggattcttcggagcagaggttgaggcaaattgactctccacatacttgatatttgagttcagagcttcaaacttgacattcagatcgttgtatgaacaatcgatcttgttgtgtaattcagctatcttcttttcaaaaaccatagctccagtagcttgtccttggatgatctgttgaatgagttgcttaatttcaggatcttgagctactggggcttgttgtggttgttgagtgaaccctggtggtggattctgctgttggaagcctccattaaattgttgtttagggacataaccttggttgtactgaacaaaaggcttagactgattctgttgaggtggatacacttgatcttgggggttagcaacattagtgcttctgtaggagaggtttgggttgggcttgtagttgttttagcccttgttaaaccctccttggttctgaatgtagcacagctcttcagtttgatcattccccccttcttgcatttcgaagtgctcctcatcagtgatgtagtgtatctgcttctgctgagccatcaacagcttgtctaacttctcattcaaagccttgatatccttgccctgtttgtcctcacttcctccagttcctctcattgagcgatcatagtcttcattatagcacccatcagattgtgctagattttcgaccaactcccagccttctgctacatccttgttcaggaagtttccattgaaggcggtgtcgagcagcattctgatctttggtaaagctcctctgtagagtgtgctcaataatgaagccttcttgaaaccgtgatggggacattgagtggtgtagcttttaaacctctcccaagcttcacagaaagtttcattatttttctggttgaaaccggagatctcgttcctcaatctagcggtgcgagcgttagagaagaacttggcaagaaaagctttcttacaatcgtcccatgaggtgatggagtctggggatagagtcttttccaatggtgtgccttgtctcttaaagagaagggaaatagcctgagcttaatcatatcttcagtgacagcattgatcttggtacggccacagagcctatcaaagctgtcaagatggtccagggggttttccatgggtaggccatgaaacttgtttccttggatcatggagatgagaccactcttgatctcaaagttgttgttctgaactggtggtggcactatcccttgtctttggtgatgattccttggggcatcaccaacaccaatgtttcttggttgatcaacattaggtgggtcttgaacatcaactggtctgttctgttgatccatagcagctggtctttgctgatcacaggctgcctttgctttggtttcttgtaactcacgagctattctgtctattctgtcttcgaatggtagtaggtgtgcagaatctttggatagagtttgcatgcacaaagattagtacctataccacaaaaacaagcagacgaaatgatgagttagtattttgataaatgtaaaagaacttgatcttaaaagtttctgatatcttgaatgtaacaatgcaacaatgaattggcaacagcgccaaattgataagcaggtttttcaggtctgcttatgtgctgaatgctgtgttcagttcaattcctctaaaacacaaacatgtcgatgcagttatagagggtgtcaatccagtccactgtattgctagcaatcatgatgtgtacaaaaactactaagtcaagccagattataaagattgtgggtttctagtaacaatcctaggtcaggattcaaacaagtaaaaatgagaacttaacagccctactcgatcattgggtcgagtagaactaacaggtgacaaaattaagaactaaaatgcaatcaacaggggatgcaaatagaggatacaaataataggtaaataaaaatacaatcaacaggggatgaaaatcaatctaatagaagttctaaggatggattcattgataagggtaactctagtgttcatcaaatggctaataggcgaaaggtagattttcatgacgatagattcaaaaactgggtcaatccactctcgtgacagagacccccataactctaccacttcctaatctcaactcttgttgatgaaacatagcagagcagggtttaagaaaaaatctaccaaagccaataggcagacaaaccaatcccttggccgagtctacatatctctagaattcgtaagtcagacatccacttgaacgtcttttggacgctggacgtctttgatcgaatctccacattagccagcgaaaaccgcataggggccaagcgaatccagaagggtataaacctaaacactaaccacctaactaaccaagagattaccctaatctaatccgtcctcaagaaccctaatcactactcaagcaacattctcaagaacacaaacccagaaattactaaaatcataccaaaatgtagatctaaacaagctaaacaactttacttaaacaatcaaatgcaaaaacgaaatagattaagagtaattaaagtttcaaaattcataaacacaaagaaaaactgaaagataaagcataaatcctttggacaaaccccaaatgatctatttatactaaaatgttggaaaccctagattcactagaagacaagagacttgaggcggtttgggcgaatactcgaccttggggatcgagtaaagagggtgctgcaaagtctgcgcctttgtgtctatgctccgactgatcaattggtcgagtagatgcttcgtcctctcctattcgtatgctcagatgtctggttgagtggggaatgaggaggatccgaagacgctttgatagctcaacaagtcttgtagagatgcttcatcatttcgtctgcttgtttttgtggtataggtactaatctttgtgcatgcaaactcgatccaaaggttctacacacctactacttttcaaagacagaatagacagaatagctcatgaattacaagaaaccaaagcaaaggcaccctgtgatcagcaaaaaccagctcctatggatcaacagaaacagaccagttgatgttcaagacccacctaatgttgatcaaccaagaaacattggtgctggtgatgccccaaggaatcatcaccaaagacaagtgatactgcctccaccagttcaaaacaacaactttgagatcaagagtggtctcatctcaatgatccaaggaaacaagtttcatggtttacctatggaagaccccctggaccatcttgacagatttgatcggttctgtggccttaccaagatcaatggtgtcactgaagatatgtttaagctcagactatttcccttatctttgggagacaaggcacaccactgggaaaagactctacccccagacttcatcacctcgtgggatgattgtaaaaaagcttttcttgccaagttcttctctaatgctcgcacaactagattgaggaacgagatcccaggcttcacacaaaaaaacaataaaactttctgtgaagcttgggagagggttaaaagctacaccactcaatgtccccatcacggcttcaagaaggcttcattattgagcacactctacagaggagctttactaaagatcagaatgctactcgacactgcctcaaatgaaaacttcttgaacaaggaagtagcagaaggatgggagttggtcgaaaatctagcacaatctgatgggtgctacaatgaagactatgatcgctcggtgagagaaactggaggaactgaggataaacagagcaaggatatcaaggctctgaatgaaaagctagacaagttgttgctgactcgacagaagtaggtacactacatcaccgatgaagagcacttccaaatgcaagaagtggggaatgatcaaactgaacagttgtgctacatccagaaccaaggagggctcaacaagggctacaacaactacaagcccaacccaaacttctcctacataagcactaatgtagctaacccccaagatcaagtgtatccaccacaagaaaatcagtctaagctttttgttcagtacaaccaaggttatgtccctaaacaacagtttaatggaggctaccaacagcagaatccaccaccagcgttcactcaacaaccacaacaagccctagcagctcaagatcctgaaattaaacaacttattcaacagatcattcaaggacaagctactggcgctatggcttttgacaagaagatagctgaattacataacaagatcgtttgtttttacaacgatctaaatttcaatttcgaagctctgaattccaaaatcaagtatgtggagagtcaatttgcatcaacctctgctctgaagcatcctcaacaactcccaggaaaagcagtctagaatcctaaggactatgctactgcaaatgctatcaccatccaccaagaagatgagtctccaccaagtcatcagactccgaatactgaagacaatatgattcaagaagggggggggattcaactcaaattgttgcacctgccacccatcaattcatctagactatagagcaaacacctttgctgaatactcaccattctggaaaaaaattcaaaattgaaaaactcaagaaggatcagaatcaagagatgattagtagtgcctccaccaaagaaacatataaaaagaaagtcatccaagaaaagcttgatgatcccggttcattcactctaccatgttctctaggactattgacattcaatagatgccttaagaatggaaagattaatctgaaccttgaaaaaggcattaagatgaaatttgacatcagaaaagcttcagggaaatcaacaacaggaggttagagttttgggattcaggacatggatattgacgaagaaacagaagctgaaaccccaccaagagttaactatacttctcaactcagcaagctgaagagaacttttgaccacaagaagagatcaacagaagggttagttcagactgaagatcctacagaagatgactggtatgagatgagaaaaaaaattaaatgacaaagcagagtcatagagggattatcttcaagggtgatgaagctgaaagatcaactgtggatgtttgaaaaaagagtcaataaattttcagtgagtattgatccagagaagatggaaactgcactagctattaaagaggacgaagatttctcaacagaatggtttgcacaagaagatcagaaaggagttcacttagagaaaagaagcttggagagcaagttgttgagtgagtaggaaatccctattctgacttattctccaggagtgcctaaaccgcccaccaacccctctactgaagaagaacacttgattattaattctgctgctgaagaactcctggagctttgggttggatataaagctcaggaggatacaattggaaaattaactcataagatggaagagttaaatagcaccattctggaacttcaagaaatggttaaaggctaccccagttttgaaattgaggattggtcaaaggagcctggtttagaagaagaagactactctgttgatcagaaagaagcttattttgaagaaaaatcaaatgagtactcatcttaccatatgtcaagagaggatgcaaagtatgattcaggcactgaaaattcaaccattgaaaatgaggacttctctgttcccctcttcaaccttttttctgactaagctctgtaagagtcaagcttaatgacttaaaacaagctcacttggaaggaagtcccatgtctatccatgtatataactttctattttccttgttaattttgatgtttttgtttaagtgtttcaggtttattttattgaccctgaggaagtcaacggtcgagtaaattcaaaacaagtaaagaatcatctcaaccgttgatcgagtaaagtgaggaggagagctttaagccgttgatatgaatgaccaaatgagagaagcatcacaaccgtttgatcgagtggcttcttgaggtttattctggtccgtttgatcgagtgattaaaagcaaagctttctccaccgtccgatcgagtgaagaaaccaaagagaccaccttgtggactccgactttctcgtgacccgcctccattgaaacgctgctgtctctttgtcttcttgtccccccccataatcgctttggtcccccattgcaattcttgaactcaacaacctcatctctccacctcccataccaaagcaatctcaaattcttatatctctctctatctctttctcttgcatttcctctttctatcaaaaactcaacaaaatccatctattttcttcatcactcaatgacaaacaggcgcacgctcctgtcaaggatccggaatagagctctctccccattgaagaggtacccaacaccttcttcgtatgtagcagctcgaggactttctgaaccatcacccatggggtcgagcaggagagaacaagcaagtttcaagatcgatcacagcgaatcaagccaagaggaggaagtgatgcaagaagaagaaacttttagctctcccgttggaaatactcgatcccgaagtaagtcctctgcaaggaaattctccaggaacaaggcagacatcactcgaggaaagaagcccgtggggaggaggttggaactggtagatgaagattctaaggaagaaatggcttcaccaaaggaagctgatcaaacagagagaggaggtgatgatgatttggaatcagagaagtctgcaactcgaaacgagtcctacaagctgctgaagcacaatgattttttaggaactcgatagcctcatcccgagaccatggagagactcggcatctatgatgatgtagactacatgtttaagcagtgcagcctgaatattcacatgtttcagccaatggaggggtatgaggaagagaccatccagtttctttcatctgtggaattgttcttatatggggagtcagaagacgatagaatcaggccagacggaaatttgggatacttggagttctgtgtgtatgaagtagagtatcggcttctaatcgagcatctagagctgatgtatggatttccaagcggaaaagacacgagtcatcgttttgacaagagagagctttagtcattctggccacgcttgggtctaaacatgagttttcatcctctaggaccaagagcaacgagataaggagtccggtggttagatactttcataggtctttagctagtgcactatttgcaagagagaggaatgggacctttgtcaatggagagctagaattaatggagacagtgctgcaggagctacttggtttagcatcatatggtacagttctagctggcgatcagacaaacgctttagtctcattctacctaatcgaacatctactgagttacagaggatgggctaaaggatttaagaaacctggaagaatggttgtgggaggagttgtgaccctaattttgagagcatgcaatgtacctctgcattcaaagccgattcctccgagatggattgatatgcaacaccttattaattccaagagtttttggtcgcagaagaagaatggcctttataaatataggttcgatcaccccgcagcatgacaatctatttttttcctcccaaatcctgcttccacttcgatcaaagatggtggcaacattgagttttgccaccagtggagaacctctatactttaggtgatgaagttgtgccgatggaaagattgaatgatgatgatgctccaatccatcattcagataatgaggcagaacctttggacgagtcttacgcaacacaacaattttactttgaagagtactccgcgccaaggcaaagtaaagactggaaggaaattcacaagcgccttggttttctccaaaggtggtgtaaacttcaagacaaggctctcgcagcactcaacaagaagtttaacgctcttcaactcaagttcagctgttcttcttctactacggggatgccaccggacatgccttttaggagaagcggatccacttgacacgaacctatgcaatatgatccgcctttgccaccaagatagtcttcatataatccgagagaacaccatgttgcaccttcaccactgagacaatcatcttttgaacctagggaaaaggagaagagaagtaagttaaagaagcgtagaaggacaaggaaatcggatgctcgggcaagccactctaccgcaccacttgaggagccaattgatcaacaacccgagcaaagggtagagcatccaactaactcaagtccagcacaaccaactccctggagctacactaaggagagcatggatgatcttgtctccgcctacttcacctgatcgctgaggtaacaccacctcaaccattgtatatagcatcatctttttatttttctttgtgtgttgtttgttttggtcttgaattttttttcagatttttattacacaagggactgtgtaatttaagtttgggggagggttcaagacatgtttaacattgtgttctcttttcttatttcaaattttgcatcagctaaggcatataaaaaagcataaaaatttgaattttttttcagaaaatgatttcacaaaaacaaagtgtcatgtagactgcatttcattttacgattgtatatagagtgcttgcatttaggattgctcatttgcatagaggataatgatgattttaaaccgataagcatgatttgattcaatgaagtaagttcaatgctcaggttgttagttctctgttgcataaacgattgtttctctaaagtaagaccgcaccctgctttgaatttacaacttgactatacttctttgattcgaaactcgcttatctgatgccattccctatctattagaacctgaactaaatttgcaattatcatgtctatgcatggtttgtgaactcatggctaccatatacatacttggattatcttattcacttcaccaccctcttttaatccaagtagctgactctcatgttttagagcagttttccataccctgagcctagccttatttcaagccaaatatcatttgtgtgtgattgtgaggtctttttcgattgagcttggtataacgtgttaggaatgagccgacaagagcagtctttcatgtagacatagcccacgctttttgggttagctaggactaggtggtgacttgtatttgggattggggttgtgtatggattgaaaaaatgggaatgagaatcataatgaaatgaaatgaaaaaaaaaagagtaacagtttagagttcttaagggggatacaaaaagtgttagtctagtaaagggtttggaactcaaagagaattaggcattgtgatttaaaaaaaaggtaaaatgccctctatactaagaatagaagaaaagccttaagtttgtcaaagttaaaaccaaacccgctagactcttgaatcgttttaaagaagaaccccttagaacttgaaccaaaaagagaaagaatgagaaaaagagtagagttaggatatctatgggactgggatcatcttttgagctatcatactatatatcattcggtagatgggagtctcttcttgtatgtgtccattggcttttacctttagcattttgctgaagctcaatctattctctgagagtcccctgttactcaaccaaatcattagagggaccattttcgtctcttagcctaagcccaaaaccaactgaggtcataaccattgcattgcttgatccactgttcgtgcttaatgaatgttagagggaattggttggtgtgaatgcttgaatagattaaggcaggttgttaggttgcattgtgacgagtatggctaaagtttttaagtaagggtctatcatcttgcaacctagaattagctaccaggacattgagcatacccgttctatatgcatgcttcggtttttgaatccccaccttcaaacctctccttcaacttaagattttttgtttgcttgagggcaagcaagagataagtttgggggagttgataacacagtattttactcattttagacatgtatttatcatcatttagcttagtgatcactcattgtttcatatcattttgcatcacatttagcttattttgccaacttaggcatttaggatcatcttgcatacatattgcatcttttggtgtgtgttcaggtgtagaagagcttaaaaggattctactcgaccagttcactcgatccaggcagctatagaggaggcagcaattcactcaacccctgtactcgatccaggcagccatagaggaagcagtagatcagtctactcgcccatcttactcgatcctctactagacccctttactcgatcaagggcgacctactctacaagacttgttgatctatcaaagcgtcttcggatcctcctcattccccactcaacctgacatctgagcatacagataggagaggaagaagcatctactcatccaattgatcactcggagcatagacacaaaggcgcagacttcgcagcaccctcttgtcttctagtgaatctagggttttcaacattttacaataaatagatcactttgggatttgtccaaaggatctagcttttatcctttagtttttctttgtgttcttgaatcttcaaaccttaattgctcttaatctatttcgtttttgtatttcgttctttgagtaaagttgtttagtttgtttagatctacattttggtatgatttcattaatttctaggtttgtgttcttagttatgttgcttgagtagtgattagggttcttgaggatggattagattagggtaatctctaggttagttaagtggttaagattaggttacatcccttctggattcgttggcccctatgcggttttcgatggctaatgtggaaattcgaccatagacgtccagcgtccaaaagacgttcaaatggatgtctaatctacgaattccagagatttgtaggctatagaccaagagattggctagtctgtttattggctttggtagattgttgcttaaaccctgctctgctatgtttcatcaacgagagttgagattaggaagtaatagagttattggggtctctatcacgagagtggattgatccggtttttgaatctatcgtctagggtatctgcctttcgcctgttagccacctgatgaaccctagtattgcccttatcaatgaatccatccttaggacttctattctttttagatttatttgtattcaccccctgattgcacttttatgtacctgttatttgtgtcacctgttgattgtattttagttcttaaatttgttgcctgttggttctactccacccaatgatctagtagggctcttaagttcttatttttgttgtttgaatcctgacctaggattgttactagaaaccaaccatctttataatctcgcttgacttagttgcttctatacacatcttgattgctagtaataacagtggactagattgacaccccgtatagctgcatcgacatgttagtgtttaagggtaattgaactgaacctcacttcaacaaataagtaggcctaaaaacttacttatcaatcctctctccgttcagcaaaccatcttgtcatcatagtccgtatcgcttctaacagtcgaactatgggaagatttctggcttttgacattgctttgttcattgattccgctatattcgtagtcattaaattgtacctttcaccgggtaaatgaacatgcgcctacatttcaacacccgctctttggaggtatccatgtaggtcagcattacgctctttaatctcgttgaacatgtcattaaaattagtcagactataacaccttgccgctttttcaccagagggaacatatgttttcctcttgaattttaccaaaatgtttttatacaaatggtaagtgcaaattccacgagatgccgatggatacacttcaccaattgctttccctattgacttatgtctgtccgagattatcgccacatcagttgcgtcaggaatagcaactttgagttgcgtaaaaaaccaacgccaagattcatcattttcagtgtcaactacaccaaaagctaacggaaaaatttgaaaattaccatcgtgagctagagctgttagaagcgtcccttgtaactaccatggagaaacgtaccgtcgacaacaacaaattttcgtatgaaaggaaagccatcgatattggcaccaaaagcaatgaatagatagttgaatcttttactctcatcaatttgaagacgcgtgattgtaccccgatttgaaggcagttcttcaaactactatcaagggttcacagatttaactcccttggaaaccttagtgtcttttatgactttcaataacccatatgttgacacaaacatattaattgataagtcagccataatatatttataactcaggcaaaatgtaatacaagtcagccacaaagtgatgttaagtcagccgaaaagagtcataactcaaccggaatgtaattatatgtcagtcataatatatctataattcaaccataatatatatataagtcggccatacaataatcagtaagtcaccgaaacattgtaattacctttactctaaaatgtttactgataattattccgacagtttttcgtctaacatccggaccaacgtcaccaagatagtccttgtaaagatctcccaaaccatcaggtgttgcttatgaggatcgatcagaatgttccgtcacagaacatgtgtgctccgaattgtatatacggacataaaaataacgctctccgtacacagtaaagttatcattatcagatgaggcaccgttggagtcgtcaaaacatcaaaccggctagaaaattcatcatctttttcttcgtcacctgcttcttcgtcgcctacttcttcgtcagctgcttcttcgtcacctggttcatcgtcttgataatcgtaacataaaccttcaaaccccccacccggaacttcgaatctagattctactcttgagtcagaacccattggctgattcttcattcctctggatccgtccttccaactaatatcccttgactctttcgccgtaaactccacacagagacgtagctaatcgattttcatcaaacatagataacattgaaactgtcgatccttagagacataaactggtggagtatcaagcggcatattttcagagtcttgttggagaacatgtaactcagctttaactgatgggtcaagtgattcaatccgtaatcatcgagcaccaacttcaaaagcctatcgtgcgctactagctccacaattctacaccctctttggttggggttaaatacgaatatctctttcttaacccaaataccggaaacaactatgacaggaaccggatcagccatttcgagagaaaaatgaaagaaattgaagatgaatgatgaaaacgatgattagatagaagtttcggcgatgttgttacactcaggcataaaactcagttagagatgacgagtttaaaaagcaagggacatttcgtatttccattgatgatgctgacatggaatgatgacatggaataatatcccttgactctttcgccgtaaactccacacagagacatagctaatcgattttcatcaaacttagataacattgaaactgtcgatccttagagacataaactggtggagtatcaagcggcatattttcagagtcttgttggaaaacatgtaactcagctttaactgatgggtcaagtgattcaatccgtaatcatcgagcaccaacttcaaaagcctgtcgtgcgctactagctccacaactctacaccctctttcgttggggttaaatacgaatatctgtttcttaacccaaataccggaaacaactatgacaggaaccagatcagccagatcgagagaaaaatgaaagaaattgaagatgaatgatgaaaacgatgattagatagaagtttcggcgatgttgttacactcaggcataaaactcagtcagagatgacgagtttaaaaagctagggacgtttcgtatttccattgatgatgctgacatggaatgatgacatggaataatatcccttgactctttcgccgtaaactccacacagagacgtagctaatcgattttcatcaaacttagataacattgaaactgtcgatccttagagacataaactggtggagtatcaagcggcatattttcagagtcttgttggaaaacatgtaactcagctttaactgatgggtcaagtgattcaattcgtaatcatcgagcaccaacttcaaaagcctgtcgtgcgctactagctccacaacgctacaccctctttcgttggggttaaatacgaatatctgtttcttaacccaaataccggaaacaactatgacaggaaccagataagccatatcgagagaaaaatgaaagaaattgaacatgaatgatgaaaacgatgattagatagaagtttcggcgatgttgttacactcaggcataaaactcagttagagatgacgagtttaaaaagctagggacgtttcgtatttccattgatgatgctgacatggaatgatgacatggaatattccagccggcgttgttttgaattgatgaggttgcaagtaagccaccaaacaaacatgtaaaatttgcctagtaactcaaccactgtacaaatctataagtcagtcgcaatatgaatactattacagtagttaaaaacaaaaaaaaacgccaagtaaattcaaccgtgtaatgtcgtaactcaactaactcagccgtaacgtttaataaatcggtcgtaactccgtgctattatagtaattaatcttttacaactaagttagctgtaattagactgagttatccggtaatctaaatcttaacggctgacttatgacactcgatcataactcagccgtaacatcatcccataactaagccatccttcataacccagccagccagaaaaagataactcagtcgtctcgaggaaataagtcagccgttttctaatatctcaaccatcacgttgtctgggttatgctcgaaattcctataacttagacaaaattccttaactcagccgtcatgtagggttgattatcgcataactcagacaacatttttaaatcagccgtaacgtaggctcgtttatactcataattccgccgtgttctcatgactcaaatatttttgtcgtaagtcagccacaatataccgtaactcaaccgtaactgccgatgtatcgccttacggctgagttcattaatctacgtcaataatttttgacgtcgcagtggcatttcttgtaattatgtttttcctgtaaagtttagtagggacacgctggatatacaaaaaagacaaaaatatgacagtaataaaaaaaaagttatgtatggttctggttagtacacctaatttatataacatctaagtaaatctcccttgaaattatatattgttagtgatttagaaatatgttaattgtgttagttggttgaaaacatatattattggcgtgatttcaaatgtatctcatattcaaaagtttttattcgtatgtcgtcaaggagagacaaactataacgcaagatttgtgtcgtttgatatcactaataacatgtaactttacactccttttgatatcttattttctgttcagtttgtaatttttggaagaaacattataatttatcaaatgtttttaaattttgtggttgaagggagaaggttacaacctgtgttgcaaaaagtaggtcgtgtcagttgtttttcacgaactagtgttaaaaataatttttgtgacttatagctttgagtcagtcctcattgttatctgtttttggtgaacttcggatttcaatggtaagtttgttaaacaaacccattagtgaactatgtgtgagtgtaattaaactgtattttgttttctacattttgtttaggttcaaactatttgatgagtgagaatggttcttcaacgctttaccttgatccaactcttactggttttgacacacggagacacttgtaagtcacatttttaccaaatacagagtatactaacatcatcaattgagaatgactttaatttttacatgatttacataaacttgtagttagacaagttgatgatgatatgcagatggagttggatcatgttaactaaagtggatcttgatggatgtatctactatgcttcctatttttatatttatgtatgtcgttttattaggttaaactttgttttgaaacttaaggtattttgtttatgtttgtctaagattcaaactactctttatgattcagtgtattgtttaaggcctcttgcgttttctatctacctaatttacttaatgagatacaccatttaaaagagagtaatttaatagatagaagtaattaaccatgtaggtaattataaacacaatcaaactataatttatccctatataaatctacatatatatttttgtaacacttttagcaaataaatcatgtacttggaacttatttacaatgtcatgccactgaaattattaatttgaatttaatttcgacgattaatactatcaaaaactattgttatcaaatatctagagcaatccctttagtgtagcaaacacaataaattctttattccttatctcatgtataatatttaagaaatcttaaatcccttaacattagcatattagcataaccgtatgtagcaacttttatacgaaatctcttaaattcaaaccaaaaatcaaaagcgatcctttaatgtagcaatgacaattatatgtgcgagatttacttacccactacattttttatcttgcttcaaatattacatgcaatttcaattccataactattttgtcaacattcactatcacaactaattatctaccataactgaaatcagcaacagcttgcaaataaaaatttaatcaaatcaaagtaaatcttctttaaaggaatatgctcttatacgaacgcatattttcatgaatttacacaatattaacctaatttctttatgctatataaacactcaacctacgatagtttaccatcaccaaacatataaacattacctttcaaaaaaaaactttcaaccacaatggctgcaacctttgcatacctcaaagacgtctgcccctacaccatatcgtgaagggttcaggtcaaagttctacaatcttggaaacagtatacacaaaaaactggtgaaaccctagaactgattttctttgatgaacaaatattcaatattctgattcatttactctctatatcgtctcatttatatgttaatgcttatcctctttgttttccatttcaggacaaaaagatccatgccactgttaagacagacttggtaaccaagcatgtcaataagctcactgttggtgactgggtttttgtaagatttttactctcacctatgcactcagtcaattcagggcaacttatcatttgtataagatgacatttaccaatggaacaatggttatggactgtgaccctatatcagattatatgtgatatatccctattttcactgattttatctatgtttaaggtataggattttgagtctttatattgtttctcgagtcttttaagtgttttttcagggattctatgcaatgggacaacaatggagatgaggagacattttggagcaaaagctaaggaaaaggaagctaaggacgattttggattcaggaatcagagagagtgtcgatcgacaccagtttcggcccagcaaagtccatgacgctttcaagtttacagaagaggaaatttgccccagaagagttctctatttgcattattagtccctggacgttttatagggtttttttatacattgtttagacctaagttttcttttatcaagttctttgcaaaccctattttgagagacataagctattcatccattgttcttgagagattcatccaattcttaatatagtgaagagatcccttctttcccttatcttatttgctgtgtttatgttttcttattcaatcatgttgtttgtttcattcaatatgtctcagtagtatgcttgttaggaatatggtttctcattagggattcatatggtttagtagattaccccatttgctaggttatctgtaaaattcttcatctttgattatgcttaatgctagatctagagtaattaactagatcttgaatccagacaatagatatgcccaccataggtatctgtagttggatctattatttaatgagcctggtttgtaggtgtgtaataagaatcggcctatctagtaaggtgaacaattgaactcgattagaatgcatgtttaggttaaagatttctcggctactcctgttattcttagctatagacatagggagtttcgcggaacaccaccggttatttcataattagagttccgattattcttagctatagacataggaagtttcgcggaacaccaccggttagtccataattagactttgagtttaagaatggttcgataacaacctagctttctttagatctactaaccaatggttttctaaaaataccatgtaccaatctctttatttaatcgtttacaaccaatcaatctgttgtcttcttactttgtttttttattatttcaatcataccttgctagcttaatcttgacattgaattcattgtgtgaacaaaaaaactttgtggaaatcgatccttaaatactgcaattgatctcttatttgagagagtggttcttagggtaatttgaaacgtatcaaatttggcgccgttgccaaagttcttggaaatcatcattgagtttagtttagagatttcgtctagtttttacttttacttttttagtcacgcgtttcttgttttcttcttttctgtgttttatgtgtatgcctaggtaaatgaggagcacacaacagaaggagctgatcaacttgtctgtttgggacttgggaaaacttgaacgcaccaaccaaaaaacttagagattagcaatggctgacatagtcatccgagttgatgcagaaggagttttgagagatgagaatgggcaagcctacaatgaggctggtcagggattagatgatcatagactcatcctacctgaggacgctaatgaggatcaggcgcgtctcaatgcgcgcaattagctggctcattgtcgaccgacacaacagaggggtcgatcgacaccttcgagagcagaatgaagacgcgattggtgtcgaacgacacaacagaggtgtcgatcgacaccaaccccagattcctgcaggtattcctccagttgcggaaccatgtcgtactcttggggatttcaaaaggcttgacctgttctatactaatcgatcagcgatcgtacccccaaccttccagaggaacagttatgagctgaagcctggctagtttgctttagttgccagcatcctctccgtgacttatctcatgagtagccaatggaccatatcgagcgctttgaggaccttgttctgagcatcaaaactagtggtctcagaggacaacctactatgcaagctcttcccttattcacttgctggggaagccgcttcttggctggaacaatttaaagcaacttccctcaagacttggagaagcatcaagatagctttcttaaacaatttctgtgatgacgctaagtctaaggagttgagaaacaagttttctaccttcacccaaggtccagctgaagctctgaaagccgcttgggttcgtttttaggaataccaacgagactgcccacatcatggtttcagtgaggtacaacttcttggtaccttcttcagaggagtcggttggagataccagatggctctagatgcagcgagcaatggtaacttcaatacacgttacccagctgatgctatagctctgatagagaacatcgcttgaagcaacagtaccaagaatgctgactttgagaggaagaaattagctggagctgtttcaggcaatcaaatggcagaggtgaaaggtaagctggattcggttcacaacttgcttacagggaagaagcatgtccactttgcagttgaggatgagactattgagcctgagactgaatctgaagagtgagtcttctacatagatggtcagggctataggaagtttgggcagccacatggcaactttagtggcaacaggtttacagggaaccagtgttcctccaactacactccaaagcctgctttctagaagacatttcctcagagcaacttcaagaggacttatggtaattcagcttaccaagcccccctccaccctcatcagagacaagaatggaatctatgcttgagcagattctaaagagccaaacaaagcttgttgtggagtttagtggaaagtttgatgctgtctacacagatcttaatgggaagatcgaaaatatgagctataacttgaagaagctagatgtccaagtagctcaaactacacaatcaattaagagacaagatggctttcttcctggcaatcttgatgctaacccaagaaagagctgtaatgccatcttaatcagagatggagatgatgtgtgggaagaagttaatactgaagaagagctagagctctgatatagctcaaattgccttaagcttactccctcaaataagagatcatcgttagcacttaagggtcgaattccactgagctctcgatgttcacacaatagacttatgatgattaatattaagctagacaaagtagatgaatgtacaagacagtaaagcaataaaatgagttgtagattcaagtgattaaagtgtcgggtctaaggaattgtctcgggagatagattaattgtagatctagctgatattaggattgttatcacactgttctcgaactcaaactatggttttagagtaaccagtggtgttccgtgaaactctctatacttagagctaagataacaggagaagccgagaaatcctatactaaagcattcattattatcaagtttgattagttcacctagtatgtaaactagagcccttctatgagcttacctattatttcttaaatgcctaggctcatctatgatagttcaaataacaagtacctatggtgggcatacctattatctaatatcaagttctaggtgatcaatctaaaactagcaataagaataatcaagatgaagaactttaagaataatcctaaggggttttcgatctactaatccatctaaatccgtattgagactccctaaacccaacaagaaatatagaaacacaaatcataatctcaatagtttgcattgatgaattagaaatagagtaaaaggagttcagaatcctctctatagggattggattcttctctcaaaaatgtatatcgattgccaaaacaaaacttaggtctaacaatgaccaaataattaggtatattcgtgactaaaaacgtgcagggactactttgcaaataaggaaaacttcacggcttctcaaagcttggtagaaaacagaaattccctctaccgaaataaggttgtcaatcgacataggtgtggtgtaagtgtacctgaaatgactcaaaacatacgaaaagactagaaagaccctaaaaaccattttgaaactatgttagaaatcagtaaaaaccaggacatatcaactcccccagacttagcttttgcttgccctcaagcaaagcaaaagattgaatctgtgaaagaggtttgaaaaacgtaaaaactcccaatctctttagcttattacctatcatacaaaccaaatccatgcactaaacagttctaatcaaatcctgaccacaatgtaattctccgctagcccacacaacatcctagattccataccaaagcacgcaactatatccaccaggctatcatcgctgggtctcatcaatcaagttaatgtttaagaaccttctagagtcattcctgtactataccataacaaatcgaccattcatttgctttttatttttttggtattctttctctcccccagacttattctttttagagagtaaacaaaggggaactcgcttactggattgacaccctcggcattttttcaacctttgtaattgatcatttcaaacaatgtataataatggggtcataggaaacattcatacccctatacactgtattaaaatcctatcaatctctcatgtatttttttttttttttttttttttatcaagggagaggagtactatctttttatcacattggtcgacttatcaggtatgaacaaggagtcaagtcccatgaacactaaccgttttgatgaggtaaaagaaagagcagtgagattagcttcagcctctttggattatattgggaatggatgtccttaagtttgttggttgggtttctggattttccattagtcggattgatttgaatctgcaatacttgagcaatctaggcaataaactcgagagatagatcgtaattttagacaaaagttttgactcaataaaacaactatctaagttagaatgacacaactgactcataagaaaagaaaagatgaagttagtaactgactcccccagacttaaataacactgtccccagagttattaagctagaggaatcgaaagaaaaatagtcaaaagtcaaaagttagagaaacgtgagttgccacctgagagtggtgtcgatagatacttgggtggtgtcgatcgacactctggtcgtttgcagagctttgcgaattcagctcaatgttgtagagcttaggttagtgttttcacatggatcctccagttagactgttatatcactaaaaaacacttcaatagttccaacaaagcataagaaaataggtgcaacaagttccaaaataaataacaaatagtctgaaataaagcaaaaaccaagttagaaaacaaagcaagatagggaggacagctaatcctcatgctccaagccggatgtgggtgcgggagagcgatgacgacgacgagtgggagcaacacaaccgaagcgacagagtgtagctatggcgttcctggcgctcttgaagctgtcgacgacgtactgctgaaagacctgtggctccatcaggataggaggaggagaagacagctcatatgggagagctgaagaggaagagccaactcgaggacccccagcagggtcgatgaactcatcctcagtctgagtaggtgcggatcctgaacttgaacctctctgcgtcctggagcggaatgcagaaggtaaggatcggtatgaaaaccaacctcatgctctcttgtaatctctgtaagcgcagggcaaggtaactgaatcatatgttgccatgtatcatctctgacgcaccatagtaagttgcctttaagccagtgagagttcttcagataagtctcatccatagtgaatctcgtggtgttgacctcctctccctcaaagctgatgcgaaaatgctgaaatataggagtgagaagactgccaactctctcagatttcttccctttacctgtaaagggcttggtcttgagagaaaccaagtgatgagcaaagacagcgctaaagttgacatcgcggtcaacctcctcaaatcccaagctatctgaaaagaaatcatgaacagcatgataaagtaataacaactcagaaagtctcatcttgccatgctccatcttgcacaagagtgtgctgttgattagcctaaccaaatatcgcagaacagggtgacgaatctctgagtgtactgcgtccttggaatcataaattccattaccaaccctgctccagaaaacctaagcatcctaaaactgtctaggcagtgaaactccagtgagatcattgtcaaagccataaatgtcgcataatgctttgagtggtagactgtatctgacattgcgagggaagaagatcagagctccttcctgagcattgcgtttcctgtcattcacatagtagaccctaacagaagccatgaattgtctaactagttccggatacaaatcgtactgcctacaacagatggttcccaaacctatgtcatctagcagtcctaaaaccgatttctctatctgcaaatgttgcatcaaaccgaaatctgcaacccgagtaagcaaaatttctacactcattcaggcattatagaacagagtatcataatcatcccaatctggagaaaaagggcgattgatatagtcaccgttagtgaattctctgttgatatccttttcccaaactctttgagaaggaattttctcttttggtgatattggccatggaaatctgtaaatcggaggtagaggcgctgcaactggtgcttccggttgtgaaggacgtaaaccggcggcggtggagaagctccggcgaggatgagcggccatgttgcagatcgatgaaattgacacttgggaaagatagaggatgagattctaatgagattagagcctcaaatcacaaaaaatagtgaagaatcgaaaaatctagagggattttagtgaaaatggtggtcttgaagaaaaatgaaatgaagaagatagagtttaggttatgtcgacttaactggaaaatgatggtgtcaatcgacactcgaatggtgtcgatcgacaccatcgcctttggtcgacacgtttcttttttttttttttttttttttaataatctgaataaaatcctataaaaccaaaaatcttaagttaaactcaattgaatgaaataatgtaaaagaggaatacttactagtgggttgccacccattaagcgcttgtttatagtcaatagcttgactttgcagttgcttaatcaacaggtggcaactgaagatccaaaggcttttctactagaatcttggcttcagcccaatagtgtttgactttgtgtccattcacagcaaatgatcttccattgttatctgtaaaaacgtcggtttcatacggtctaaccgaatggactgtgtaggacctgaccaacgagaagacaattttccaggaaacaatgtcaatatagaatcataaagaattacttggtcattaggctcaaaagttcgagtgaggatcttcttgtcgtggtaagcctttgtgcgttccttgtagagctttgagttgttataggcatgaatttgtatctcatcaacctcattcaactgaataagtctcctttctccagctgatttgatgttgaaattcatcatcttgactgcccaagctgctttctgctctaattccacgggaagataacaagctttaccatagagaagatgaaaaggtgtggtcccaagcggagttttgaaagctgttctataagcccatagtgcatcatctaacttataagaccactctttttttttattttcccactgtcttctcaagaatctctttgatctgcatgttggaaacctcaacatgtccgctcgtttgtggatggtagggagtagcaactcgatgttgaactccatattgaagaagcaatttcgcaagaatcttgttaatgaaatgcttacctccgtcactaatgattatgcgtggcactccaaaacgagggaagatgatagatttgaagagtttcatacaactgctgaatcgttcttcgggctagctataccctctacccacttggagacataatcgacagctactaggatgtagagattcttgtttgaaggtgggaagggtcccatgaaatctataccccaacaatagaagatttcaacttcgaggataaatttttgaggcatcatattacgcttgctgatctttccccttctctgacagggatcacaccgcgatatgaacttctagagcatctcgaaacattgtaggccaccgaaagccttcatgaagaactttggataatgtcttgaaggttgcaaaatgatcaccatagctagagctgtgacaatgcggtaatatatcagggacctctgttgcagcgatgcatctcctctaaactccatcagaacaatgcttatagaggtaaggttcatcccaataatatcgcctactttctcttaggaatctcttcttgttgtaatctgtgaaattatctggttccacatctatagctaagtaattaacaatgtcagcataccatgggtagtccttctcgaccgttgtggtggcgcaattctaagttggtgaccaatttcttgtttgatcgggagggtgtcgatcgacagtttagtggtgtcgatccacaccagcgcgcaaccgcgaatatcaacttcctctgaaaattgagtgtcgatcgacatagaaggagtgtcgatcgacactgaagctcgattctgcaacttatcacatttgcagtcatcttcttcagctctatcaatcatatatatgttctcctcaggaaagaatcgttaatagggacatcatcattgatcctaatgtgtgacaaatgatttgctacaccattttcaactcctttcttatctttaacctcgatgtcaaattcctgaagaagcaaaattcatctcaaaagtcttggatgaatcgggatccgaaagaatcctgagtatccatcaagaaagcaatagtacttatgatttgctaacctctccaacatctgatcgataaatcgtaaggggaaatggtctttcctggtggcaacattcagctttctataattgatgcacatccgatggcctgtgatagtctcagtaggaatcagctcgtctttctcattcttgactactgtaactcctcctttcttaggaactacatgaactggactgacccaactgctatctgaaatcagatagataatccctgcttccaacagcttcataatctctttcttaaccacttctttcggattcggattcaatcttctctaaagttcaactgaagacttagactcatcctcaaggtggttcctatcatgcatacatccggagatatacatgcaatgtcatcaagagaatagccaacagctttacgatgattgcgcagcttgctcatcaataaggtgagttctgcgggattaagagaagcattcacaataacaggataagtagaattttcaccaagaaaagcgtacctcagccctgctggaagtgtttttaaatcgattttaggagccttagctggatcccaatcagaattagtagtcggtgttggagtcacagatggaaaatcttcttcaattataagttgcatcgcatgttcggtctcatctagcagcttagtatatgtagaagtttcattgtccaaatctgcactatcttctatggaagagaccaaaactcgctctagtgggtcttctaattccatctctgaaatactatctgaagctgatgaagtgaaagaatctatcaagaaaaaaattcccttctatgattggtttcttgaccaaagtgttcatatcgaactacatagtaagatctccaacattcagccctatccgtccttgccgaacatctataattgctccaactgtgtgcaagaaggatctcccaaggattaatggatcattaggttccttctaataagacaagactacaaagtctgtaggaatcatgctcttcccaatcatcacaagaacatcgctaagaatcccatttggaattcgggtagaacgatctgccaacacaagagtgataaaggtaggctcagtattagaatacccaagacgcatagtaacttaacgaggcatcaaattcacactagaaccaagatcacataaggctcttgggaagaaatcgtggttgatggtgacacttagtacaaaggttccagggtcaagtagctttcttggaattcgttcctgaatgatatcgcttccttgctcagaaatcatcataacactacattctttcgtcaaattcttagtgaccattgtcttgacataccttcttattgtgggagagagatgaatagcttcaactagaggcatctcaacaatcaacttatcaatcattgccttgcatctaacatcatctaaggcttttcttgactttttaggactcttggggaaaggaattcactgatttgctgacttggtttcagctggaatttgcacattgtctgaacgagctgggtgtcgatcgacaggggatgggtgtcgatcgacaccatcgggaataatttattcctcctccacaaaattgtcgattccactcgacaaaggcaaacagagtcgtcaagagtgcttggtgtcgatcgacaccctggtgtatcgattgacactaagtctttttcagcaattggaaaagatgaaggctgagctgaacgtttgcgctgaagttttggatttagttgctttccactgcgtagtgtgactgcattgatagaggctgatgtaggtgagggctcgaatatatgagagcggagattgtcaatcttgctatttagatctgtgtagagagaatcatatttgctatcaaacttatcttcgagttttggttggcccaccagaatctgggcaagcatggaatcgagtctattgtctaaggagggtggaggggggcttggataggagcagaatttgctgaaacaagagtctctttgcttgcggtggcaatctcagctgaaattcttcgttctctgtcaacttcctgtgtcgaaagactagttaaagcattggtgatgaggagtaatgcttcactagtggttcttgtcatgaagttacaatagcttgctgcatcgagttgactctggtatggcttggctattcctttgtagaatagattgatgaggtgcctatcttggaagccatgttggggatattctcgctaataagacctgaagcggagccaagctgctctaagggactcggctggagcctgagtgaatgaagagatttgcaaacgaagtgcctctttcacggattcatcgaataagtgattcatgaatgcattctttgtatcagtccaattggttcgtgaaccttgttctagttaatgcaatcatgatgttcctctgctcgcgagagagtgggggggggggtgtcgatcgacataggtgtggtgtcgatcgacaccatcacgcgaaaaacgtctttgataatcttcattgctgaaaagcttccaaaattccttattatgctccatagctcccagatgtgtaaatgtacctgaaatgactcaaaacatacgaaaaagactagaaataccctaaaaacaattttaaaactatgttagaaattaataaaaaccaggacatatcaagctcgcagctgtagagttggtgtcgaccgacaccttccagtttcgattgacaccctggaacgctcttctctgagacgattccttatgaaggtgtcgattgatacccctctaatgtcgatcgacactggatccggactgcaccttgtgaggtgcgaataccaatgcagccttagtctatttacactcctcgtgtcccttatccgaggaagcgtcgttctaagaaggagattcatgctgctaagtgcacatccataatggagaagatcctccattctcttcctaaggatgcatctgagacatcttctgctccactcaacatgtatgtcaagcgacttgttgacaatggtattagcttagatgaagcctcactgctgacacgggacattggtgcaatcatgctgcctaaggcacagagagtggacattgttgagtacatctgcaccatcactcctgattagaccactgagaagcttccagatccaggtagcttcgttcttgattgctcaatttccacaagcaagttcagtcgctctttgtgtgatctgggatcaagtatcaacctcatgccttagtctgttgctgagagactaggcatgactaactacatgccgactagaatcactctcctcttcgcggatcgttccaaaagaatccctgaaggaatttttgaagatgttcctgttaaggttggtaactctgttatccctgctgattttgtggtcctcgactatgagaaggaaccaaaggatcctcttatccttgaaagagcgttcctagctacagctgatgctaggtttgatgtgaagagaggtcggatctctctaaaggtttatgatttggagatgaaatttggcatggatggttcagagcttacgaagactatcagtagtattgactctagcacatacacaccttctaagactgctcagaatcccacaacagagccacacacaacgctccaatcagctcagctcgccaatgagagttgtaatgcaacagggtcgatcgacaccaccactcatgtcgatcgacaccctcgggattcacagacagagggttctgcacaacctcttcagcccacaccacttcaggccctttgtgataagttctcatctatctcttctcctgctttaccttcgactaattctttagattcttcgaagtctgcttcacaagataacaagcctagagttctttgaaagcttgtttctcctgttgttcttgcaggtgacgagaagagtgtcgatcgacacaccactgagtgtcgatcgacacctgcagctgctccgaccagatctgtctacagaccgcctgagaaggccaggaggcagcaacaatcctccaccactacaccacatcttgaactccgccaagtcaagctattgactcaaaacaagcgcttagttgaaggcaacccactggtttgatttttcttttccccttgttttattttcttttattttttatttctttttcccgccttcttcggatttgaatgccattggggacagtgtcgtttaagtctggggaggttcttactaacattgcttttatttttgattcttattatttttcgtttttaagtttattgagtctttaaaaaaaaaaaacgttttgtattcatagatcttgactccttgttcataccgactattggaaaatctagatggcaaactaacagacttgaggatatcctagtttccaacacaaccactaaggctggagctaatctcactgctcttcattttacctcttcaaacggttagtattcatagatcttgactccttgttcatacctgatattgagaccaatttgataaaaaagaatgtgttcctctccccttataagaagaaaaagataatgagagattgataggattttcagacagtgtatagggaaaaaaatgtttcctatgaccccactattatacattatttggaatgatcaattacaaaggttggaaaaatgttgagggtgtcgatccagtatgcgagttcccctgtgttttctctcaaaaagaataagtctaggggagagaaagaacaccaaagaaaaaaaaaattataaggaatggtcgatttatcatggtatatagtacaggaatgagtctagaaggatcttgaatgttagcttgtttgatgagacccagcgatcaaagcctggtggatttagttgtggaacttaggtatgtaatctagaatgttgtgtaagcttgtagagaagtacatgttggttaggattcgattagacttgttagacatatggacttagtttggatggtcatggcaataggctagagaatgttgggagttcctttgttttcaaaacctcttccacgggttcggcttttgggttttgcttgagggtaagcaaaagctaagtctgggggagttgatatatccctattttcacttattttatctatgttttaggtataggattttgagtctttatgttgtttctcgagtcttttcagtgtcttttcaagtattctatgcaatgggacaacaatggacatgtcgatcgacaccagttttggcccagcaaagtccaagacgctttcaagtttacagaagaggaaatttgcccaagaagacttctctatttgcattattagtcagtggacgttttatagggttttttatacattgtttagacctaagttttcttttatcaagttctttgcaaaccctattttgagagacataagctattcatccattgttcttgagagattcatccagttcttaatacagtgaagagatcccttctttcccttatcttatttgttgtgcttatgctttcttattcaatcatgttgtttgtttcattcaatatgtctgggtagtcttcttgttaggaatatagggtttctcattagggattcatatggtttagtagattaccccatttgctaggttgaagatccaaagtggagagcttaatccatatatgttagtaggtaaatctctatcaatgaaactattattctttttaaaatattttttaaatatactattgtttttcagtttgttatgaactaacacctacgatctttatgttatagatgtcattagtcaaattgtttcgattggagagctggaaaacttagaagcaagtaacaaaccaacaaccaaaatcgaatttgaaattcgtgatgaaacgtttgttttcatcactattatatttcagtttatacacttttagccatatactaaacttgatctcatcaatcacttgattttcttcccacagtcatgagaggattggttgtactttgtggggtacaattgctaaacagacttttagggcatgtcaagactctaatcgtggaatggtgatttgtatcctcaggtttgtcaaaatcaaggcttacaaagatacaaaatttctatgtgttttttgtatgctaacatataaattcagttaatcactacaagaaatatgaacattattagcacattacgatagcgcagttttcgtaactgctattaaaagtgaaactcggaatttagtaactatattatagcgtttcagaaacactaaacctaataatagcatggtagaaaactaaaatcacttttgaccgccaagccaaaattttgccaaaaccgccaacacttagccaaatatcagttttacactatacgcccattatttatcccaaagaaaaaaaaattcttatcaaccaagcaaaaactaattaatctatttcttggatttactcttttgctctcagtcgcatcctaacatatattctcctcatcgtcttcttcgtcgtgacgtctctcctccatcatcgtcacttgcaaatccagctctccatttcaactccacatcttcttcttctttagatccctcatctttctctccttctcctccttcctctcattcttctacttcgtcttttcctttgttcatttctctctctctctctagcttccaccttcactttaacttctcattaccctaatttttcaagacatatcaattgaaattgaaaagttgctcagaactctaatcatccccttcgttctcagttcttccaatcttcaatttcataaaaaccctaattttaactggtttgttttttggaaattggatttgtctacgttttggaattggctggaaacgcagcgaaggataacaagaagactaggcttgtgccacatcacatacatcttgcagtgagaaacgatgaggagccgaggaagttgcttggtgatgtgatgattgcaaaggtttgattttagcataattttgttcagaaaattcaaatctttttggagatatttgttttgaaattgattttatttattgcattttacgttatggctcatggagaaagcattgtaagaaatcttaggggttctatttttagagttatttacgcacacaaggtgtttgatgaattgacggtgagagagaaatcaagaaacgactctcccaacatgtcttacgcgatgtttgaagaagcctaataggaaatgtgactagactttatagaaggtcagatcccttgttcatcttggtattttttgtttaatggaagttttaaagattgaggaaggggacaaatatgttaaaatagttgaagataagaagaaactttttgcaaatttgagtcaagtcttgacgagaatttagtcttattaatttttttttgttcggttttgtagtgaggattaaggttcacggaggtcggtgttgattatgtgtcattgagaatgacatacctaatattgtagtcttccttattaacaccacttatagtcttagtcttccttatgaacgtcacttatagtcttagtcttccttcaaatttattaacgttgcttataaggaagactatgagttatattacttcagtccagcatctcgacttatatttactaaccttgcaggtatttcctgttacctctaagttatttttttaatcactcttttgtttttgtttttttaattgagaattaggttagtgtagtctcttttgcaggatgattatcatattggtagtatcttcccctgtcttttacgtttaaaaatatgcacatgtgagacaaaatggttgaatctacttatgcgtgaacttaaagattcacctaaatgaaaagctctcaaacttggacaggtatatatttcaaaccagtttattaagtgtcttttgctagtttatattttttggtactaatatctctatatgtgtggatctaatgtatacactgatagtaagtcatcacttgtttaatcatcctagttctgagtagtttctgtatcttaagttgttttttgaatcgtgaatctcttgtaatctctttttcaattaaattttatttcagtatctttgacttataaagtctctttgttgggagaatgtaggagtgaggactacaattacaacctttaaagacgtagatgtgtacgacgtgaagtattgtgcttgtgacaaactaagaagacagatcttgagtaaagatgtgtctactaaagctggagactttgagaattttaagaaggctaaagaaaagtttatgttcaacaagaaagtaggagtttctgaaagttttaacggtctctctcatgaacttgttttgatgttatctagtaacttagtataagacttggtatgtaggttttgtacaatttatctaatataattatttttaataaattcaactaaatatttatgtaaaatagggttatatatatatgaaataagatagcacttaaagatgtaatagagaaataaacaaaaggtataagtgtaatataatacaagaaatataaaatgctacaacacaatataatacaacattaaaattgagctgcaaaaatgataatcataccacataatatacgctatgatatgtttatatagcagagcatagcaaaaaaacgctattctatgtgaccaacctaagatagctccggcaaacacaacgtttatgaatccgctatgtaaacgatattgtagcgttatccatgtgataagagcgtccatattttttgtagtgaatataattttaatctcttacaagctaggtgtaaggagtatatcaaattcttttgatgttactcaagtgcacgtcaatccgcaattccctgaaacagagtttttcaaacaagtgtaatgttcaatattaactgttttacaatgagtaaatggattacttatttatcatattatcatacttatgaaattttgtgtttacagactgccatatgatgtcctaagtctcatctcccgtgataggcagccaaggtgggagatggttgttcataaagatgtagatttccttgattaccaaaggaaatcaatttctgacttgacgagttcaattgaggtatgtatatgtattttatatctacatatgattggttatcaccagttttcatcttaacaataatttttgtgtttttatattggaaaggctagagtgttgtgtactgtatacgccattgacagagactgggcatggtattacattagttgtcgtgcttgcaacaagaaagtaaatcatatccgtgttggagtccatggtgtgaataacaaggggaaaaaacaaaagttctggtgtgacacttgcaaaactgtgtcactaatgtcgttccaaggtaatgaaaaacaatccctgagtatgttaaaactatgaatttttctcattttgtgcttatgcattttataggtttatgctttacgttaatgttatggacaatattggaggggcaaatttttaactctttgattcaatttgctttgaactcattggcgagtcagccacatacgttctcgatggaacacttgatgaggtaagttcagtcaaattattgattttaattttaatgtcgattacatagaatctagacttgcttgcttatttatttctcattaataggttgtggaccagaaaatttaccagaacccgtgaaaaatttaattggaaagacctttctcttcttggtgtgggttgaaaaagagcacatattagataaagaggaagtctatcaagtttggacagttctttgccagggtgacctactagaggaacatctacttgaatattctgctgacatggttgatcctgcctctattgtctcagctggtcaggttagcaaaacaaaacaaaatcatgtttacaatccgtgtattgacaattatataattatattttatatgaatctttcctataggcaccactcatgttagagaatagccatgacacatcagactccataactgcttcttccaagcgtatttacgctaacttgaatggtagtgctgatgaatcttctacctctaagaagatctgtgttgaaccattgactttgaaaagtctaactcagaatttgggctgaattctcaccatgccaaaattggaaaggctagcttcaaggatagtgatgagaaacaaaagggcgctggtaatggagttctagggttgaggagcagcagtccgagttcaaagaaggacgtggttgtgagggtcaaggttgagaaaaaggagtgatccgtatttgtggctgtaacgaataaatttaagtgttttactctgtttttcgttccctctcaaaaactcatgttagagaggttcttttggtttttgattttctagattttggttggtctaaaataagttctctttacttggacatctatttcatgatcttattgctttaatgaagttttcatattcggcattatattttgttctacttacattctaacttataattgtataagtagttcagtaatcttcattagttagatgcaaatacgaagatatgttataaaataatgaccacttggaaataatatcacccgtgttaatagttttcatgttatcttatttatatgcaaatacgaaaattagtcagaaaacatacctggtccttgagtcttagaaatcgcaatagacagtccaccatgagacctttcatcaccatctcatgtaaaagatgtggtaattacaaaataaacacacaaaaaaacttctgatgtaaatgaatgcaagcatcacaacttttttagataatctctatcaatgaaggcaaaaaaacatatttcacggaacccagactaggtaaaactattaggagaaacaatttaaaaaaagtagactttaaattaagaaactctattccaaatattgaaaagggtagcaacggattgaattagacatgataaaatgattgagtgttcaatattctcaatatttacctagcctagtcgtgggttgggagtcaaattaacttttaccacaactattacatgaatttaaaagtaatatctatataaaattccaaaagagaaatgattcaatttactaaagaaacagatttcacacaccctttcaaatgttctctttagtttaaattgaagttttgtgtagattttgaaaacaaaaagcggttgttagtgtaaggaaattttgatttaaggaccttattgataaaagagtaagaatttttttttttaatagttattgttttttgcttttactttaaatgaacaaaaaaataatttttttttgtagttaactagatttgtatatagttagccgaatatcaaaacatgtaaagagaactaaaagagttcttatgctattcttacattaacatttatagattaggttaaatatcttcctttttctgtttctaaaatatgataaaaattaaaatttattcatcttacgagagattgctttaatttattttgtattaaagtaaatacatagaaattcatttatggtaacaaagatgttacaacaataaaatttaaatatatttgatcgaaaaaatattaaaacacacacatattttaagcggttttagagattgagacacaatgactccacacttcatccctcttcttcaagtattgtgtttcacggccaattaagcttggtctgtcagcaatatatttaatgagattatcgtgacacacttttccttcttggacaagatcgttgcaacaagcctcaatgagggttccatttccaaaaacaacagtgattatattcaatgcacatttaggagtgattttaacgagacaagtgtcccttaatgattttgcttcagcttcttcgacagaaaatacaggaacaaacgcacacaccaaagctacaaccataaatagcacagtaacatgagagattagtttagctatattttcgaatgcttggaatttactgacttatttttcctgtatgaaaagaatgtaatgaagtatgtttttttatttagtattctagatatgaaaataggtaaactatttataggtgactgaatatcaaacgtaactaaaataaaatattataaaattaatttcagaaattaatgtgagtttctaaacctcttgataaattaaaacaacgtacgctaaattttatcttttcaatctgtttttgaaatttaaatacaaaattaatgtaagaaccgataacaagttcagcttataaattgaaggattaaaatttaaaaatatgtatccaaattcgaagccaaattattggatatgaagctcaatatttacatagataagattgtaagtaaattaactacaaggttcaaatattaagtacacaaaatatatttgattatgagcgttgaaaagccatactcacattttgtttaattatgttacccatattagaaagcaaattttgaacaagtggtttaatttaaaagactaattaatgggacttgaataatataattaaaagagagggttatggtttagatccataactaataattatgcaagagttccatcaaaaactaaagatatgatctttatcaatgaacgcaaaaaaacataattcaagaactccatactaagtaaaactatttagaaaaactagattttaaatcaagcaacttagttccaaatattaaaaaaggtagcgacaaatttaacttgacataataaatgattgaatgttcaatattctcaatgttaagatagcctagttgtgggctgggagtctaatgaactttttctacaactattacatgaatttaaaagtaatatttctataaaattcaaaaagagaaatgattcagtttcctacagaaacagatttcgtacagcctttagaacgttttctttagttcagaatcgaagttttgtgtagattttgaaaacaaaaagcagttgttagtgttaagagcttttggtttaagagcatcattcttgagggttccttaggttgattcttaggataattgagttagaaatttaattgttttaatgataatttgttaagagcgtctctaatataagagacaattaatcagctaagagcgggataggtgttgaaattagagtggatagaagaaaaatataaaggaaaacaaaaacataaacatcgtaaaacccaatttctcaccgatttctccccgacttcatcgaaaccacagagtaaaacccaattcccgaatcatctacaatctgaaactaaactattctgctcgaaaattttgcaagttgggactatgacgttccgtggagctagaccaattcatcacaagcgagaaagaaggagaatcaaaggaaataggagaagggttttttcgaagcgattgaggcattagagaggatgattagagaaccatcaatgtacgtttagtttcaaaatcgttaatgctgtagaaatctcgagtgaaaagattattattgtttgacataatataagaattatacccataattctatatatacctataaaactgcaaagaatcagtttttctaaatgatggaaaatcctgaagaaattaaggatgattatcaagatgatactgcctcttagatcttaccgaagaacccttggatgatacacgctcatagatcttaccaaagaacatagaatatagaatttcatttgtatagtttttttttttggtagggtggggggacaatgtcccccgcatattattaaaaattaaaaaagaataaaacttaaacacgaacattacgtggcgtgcatacccattcgcatcctcaaaaacaatggaggtgaccacatccggtctagcctcaaacaaatgaaaacctaaaggaagagaaaacacatagtttgctaacccgtctgctaggcggttagtgtaacaacccaccctgtgggacccgctcaagggaccggttgttacagttagcctctctatacacatgaaaaacgcagactagccagccacgcgacataaaaccatagcacaaacgtactaggaaggagagagggtgtgaatctttaatcccgatctaagaaaacccactacaatctccgagtcaacttctaactccaatcttgtaatccgcatctcccaagctatgtatagtttgtaatatacaccccataactccgccaatggagccgaacatatacctatgtttaaagcaaaatcgccacgccaattcccatgctcgtctcgcagaacaccactcgctgttgcaagacccgggttcccaggggaagcaccatccttcccttggagacacccatttaatcaaacgatcctctctaactacctgcatgttttgtaaagacatactcgtctgcgcaatgatcacctctttagcataatccttaaggaaacgaactctatctctgcacttagcattcgtcccaaagatatttccgcattgccatttccatcccaaccaaagcaaagaacgtcgaccaggggctcccatcagcaaccgctccatcgcccaagttactgaagacccactcaagtaaggactgagaaaaaaaagcttgtcttttcctcatgtgaaccgtccgactccatattcctcgcatagcaggacaatccctcaagatatgaataattgtttcttccccttgcttgcagactgagtacaaatctgtatcactcaagtgtctcctcttcctctccacatttgtcatcaccacttggataactggtaaccaaataaaagctcgaactctctcgggcaccactatactccaaacccgagttaaaaacatataggccaatttaaccgtaaaatccctattgatgcttcctccccaagacaccctatccttcgcccccagaatgcaatccagaaccactgacgagagctgtagccttatgtgttgtgacacaaactgttgtataactgcaaaatcccagccaaaaccgtgttttcaaacatccttagccttggtcgcctcgtaaccagctggtaactgtcgcatgaccatcttagatagaggtctatcagttagccatgtatcactccagaaccgtatttcttttccatcaccaatcacccaactaatcccaggtagaacaacatctcgcagcccactccctacacttctccaagttgacgaccatcttctcttcgtcaccaaccaagagtgatcgtgaactcaccaactctatacttacttcttagcaccattgactagagactactcctatcatgtagtacccgccaccacactttagctattaaagcattgttcatgtgttaagtgtctcgaattcccaaacccccatcagatttggcccaacaaactatgttcccagaaatcaaatgttgcttttttctcaatggtgctgccccaaataaatgattcttacagtttatcaagtctcacaagaatactcgctggtaacaacattgtactcattgcatgaactgggatcgaaattaaaacagcctttgtgtgagtaatacggcatgcaaagctcagaaaacggctcctccaacccgaaagtctcgacgtaactctctcaataacatccccataggtatctttgtttattctcgtttttagaactggcatgcctaagtacttccccaaatccttagttgccttaatcccactcacatcgcttatttgcatcgccaaatctcgctgaacattctctgaaaaaagatctttgatttatccaagttaaccttctgcctcaaagtgttacaaaatcgttccaagacttttcttatcactcgtatttgagccaccgaagcttcagcaaaagaataagatcatcggcaaaacaaatatgcgataaagttggtcccccacgagaaaagtgaatgagaatctattctttacctacaaccgcaacttccacttgatgacacagcctctccaaacatagaacaaagagatatggtgagagggggtctccttggcgtaggcctcgggatggtctaaacggctctgtcttttccccattccacataagagacatagaaggacccgtaacgcattgcattatccaccatatccaagattcaggaagtcgtgaagcacgtaacgtatcttccaagaaatcccatctaatccgatcataagctttctccagatcgagttttaataacatcccacacacctctggatttaactgcaaatagagaagcgcgtgatccaaggccatgattggtaaatgagtcactactgcctcatgccacttcaacctcgcatgaccacatcacaagattctgtccaaccgttttgcgatgtatgttgactcaactcgagcatgtctccaagtgaacctgttgcctttaaaacccatatccaccaaagaaagctcattcccaccggttctctcatgcactctcacaattgtattaaagtctcctcctataaaaagtggctatgtgatcccttcaaccacgttctttaacctgctccatagtccactccttctactgactattggggctgcgtaaacaacaattaagtgaaccacttccgcatccttcgtcactgttgcgtgaatatactgatctgatgactccaccactgtcaccacacccacttctgtctgccataagagccacaagcccccactcttacctatggagtctacacgagaggagttatcaaaacctaacccctgacaaatgtggactgctctatccccacccgcatgagtctcaaacaaagccaagatatttgtcttgaatttcttcaaaatgtaacgaattgaacgttgaaagttgggtttattcgcccccggcagttccatagtatgcaattcattgattctatgtaaattaagcttagaaacgccggcgaaaattgctatgccaccgacatgtccgccacttcttcgacggttccctctacaaagaaatttctcggtttgattttaccatcgaaaccgatagttcactagtattctcagttgggtgaccgatctcagttgggcgaccactctcagggttccctaacaccaaatttaactccctttcattcgcaaaagcaccgcctgctcacccggcaacttgtttctccacgcgaagtcgtttcgcagaagccgacaattccacttcacctcttactgggccataaacaagtgcacgcgtgggcctactactagtcaagcttttatgtttttgaccccacatatgtaatgggctttccccctccagtccgtttacttttaaaaactgctcttggcccaccattgcctttctctagcaaacctatctcattaccagccttcccttgcgcaacactctttccttttctggcctgattcccagccttccctaatttcttccgattccatatcctcctctaatccaccaagaaaacaggcaaaaaacgacaacgtaaaacgacaatatgtgtagtcgttttattttgcgacaatgtggcgacagtttaacgactacgatacaacaacaagaaaattcgtcgtgaagtagtcgtccatttacgactaactaggttagttggacgatagtcgttattaaacgactatttaacgattacatttctgaagtgagaaattagtcgtcatgtagtcggtaagtgacgactacgtttccgactacattagttagtcgtctatttggcgactatttgatgactactcttttgtagtcgcaaaggagtcgcaaacgagcataaagttgttgaaaaacgtgtttcgcattttaagtaggtacacctaacttgtgagcgactacgacatgtagtcgtaaataagtcataaaaattcgtcgatatattaaaacttcacgacactcttctttcaccaacaaattaaaacaacaacaacatcaaagaaaaaaaaacgatttaaaagaaaaaaatataagtttattttattgtataatggcgggaaactacaattatggcgggtagtggcagtttttatcgagattggatgtacaagagatttgatgaagtgacggggaatttgtcagccgaatatgtcgcaggagttgagcaattcatgacattcgctaatagtaagcctatagtacaaactagttgaggtaaatttcattgtccttgtagtgtatgcaagaatgaaaaacacattatctcgggtagaagagttaatagtcatttgtttagtcaaggatttatgcctgattattatgtttggtataagcatggaaaagaaatgaatatggatataggaacgagtacttacacggataggacgtattttagtttgaattatgaagaagtgggtaatgttgtagaagatccatatgtggatatggtgaacgatgcatttaattttaacgtggggtatgatgataactatcatcatgatgatagttatcagaatgtggaagaaccggtccgtaaccattgaaataagttctacgacttgttagaaggtgcaaataatccattgtatgatggttatcgtgaagggcagtcacagttatccttagcatctcgactagtgcacaacaaggcggagtataatatgagtgaaaagttggtggactccgtttgcgaaatgtttacaaattctttaccagaaggaaaccagattaccacttcacattaccagaccgagaaattgatgcgcaatttagaacttccatatcatacgattgatgtttgtcagaacaattgtatgctattttggaaagaagacgaaaaagaagatcaatatcgattttgtggcgcacaaagatggaagcctaaggacaaccgtcgaagaactaaattaccatatagtcatatgtggtatctacctattggggaccggttgaagagaatgtatcagagaatgtatcagagccataagacagttgcggcaatgcgatggcatgctgagcaccaatcaaaggagggagaaatgaatcatccttcagatgcagcggagtggagatatttccaagagttacatccctggtttgccgaagaaccatgtaacgtttatttcgggttatgtactgatgggttcaatcgatttggcatgtctcgtaatcattcgttgtggcatgtgatcctgactccatataatttaccccctggtatgtgcatgaatacagagtacttatttcttacaattctgaattctggaccaaatcatcctcgagctagtcttgatgtgttcctccaacctcttattgaggagttaaaagagttgtggtctactggagttgatgcgtacgatgtttcattaagctagaatattaatctaaaagcagtactattgttgacgattagcgactttccggcgtttagcatgttatcaggatggactactcatgataaattgtcttgtccagtttgcatggaaagtacaaagtctttttctctacccaatggacggaagacatgctggtttgattgtcactgtagatttcttcctcatggccatccatcccgtaggaacagaaaagactttgtgaaaggaagagaagtttctagcgagtatccacccgaatctttgacagggaagcaagtttattacgagtggttggctagtgtaaatccaccaaaaacgaaggatgttggtgggaacggtcatgaaaagaagatgctaggctatgggaaagaacataattggcacaaagaaagcatcttgtgggagttgtcttactggaaggacctcaatcttcgacatattattgatgtgatgcatacagagaagaattttcttgacaacatcatgaacactctcttgcgtgttaaggataaatcaaaagacaatatcatgtcaagattggatattgagaaattttgttctcggccaggcttacatattgatagtaatggtaaagctccatttccaacgtattcattgacagacgaagcgaaacagagtttatttcaatgtgtgaaacatgatgttagatttccagatggttattctagcgatttggctagttgtgtagatctagagaatggaaagttttcaggcatgaagagtcatgattgtcatgtttttatggagcgactacttccatttatctttgctgaactccttgatcggaatgtccaccttgccttatcaggtacagtacttactattttatttgccaacatttttttatctaattatttaacttgcacatatattttaggaatttgagcatttttccgggacctatgttcgagaactttacagacgagtcgcgttcaaattctcaaagagaacatagttttaatcatctgtaacttggaaaagatttttccaccatcattttttgatgttatggaacacttacctatccatctcccatacgaagctgaattgggtggccctgtccaatataggtggatgtatccatttgagaggtttttcaaaaagttgaaaggaaaagcaaagaacaaaagatatgatgcaggctcaattgttgagtcatatatcaatgacgagattgcttactgttcagagcattactttcccgatcatatacaaataaaatcaaggtaaatacatttatttatttagctattttctatacttcgatcttcattcaattacatgaatcaggttaacaagattcgatgaaggtgaagttcctgtatatcatgtccctggagtacctatcatatttatgcacgtcggccgtccaagtggtgaaatgcatgtagaatggcttccagagaaagactaccaaagcgcacatgcatatgttttaagaaattgtgactattttaaaccatttgagaggtatttttaatcactattcgtttgtaaattttcactaagatcacttcgatttatttttctttgtttgtaaatatagtacgttcgaggattgtctttctgcgaaatatccatgcttgtccgaacaagaactctacgcgagaagagctgaagaatatcattatgtgttaaagaatatgtaagtctacataaatttcttgcattcgaaaagtgagaatcatatttatatgtattaatattatttatctattatctaggtaacatattggaacactacttctccattttctacttgggttcaagaaattgtgcaaggacctttgaacaaggtcaaaacttggcaaatgtatttcacaagaggatatatgtttcatacgcaaaattacggccctggacgaaagacatgtaactatgggatatgtgttaaaggtgaaaattacgctgattcatctaatgaagcggatttctacggtaccttaactgatatcatagaactcgaatatgagggcatcgtcaatttgaggatcacactttttaagtgtaagtggtatgacccaaagattgggagaggcactcgacgaagccacggtggcgttgtagacgttatatctacgagaaaatacaataaatacgagccatttattcttggtacgtaattttgaagaggtcaaatatgtttctctgttaattattaatattgttgtttgatatatgtataacttgtgtatacaagatctaaagcagatcaggtttgttatattccgtatccatatacaaagaaaccgaagaacatttggctcaatgttttaaaagtcaatccgaggagaaacatttctggagaatatgaaaacaataatccgactcttttgcaaacagaaatgatgatgctgttttactcactacaattgaagatcttgtattagaaaatccggtagaaagcttaaacctaataatccttgattacgatgtcggggattctgaactagaagacgaattccgatgtaatttatcgtcctcggacgaagatgaagtagaatatgaagaataataaatgtgtgaagtatatgtttaattatttgataaaacatttgaataaattatgctttataatatatcattgaacatttaatttgttcatgaatattaaatatgtaaaattatttcaatttcaaaagtataaggtgactattatgctactacttggcgactaaattataatttggtgggcttccaaataacgaagcccaaaaccgatagagatgtaacaataatacgactactcaacgactaccctttgctttgttgggtttctaaatatcgaagcccaaacccaataaaaacagtgacgcttatgcgattaattagcgactacagcttaatttgttgggctaccatatatcaaagcccaaatccaatatactatgtgacaattatgcgactattacatgactacgttttaaattgttgggctccgaaatattgaagcccaaacccaaatcatttaggtgacagatttgcgactactttgcgaccacaaacgaagttgttgggcttctaattctcgaagccaaaacctaataaaaacggtgacagatttgctactcttttgcgactacagacgaagttgttgggcttttgaatttcgaggcccaaacccaaatcatttagtgacaataatacgactacaatgcgactactacaatgttgaaaaccctaaatcgaatcatttctcattcctaacacttagccaaattcttcttcatctctcgatctctcttcttcttcttcttcctctgaaaccctaaacttcttcgatctgttcatcttcttcttcaatcttcttcaaacttcttcaatcttcttcaatcttcttcatctctcgatcttcggatcttcttcttcttgttcgatctctcgatcttcttcttcttcgatccctactcttcttctttgatcttattcctcttcttcatttcttcgatctgcaacttcttcatattctcttaatcgatctcgacagatctctcttcttccaagcagatctctccgtcgatctaacatgcctaaagtcggtcgaggtggctcccgaaagcggaagacgacgcctaatgttactcagagagccggcggttcaacgacgccaaaacctcgggatctccctcagcaatacaatttcactccggcgtcggcggttcaagttccagcgacgcagccggctcaagctgttgtccgttcaacgtcagccccccaagtacgcgaatatccaccgctactacaactcttccagaactccaccactcaaccttagcgtggtggtgctccgcctcgatctaaagaggttcacttcaatccaccgtcggaagagcctgctcagcaagatcctgagtcgccagatactgacaatctagctcacagccacccttcgtctcaagggaacaacttccaagaggaagctcgtaggacgttgccggagcttcaagaagactcggcggtggctctgcaagatattctctcagtgccaaacagggagcaatggacttgtgtattgtctctgattcccaggccaaaaaccgagtggtaagtctctcttcctctaatttgttttcgtgttatttgcctttgtagtgtgtaaccagtagacttgtgaatcctggaacatagttgtgaatgatgggctttgttggatgtttgttatgtgttgtgtaacatagtagacttgtcaatactcgtgtgtgctcttgtgaatactcgtgtgtccttgttcagttctatacttgtgaatcgtgttctcttgttaatctagtctcttgttaatcgtgttctcttgatgctctattgtggaagttgactttgatgtcttttaattgtgttatgttgctactcatgctcttgttatgttctatagtatgttctgttcttaattgtgttctgttgctactcatgctctattgttgaacatagttgacttttgaacttagcatgttttaggaatagacatttattatctgccttagttctatattgttgtgtgctcttgttcagttctatagtgtgtgttctgttgtgaatctgcctcagttctgcctgtgtagtgtgtaatatactagacttgtgaatctgcctcagttctatagtctaatctcatagctgttgttgtgttaggattttttaacatgtttacttctttcattggttcatgtgcttggaggtttactcgcgacagtggatctaaactggttggaaatatcacaaggatctttactcaaaactttaatgctccctactataattggtcctgtgtgccattggctaaaagagagagactgtttttagagtttgcggtaagcttcctgtatatatttgctcttgttcagtctttgttttatagtctgctcaagttcagttcactaacttcttcctttttttgaagaaaactcaccattgggatcccttaatcacagggatagtccaatattacttcaatgagatcgtcaagagacgcttgaaggacatggttagtaccgcaaggagaactcgagagcagcctccatggattggagaaactctgtgggaaacaatgtgtgcttattgggacacagaagaagcctagaaaaggagtcagacctattctaaagctcgtctctctgaccgtaacggtctcggtctacacatccactactctgggccaaagtcttatcaagaaatccaagatgaattggtaagtgttttagcatcctttcatgtcttttagtgacattcaaatcataagttagagttctattgcgtgtgatgttcagttcaagctgtctgttgacttgtgaggatattgatctgtgtttgcaggaagagaaattgggaagaccggtccatcttggtgaggtgttcatcgagacacacactaagtgggatggcacttatgttgatcggaaggcgcagaagattgctctaacttatgagcagaatgtgagagataagctgtctgaactggaggctgcagcttctactgtctctgatggcacttcacgacctcgggatctcacagtagatgagtatacaaccatctttctcgaggtaagatgttgtagtctaattcagaatcttagagtccattgatgcattcagtcactaattgtcttcctctctatttttgcaatctatagatagggattcaagaggcaatccttatggacttggatgtctgaaagacactgatatgtctataatttgcatgatttaggcattcattcttcaccactttgtcaatgtttcatccacaaatcatctcattaggagtcgttttagtgtgttttacatacttaggacgattttgcattaggattgcatgtgaatggcatctttggttgttttcaggtactttggatgcttttggagttcaaacagaggaaaaacagaacataaagtcggaatgcccaatgacgcttcggcaaaagtactctatcgcagcctcggagccctgctagggcaaatcactctatcgcaaccccggagaatcaagcagctcagtttcactcaatcgcgaagccggaggaatcaccccatcagaaccactcgatcaccactcgaccaccaagaagcctatctgctcgttctgcactcaaccagacaagctgagaacaaagaagagaagagaagccgaagaaaccactcgatcaccacctcatgacatccactcgatcgcactcgatcacagggtcgctggaccattcaatctcgacttcactacatctcactagatcgcaaaacggagcccctgaagcccagtttgatcaatgacatactcgatcactaggaagctcatttcagcccgttagatgccaatgacacattctgtcgcaggatcatgacgtgaagattcgctatatatttagtttccttatttgtttcatttctcgcttatataaactgcctcttagggttttccctagggcatccgttattatctcgcttttacattttcgcaactttcatagccgcaatgtttctcctgcgactttgtaaataccgcttttgtttttgtttctgtgtttatcttgaattttttcacaaattttgattacacaagagactgtgtaatttaagtttgggagagggttcaagacgtatttgacttgttttttgtgaatatcatttgagtctgcatatcatctaagtcatagaaaaaaacaaaaaaaatgtttttttttgaaaatgaaatccacaaaaacagagtgatcatttagttgcattacatttagaatcgagtctagagtgtttcatatatgattgttgcatatgcataggggataatgaggaaatagccttgtaagcatgatgattcactaaaatgagttattagttctttgaggcatttgaatgactttgaagtaaaaccgcaccatgttctatagaaaccactcgatgcatgtcatgacaccttttcctgtcaatttgaaattgaatctgacttataattatcatgtttgcatcgtttttgaactcgtggatagaatacatatttggattttctttcacttattcaccactcttgctaatccaagtagctgcttctattattggagtagttcccccacccttaaccaatccttctttcaagccatgttattttgtgagagcatgtgaggcctattttcatgattgagcttggtagaacgtgttaggtttgagccgacaagagtagtatctcatgtagttccaatccgcgttttcggacttggtaggactaggtgggaacttatttggggattgagattgagtgagaaaagaaaaagaaagaaaaataaaatgggttagagtatttaggagaaggaagctgaaaatcatattgtggtctagtgaatgtttgggaagcatagaattgttaagatatgctctaaaaaatagatggcaacaaaaacagaaaaagaaaaaaaaaattataagagccataagagtttaagaaaaacccaattcactagactagactcatagagtttaagaaaagcttctccttaagaacaagagccaaagaaaagaaaaagaaacattgatccaagaaaaaatcgaaatatgcctttagtgcaaaagggtagacttaggatcatcattgggtttagatataggaccatctacttgttattcatggtttatgtcattgggtagaaggggtgctattcttgtatgcataggttggcacttacctttagcattcttctaaagctcagtcctttttcattgagagtcccctgctattaaaatctgaaccactaaaaatggaccatctttgtctcataacctgtcattagccaaatgagttcactagcgatgcatatcttgtttcatgtttttgaacttaatgaatgttaaagggattggttgatcttgaggcattgtgcatttgagtgtaggtttggatcataacagagcatggctaaagtttctaagtagaagtcgatcacctcgcatcttagaactgttagccggtacattgatcttaattgtcatatctcatgctttggttctgaatccccaacttcaaacctctccttccgctgatgtcttcttgtttgcttgagggcaagcaaagactaagtttgggggagttgatatgtctataatttgcatgatttaggcattcattcttcaccactttgtcaatgtttcatccacaaatcatctcattaggagtcgttttagttttttttacatacttaggacgattttgcattaggattgcatgtgcatggcatatttggttattttcaggtactttggatgcttttggagttcaaacagaggaacaatagaacataaagtcggaatgcccaatgacgccttcggcaaaagtactctatcgcagcctcgaagccctgccagggcaaatcactctatcgcaaccccagagaagcaagcagctcagtttcactcaatcgcgaagccggaggaatcaccccatcagaaccactcgatcaccactcgaccaccaagaagcctatctgctcgttctgcactcaaccagacaagctgagaataaagaagagaagagaagccgaagaaaccactcgatcaccacctcatgacatccactcgatcgcactcgatcacagggtcgctggaccattcaatctcgacttcactgcatctcactcgatcgcaagacgtagcccttgaagcccagtttgatcaatgacatactcgatcactaggaagctcatttcagcctgttagatgccaatgacacatttggtcgcaggatcatgacgtgaagattcgctatatatttagtttccttatttgtttcatttctcgcttatataaactgcctcttagggttttccattgggcatccgttattatctcgcttttttacattttcgcaactttgccgtagtgtttctcctgcgactttgtattttcactttcaagtatttgatattcagttttcgtttaagtctttcgtcatttctgttatcatgttttcaatcgttgctttgctattgcctttgattatgtgtgagtagtgaactgtatttctgaggatgggatagaatagttgtggtttacttggtcgttttaggtggttgagtttagaatactagaatcccttctggattaggtgcgtttattgcttgtttcgctggctaatgtggaatatgagtccagacgtccagcgctcagaaggcgttttatgggcgttggatcctattaattccagagatatctgactctaccccaagggatttgctgtagagagggtattggctttaacatgttgattcgataatgcctgcttagttagagatcgctaaagggatttaggtcagtatctagctttgctttaggatttctatcacgggagtgaattaatctgttgttgaacttgttgtctagggatagcttctgtgaagttttgtcaaccgcctaaatagattaaggagaccacactattcgattaccccatccttaggaatcatttatccatttgattgcctgttatcatttctgctttgttattcacttgcctgctattgccatttctgcttttagtttcatttcatttctgttattgcatactaggactgttagaaccaatcaactttctgcttggcttgacttagagctttctgatcatatctcatctgtttgcatcacaccggattggattgacatcctaaaatactacaacgacaagatagtgttttagggattaattgagtaaaatcctactatcagacactctaggcagtgccaaccgccaactcgccggagactcaacatcctttcaagccttagaagaatggctgcaggaagctcaacggaaaattgaagagcaggctgcatataatgagaagcgggatgctgagattgcagcccgagaagctgagtcagcccgagtcacaactgagcaaaaggacaaactcgaacacttgtccttagtcgagaagtatctccgccaaactgatccgcaattcttggacttcatggccactcactcttccatatcgactgagcgtctcccaagtactccacctactgctccatagatttaactttccaaacactatacttgaacttatgtttatttgaataaagttgtttgtttaagaacaagatacttttatgtgtatttgaacttgattttcaatatatgtataccttttcataatttatagcatttcgaataacaaacaacaacaaacaacaacaaaccataacactaaacaacatacaagaaacccaacaatcgatgaccaaatttttattcggacaaaatcagaagtcgcaaaatagtcgtaaaaaagtagccaattagacatatagtagtcgtaaaatagtcaccaaaattaccgactattttaagacaaaccaaattagtcataacctaatcgtatacgactattatatgactaagtatatcatatccttagtattttacatttactcgtttaatagtcggcatattgtcgtaaactattttacgactattttgcgataacctgaaagatacccagggttcattatatttactcggaaaatagtcgtaacattgtcggaagaatttaacgactatgggacgactatatgtttcacacgctatgtacagtgttattaatcgtgaaattgtcgccaattagtcgccattatagtacgactactcaacgactaatttatattgtatggtctgttgtcgtaacttagtcgtaaatcaacgacttatcgactatggtataacgactactgtcattagtcgtggattagtcgtagtttcagatttgacgactactaatcgactacttagtaagtcgtttattgcatgttttcttgtagtgacattcaccggatctccttcagatttcttcccaaacctgggcccgaacttccggcccccaacactaccagctttgacggtttctccggccgattctccggtttcctacttggtcgcctgaccatggtgaaaccatcatttcccgattggttcttcttaggaacaccctgtgaaaaatctcgtggaccttcacttacatccgttcgaggaccctcctttgactgttcttggaccactctgggacacgtatgtaccaagtgtccatacaagccacatgttgagcaaatgttggtcagaccctcataggccacatagtacctgtctccgttcaccattattgtccctttgagtggtttggctaagttcatttctacacaaactcttgcaaaacgagctctttcatgattcaacgtcatcgtatccactttgaagggcttacccaaacctcctgcgatactcatcaaaatagatggatgataaaaattcaccggcacattggttaaacgaatccacacaggtgttgtagcaatcacatcacgtaacgggtcaaactccggcaaccaagcttgaaccgtgagattgcttccaaacactctccatggatcgcctgttaaggcagctaaatactcttcctgcaactcaaacctgatcatgaagaattgacggggtagatccattactgtcatcatccccttaggattccacaactcccgaagtttcttattaaaaatttaatatttcatttgtatagttgaatacatagtttataaacgcatgatgctttttgggccttacctatggtccaacgtgacttggacgttcttctaatttcacttctcgaatagacatctcaagaatagtggaagaacaacggccattgctattttaagcaacgtaggattttcttgcaagcgctagtataactctaaaggatgtaatgtagtggacatatattttttcgtattctcaaacatttcaggctaatccaagaggttacttgaatgattttattaataatctatctcaatacttggataagttaaatacccatattgatagtatgaataagttcacaagtggattttagctattctacatatgattcaaatctcaaaaatatgtggaacactagaacttaacaattgaaatcttatttggtcgagcttatatggaaaaaagtgggcacaaatcaatagtttaactaatcgttttcatttatatttgcctcgtatttagttaaactattatgtcatgtatgtttcaaaatttataagttgtaatagttattaagttttttaaaactaaaagagttttaatatttaaataatttttttttccttaagaactccaagctaagaacctaccattgcatcaccaaaattttaatctcttaaccaaactcttaagatcaaaattttcaaaattaatcatatatatttctaagaactattctaatactaatctaagagactatcaataatgatgttctaaagacttttgggataaaatagtacaaattttgtttttttataaaagttaatgtgttttgcttttgcttgaaatgaacaaaaaataactaaatctgtaattaccttgattggtatatagttagccaaatattaaaacatatatatatatatctatatatctatatatatagaacagaaccaaaagtgtttacaatatcatttttggattgagttaaatatgttcctttttctgtttttaaaatagaaaataattgaaatttattcatcttaggaaagattgctttcatttttttattaaagtaaatacatagaaattaatttagagaaattcctaaaaatagcactaaagcaagttgtatgggtaagaatagcacacattccaaaaatagcaatacttgacttactatgaagtttttgttctagaagtcttatcacaaatttattttttcaatatatcacaacttttatataaaatcaatttaaccaaaataaattagaaataaatttaaaatattatatttgggttttcaattttcaatttaaagtaaatatttcaacaatttaaaagaaattttgattcatttttatgttagtttataatattatatttaggttccctatttctaatttatggtatatattttcaccatttaaaagagattttttattttaatattagtttgtagtattatatttgggttgcctatttccaatttagggtatctatttccactattttaaaaaaaattgattcaatttaataatagattagtgtttgctctcatttttattttctatcttatattttagttaagtttaattgaaatttatagtgctatttgtggaattttagaaatattgtgctaattttagaagaaaaagttttttttgtgctatttttgtcaattgcccaaaaatatatcgatgtgtttagatatagatataaccaagccacgttctattctgccatcattttggaaaaactattctggtgtaccatcttttattctgagtaccactcgagcatgtgcaattacatctctctccttaatgaataactgagggagaatttcaaaataaagagtaaatcatttagtaaaaaagaaaagaataacgaccgttaccaaaatcgcgaacctactctcctgccgacgtgattttctccgacttcgccgtcggcgacttgagcttcgatttcgccggcgatttgagctctaatttcaccggcgagttagcttccaagatagccgtagcttccaagccgataatctgctcccaaagtgagcttcctcttcaacggcaaaagtaaatccgatctcgttttcatatgtagattaatgtgaatttcttgttggagttagttgttaataacataaaattgttgtattgttcattctgggctgttgtatcgttttgaatcagagagtttagtgagtgttcaatcgaaatttacgatttgtgaaacccagaattgacgaactgggacaaatggtaaaactgagatataatagtataagcggtacaagtgttttattgagatacaataggacaggtggtacaaatggtattagtgagttataatataggtacaattatttctaaatctgaatgattacgtaattgtgtttttataatttatttgtaattacaggagacgatgaagaacaagcacacattcatacaatttgacaatgggtattattcagaagagcatgagtggatttcaaacaattctttaagtggtgtattgttgagcacgtcaaaggtaacatactctatgttagtagaaaagatatgcaagaagattggaatagatgaaacctcaaggaaggtgaaattgagttatattctatgcacatctcagagacagacatctattgtagatgatgatgcctttttaagttatctaacggtagtgaatgctaagagaattagaccagctttgaacgtggaggtagtaaataaagaatctgagagggtggaacaaatttcaagggtagagagaagaagttcagttggtgttaattatgaggagttgaatgcatttgatgtagagaatggtggagtagtgacgatttttagaggagaaactgcaggaggtaattgtgtgaatgatgaaccgattattgaagaggctaatagtgtagaagaggctattgagaatgcggatagccgggtttttgaagaggctatagagaatgtagttattgaagatagggagcatgtggatagccggatggatgttgctgaagataatggtgttgatggtagaattgagtattatgagcttccatgtgttggtgaaggaagtcagagtagtgagaaaagtcagagtgttacggaatgggaagatggaacggggattgaattgcaccaagaatttgtttctaaggaggccgtgcaagatttggttaagagagctgcaaataagtattgttttgcgaccacaactatagcgtcagatccacagcgactcatgttacgatgtcggcaatctaaaacaacaggttgtcgatggtatttacgatgtgcaaaagtaaagagttcagattgttttagtgttagagttcacaggaagatgcacacatgcaagcggtctaataagaactcaggcaatggtaaacataccgacacaccacgattaatcgcgtctattttgcatgaggattatccaggtgagtttcaaactccaccaccttaaagcataatgagtattgttcggggaagaatgggtttgcattgctcgtatgctaccgcatggagagggaaaagacaacacgttagtgatgtgcgtggtagtcctgagaaaagctacaccgacttgtactcttacctgcacgtattaaaggaggtgaatcccgggacaatatcatatgtggaagtggatgcacaacaaaagttcaagtacttattcgttgctttgggtgcttgcattgaagggttcaaagttatgaggaaagttgttattgtggatgccacttttcttaagaccgtatacggcggtatgctagttttcgcaacagcccaagatcctaatcatcacaattatatcattgcgtctgctgtaattgatagggagaacgatgctagttggtcgtaattctttaacaagctgaaaacagttataccagatgaactaaggtttggtttttgtgagtgatagacatcatggtttttgtgagtgatagacatcagagcatcatcaaatcaattatgcaagtgtttccaaacgtgagacatggccattgtgtttggcatttgtctcaaaacgttaaagtacgagtgaaaactgataaggaagaagcgacggctaacttcattgcatgcgcacatgtttatactcagtttgagttcacgagagagtatgctcgatttaggagaagatttcctaatgtcggtacgtatttggatcgatgggctcctgtggaaaattgggctaggtgctattttgaaggggatatgtataacatagacacgagcaatgcgtgtgaatcattgaacagtacgtttgagcgtgcaaggaattatttccttttacctttgcttgatgcgataattgagaaaatttcagaatggtttaacaaacataggaaggagtctgttaaatattctgaaacaaggggtcttgtgccggttgtggagaacgaaatacactccttatgcccaattgcgaaaacgatgccggtcaccgagcttaacaggtttgaacgtcaatacagcgtcattgacgaaggtggtatgtcttattctgttgacttgctaaggaaaacttgttcttgccgacgttttgatgttgacaagtacccgtgtgtacatgcgattgccgctgcccgaaactttgtggggaccgaatggatattagatggtctcgaaatggaagacctaacttcgcattattaccatatgaatatgtggatattggcataccacataaccatttatacagtcccacattcatcagtttggattatttctgatgagataagacaattgatagtcttaccgccggatacaacaactaaaccggggagaaatcaagaaacccggtttccatcaacaggggaacgtcgtcgaaagaggactaacaacaagtttcagcctgggattaatatcaacgcgtggttgcagcccgaggagtccgattcataattaaatgtgtattttgtgttgtgttgttatgtctgtaccgtgtacttgtgttgtatgtactattgcttcatgtattatgtcttcatttttaagtactttggaattttcttaagtattgtgttgttatgtctgtaccgtgtacttgtgtcgtctgaactattgcttcatttttaagtactttggaattttgttaagtgttattatgtatgtaccttgtacttgtaccgtatgtactagttctttcatgtttatctcttacaataaaacccatcctatatatataagaaagaaatataattttagtattctttttttttacttaaatttgcttcaatttaatttaatttaaatatttttattatatcaaaaatatgggtttttctatgaaaaactatccagtttatgggttttttaatgaaaaatacacctctctctacttttaattaaaactataattatttctaatatattaaatgacaatttttaagaaattgtatttttaatatatttttactatttatgagacaaatacagtttatctgttttatctactaaaatatgatattattaaaaaagaggtaattttttaatttttctcataattataaagaataagtttcatacttggaaaatctttctatacattgttctggaacatttattaatcacttatactaattatcatacaatctaaaaaacaattgaacatattatactcatcaattcagaaaacgcttcttacattaaatgttattcattgtatcaggttggaccatcttgcattaaacatggcaaaacgcatatatttggaaaattatataactaaaacatgatatcttattattaaacatattatatcatctttccaactaaaagttaattcccttaatgaagtccaactctaaatactaaaacttcaacaaagtacaaataaattgagtacgggacaactgaataacttatgccacaactatggctaatgcgtagtattttgtctgggcccgcatttcacttttattaccataataactattgtgtgttcacactatgcgttcacactgtgtattcacactatgtattttaatttcaattcaaaaaatctttctcatctcattaaattacaaaattttctctctctttctttatttccttcttctccttttttctctcgaaaagttttcttctctccttctctcttctctgacgacgaacctccgccgacgaacaacacaacgaacctccgccgacgaacaacacgacgaacctccgccgacgccgaatctttcgcatcagccgccggatccaagttcattggtaagtttcgggttggatagaaaataaattagagttttgattttcccccaattccattgaattatggtttgcaaacgaattagagttgccgtttatgataatttgatatctaggggttggattttagattttcttaaagatctagggtttggatgttagggttatattttggaatttatccccttttgattttcatgtgtttggctatgtagcaaataatgccacttagttattcgtcaccttcttcatcagaggaacgatccgatgatccttccaagtacgatggtgattttggtgttccccaaatctgtttttgtggtaaacagcttgagcttgtagagcgtcttattggcgatcaaaagaagacatttctcaaatgtccgatgagtggtcaagatgataattatcacgtagacaagggttgggatcttgcagttcacgagcagtgcttttgcatcgacaaacgatttggcgagcacagggaattgattcaaaacgcattcaaatttggaggtgatagtaatcgtctccagattaaccaaatccgtgctgaaattgaggacctcaaagaccgcttggacaagaaagatgcagagatcgcaaggtttatggatgcacttggaaagaagtaaaatgatttaattgactttgtgattgtatttcctttttatgttgcaacaagtatgttaaagtttgaaactatgttgaattcctatttctagagtcatttgtacctttttaacttgttttgaagtaatttgtacctctttcggaattgagttgtacctctctataaactacttgtacctctttcggaattgagttgtacctctctataaactacttgtacctcttttttgaactcacttgtacttgttttgaactcatttgtacttgttctgacttgttagttgtacctcttttggaattgagttgtacctcactataaactacgtgtactttttgttttgaacatcatcctaaataccataaataccataaaaacaagatcaaccatcctaaatacataagtaacataaatcccaaaacaacatgatcaatcatcctaaataacaaaaacacaagtcttcaatacatccaaaatacataagtaaatcgttcccacaaacacacaagtcttcaatacatttttctccaaacgtaaaccggacccttggtccctctcattctctccgcggtataaggtggcttgtggaatctcgatggatttatcttacgcttctttttgccaccttcatcctcgtcctcaggatcctcgtctcttttcttcttctcattcttcttatcgttgcactttccctttcccttcctccctttcttcttcgttttcttcttcagcgtctcatcatcgcctttatccgcttcagtttccctttcaacttgaacatcaccttcaaaagaaaagacaaccattcataaccaacaaacatcatatattaaaaagatcaaagattgacaaaacaaaccataccgattggaacatccggaacataaagaaccatggcagaactcggatcatcgggctcaacaaactcgagcacaaaaccctcaggctcaacaccatcggtctcaacatcatgggtctcaacaccaccggtctcaacaccatcggtctcaacaccatcggtctcaacagcctcgggctcaacatcatgggtctcattagcctcgggctcaacatcatgggtctcattagcctcgggctcaacatcatgggtctcattagcctcgggctcaacactagcctcgggctcaacactagcctcggtctcaatagccacattcacgttcttctccttattaccaccatcttccttctccttattcacatcggaatggaccttcttctcaaatggaggcacactctcaccggcttgtctcctttcaatggttacaagcctttcattgtgttccgccaacatcgccatcactctcttaaagccttcatcaatagcttccttcaaagagcaagagctactgctgcccggaacatccggaacatgtctcggaacattctcttcctccatttgctcgccgccgcttcgagcccggacatccgcttcaaacatatccttccagaagaatctcttcctctctttgatcaaacggtttctccagctatcgacaaccggatcaacaaaccctatcccatcatcaacatgatcaccatctacaatccgcctcaacaaatctttctcctcgtaatccgattccaaaacgctagagataacctatacaaattcacacatcaaaaataatcatattctagctcatagataactgggacaactctagagagaactgggacaactcgtacctttacacttccaagctcctcgtttatctcttccaacgagaaccctttcatgacactactagagaatttggccttacacattcccggacactcattctcgaaccttacaaggtctctaaacttttgtcccaaatgtggaatagcctcaaaaggcaaaatctacacattcaaagtaaaagtcacattagtattatttttaagtctactaatgcatcttataatggatattactctaaattgtgtcctctaatggaagaataaatccggagaaacaagtctgcaattttgctttccctttcatcgatttcattaccgacttgataccttccatacatccatcaaatgtgaaaggaccccatgggaatgtctcacatgcacgcacatcatcaacaatcttcagaaagaatttgtcaatgtttccatcagcctttgacttggccgcgatcaccttgcacaaaaaagcaagatagccaacttcttcctatctgtcttcttcttttcttcacatttcttcatttcatccaactttttcgcaacatcaacgatcttaatcccagataccttcttaaagatctttttggcaaacttcaaatctgcatccacgatcttcatactcggttgcaactcctccgggtaatcatgacaatcgaaaccacataacaatgcatgctctttaatggaatacctaataggcactccattaaccacaaaccagcactccctatccatctctgtctgtgctgtgcgaagcaaaagcatccacaagccttgggtcttgtggtttttctcctcaggcatgtggaatacatgcctaaactgtggatgcgccttgaaccatggcaaatcttctttaaactcctccaaatacttcactgtctgctgcacagtgcatctcgtccctatcttacacgtcttcacgtattcgcttggactaaagaacatcctcttcggctgcattggttgttcctcatcatcaagttcctgaaatttcatacacaaacatacaattaatattttgctgtactacttgtactagttatctcataacaacattatcaacttttctcagaattgaaactatacgtattaaatttatgcaccaatcatacaattaaattcatgcaccaatcaaacaaaccaatgtatgatcacgttaacgtataaatccatgcaccaatcacataagttgaaactatactattaagttgtcctaagtgttttctagttgtccctatacactactttcaatattcaaacaaaattttcagaaattaatgttacctcagggttttcttcttccctttctttttcctcttcttgagggttttcttccatcccgtgagatggcattggttcatcatcatcaatttcctgaaaattcatacacaaccataaaattaatatttctcgttatctcagaccaacattataaacttttctcagaatccaattttctaatgcaaatcaatgtatgattgatcacgtataaatccatgcatgcaccaatcaaacaaaccaatactattaagttgtactcattgttttctagttgtctctatacactattttcaatattcaaacacaatttacagaaataaccatttacctcagattcttcttcttccccttctttttcctcttctttagggttttcttccatcccctgagactgcattggttccacatcatcaccttcctgaaaattcatacacaaccataaaattaatatttcgcgttatctcagaccaacattataaacttttctcagaatccaattttctaatgcaaattaatgtatgattgatcacatataaattcatgcatccaccaatcaaacaaaccaatactattaagttgtactcattgttttctagttgttcctatacactactttcaatattcaaacacaatttacagaaataaccatttacctcagattcttcttcttcttccccttctttttcctcttcttcagggttttcttccatcccctgagactgcattggttcctcatcatcaacttcctgaaaattcatacataaccataaaattaatatttcgttgtgctacttgtactagttatctcagaacaacattatcaacttttctcagaattcaattttctaatgtaacccaatgtatgattaatcacgtatatccacgcaccaattacacagacctatactattaacttgtactcattgttttctagttgtacctaaacactacatcaatattcacacaaaattttcataaatttgtatatacctcagaaatcttttcttcttccggttcgtgaaggtttttcggaggctcttgttcacagttttcgtcttcaaatttgttttcctcggctgcaacttcttcacggttcatatctgcttcacggatgatcgtgaccctctcgtcttcactttcactcgaactaggagtgactagccttacacgacccatgattaccttgcaaaaccactcaaaaatcaaggaaaccgttcaatcaacacaacgaaaacctattctaatgtttcaaatcaaaaaccgctccaatttctatacttaaagccctattcgacacttacaatttggaacgccggcggtttggaacgccgacggtttggaacagcagcggtcacggcggaattgcaacggcggctaaacgggatgaacgactaggcgaaatcgaacacgagccacacaatcggcgacggagagagaagagaaagtcggcgacggtgaactgaacggagagagaagagaaagtcgacggctttggatgagaagttcgccggaatcgaaacgagagagttgagagttgagagtagtgagcgtcgacggtttttttgaaaagttacttaggttaaaaaaaattgatttgggggaaacccaataatactgggtcggattctgggctaacccgtgaactgtggttggatcctgtagtttcactaagtcaccgaggttatatggtaatctccctctgttttggtatttaaaaataaatcaaaaagaaattcatttttttgggtggcaaaatggaattttttttcccggatgatggtaaaatagataaaaatccgatataacctttcttgactcccagatctgatctttaacgagtttgccctgaagagtgatggtccgtgtctgaaactccatactaatggttgattttgactcataacagaactccattgtgtaaaacgtgagtggaactgcgttttccctacaacattaaatctccaatgaccaccaccttgaacacgtaatcgatcttttctggcatcgtcggtttctttacgtgtttattattctccggtgactcaccgctcatctcttcgttcattattgcggtgatgaagaaaacaactagtataaagtttgagtctcgtttgagtaaagtgagagtgagtgaaaaagtgtgaaacaaagaaatgagaagaaaaaaggttcgagtgttaaatttggtttaatacagtttagtacgaattaaccgaatcaatctaaaccaaagcgagttaacaaaaatctgaaccatttcgattcggtagattagttggatgaaaagtcattataaccatcgaaaccaaatttaaaaataaaacctgcttcgaaccaaaatttcgtaaatttgatttggttttagtcgtaaaaagtgttatatgaagacaacaacaatgttgtaacgccccgactgcctctaccagtgggctccacatctttttcaggtctatgggcccatccctgtccgacgctcggtgagccatgtccggaagactttaaagacttgttaccatccctacaaataagcacatgatcttttctatgctttatcctcacaatggttccgacaattacttcccagaaggtcacccatcctgaaactactccagtctaagcacgcttatctgtggagttctcttgggatgttttaccgaaaatataagtgcatattggtgacgtaggtggccaaatcaattcttttaaacctctccgcatgcatcacgatatttctgaaatcggggtgttacaaatgctctgtgcattattttaattagttttttatatgatgctaaatgattataaaatggtttaatatagttgtggcatgtgggcatggaccgacatagttgaaaaacattattattttgctaaatcaatatattgatacaacatgaaacccacgagggcttcttagagaagtggacactttttagaaagttatttggaaactaggtactttttgtagaaattaaagatatgagtattttatgttgggtttgtgagatagaaaagatgtgagatagagaatatataactaaaatccaaaatatgagtcaaaaactattgtaaccttatgttggaaaaaaaaatttcgtttaggttcaaaaatttaggactaatggatctaataatattttccgtagccatatactctattttgtggtacacttaaaatgatttatgttgtattccatttttttttgcccaattattcagacgagtaaacccaaaattgtttcagtttggtcatttccgtttatcacgaaaaccctagcctcatggcctcaacaaattcaatagagaaccactttgagtcgtttgagaagacagcaaattcttatggcctcaactagaaaggatgatgatattaggacaactcgtagtggtgtgaaatgcaagaaagaagagattagcgaagcaagtgagtcgttgttgttgtgttttttgaatattgtttgtcatttcaaggtcgttggtgtttaattcaaatgttatttttactagtctcggtataaatgtcatgttgttaattaaatcacaaacccttcttccgtcgactttgaaggattcgtgaattgaggactgcgtggaccatggacttctagagagactccttggaagaggtttctattccaaggaagcaaggctgaacatatatacgtcacctgagctcttaggagaaattgctgagttctttgggcagtacatcagacttcgagcggctgttaaaatcttaatttgggaaatctttcaagtatccagtatgccaaaccgctcactccgccaaactgatccatggtttgttagctagacagctagtgatgaagaagaggcacgaattatagtttgtttttggaggaaagcctctcaggttctctttgtgagaattcacattacaaatgggttgtaatgtcgaccaattcctcgtaaagaggaaatcatatcccatcagaacaaagattccaagcctgtttggaacagcttgtttggttcaaaaaaagatgttactatttccgatgttttggatatgctaagaaaagatgtcaagttgcccgatgcttagaagatgtcttgttggaagcggttttgcctagttttgatacttatggtggatggtgtgataatttgtagtaacaagtacttaaacataacactagaatatgttaagatgtttgatgatgttaagttcttcttatcatacttgtgggggagagtagctttcacgacaacaatggagaggtttgaacctcctactcactgatcccctcacatagcttaaagtccgtctaaaacaacgaagcagccgttgttatgaatttccattggcactccaaatgatggaggttgaggcaattccacttatggtctctaagctaccggatccagatgacaagcgtgattatactcagatgacatatgacgatctgggcacaaaagtgatcctacatcaaaaagacatcatccagtttgaatctgatgcacaggtaatgtacactactcttaagcattatatattcttaaatatggtgtaccgctttgtaagtgtccactgttatgttgtacaccaatttatcacaattttttacattgtgtaagatctgtatttttcagttgaaggttgcttacacgcttgtgggtgatgagggcgtggaatacatggatgttgggtgggatgacgatgttgtagatgagaaggtgaattatatgaagaagctgctaatggaagaacatgaatttacttagtttgaatggccaggtcgagacacatatattagtgttactaagaaagttggtacaaaaaagatactagtggactggtgcctcttaccccagggtgtgttaagaaagcgcttattatgcgaggtggagtgataagcaggttttttaggcctacttatatgctgaacggtgtgaggttgagttcaattcccctacaaacactaacatgtcgatgcagctatagggggtgtcaatccagtccactgttattgctagcaatcaagacgtgtaaagaggcaactaagtcaagccagattataatgatgatgggtttctagtaacaatcctaggtcaagattcaaacaagtaaaaatgagaacttaagagccctactcgatcattgggtcgagtagaatcaacatgcagaactaaaatgcaatcaacaaaggatacaaatagggatacaaataacaggtaaatgaaagtgcaatcaacaggggatacaaataaatctaatagaagttctaaggatggattcattgataagggcaactctagggttcatcagatggctaataggtgaaaggtagatacccttgacgatagattcaaaaaccgggtctatccactgtcgtgacagagacccccataactctaccacttcctaatctgaactgtcgttgatgaaacatagcagagcagggtttaagaaataatctaccaaagccaataagcagacaagccaatgtcttggtcgagtctacaaatctctggaattcgtagatcagacatccatctgaacgtctttggatgttggacgtctatgatcgaatctccacattagccagcgaaaaccgcataggggccaagcgaatccagaagggttctaacctaatcttaaccacctaactaacctagagattaccctaatataatccgtcctcaagaaccctaatcactactcaagcaacattctcaagaacacaaacccaaaaattacttaaatcataccaaaatgtagatctaaacaaactaaacaactttacttaaacaactaaatgcaaaaacgaaatagattaagagtaattaagttttgaagattcataaacacaaagaaaaattaaaggataaaagctggatcccttggacaaaccccaaagtaatttatttatactaaaatattaaaaaccctagatttactagaggataagagacttgaggcggtttgggcgaatgctcgatcttggggatcgagtaatgagggtgctgcaatgatcgagtagatatttcttcctctcctatccgtatgctcagatgtcttgttgagtggggaatgaggaggatccaaagacgctttgatagatcaacaagtcttgtagagtttatcacccttggtcgagtaaatgggtcgagtagaggatcgagcaggaggggcaagtagatcattctgctgcttcatctgaggctgccttgatcgagtaagagggtcgagtaaactgcagccacctctgtagctgcctggatcgagtggatgggtcgagtagagtcctttttatctctttgtgcacctaaaaacacaccaaaacatgcaatgcgtatgcaagatgatcctagatgcctaagtatgcaaaataagctaaaatggtgcaaaatgatatgatacaatgagcaaatgcaaagctaaatgatgataaatacacacctagaatgagtaaaatacagtgttatcaactcccccaaacttatctcttacttgccctcaagcaaacaaaaaatcttaagttgaaggagaggtttgaaggcggggattcaaaaaccgaagcatgcatatagaacgggtaagctcattgtccaggtagctaattctaggttgcaagatgatagacctttacttaaaaacgttagccatactcgtcacagtgcaacctaacaattgccttaatctattcaagcattctcatcaaccaattccctttaacattcattaagcacgaacagtggatcaagcaatgcaatggttatgaactcacttggtttcgggcttaggcgaagagacaaaaatggtccctctagtgattggttgagtaataggggactctcagagaaaagattgagcttcagcagaatgctaaaggtaaaagccaatggacacatacaagaacagactcccatctacccaatgatatagtatgatagctcagaacatgatcccagtcccatagatgtcgtaattctaccctttttctcattctttctctcttttggttcaagttctaaggggttgttctttgaaacgatttaagagtctagcgggtttggttttatactttgacgaacttaaggcttttttttctaatcttagcacatagggcgttttacccttttttttgaatcacaatgcctaacttctttgaattccaaaccctttactagacttaacacttttgtatcccccttagaactctaaactcttactcttttttttttttcttttcttttcattctcattcccattcattcaatacacaatcccaatcccgaatacaagtctccacttagtcctagcaaacccaaaaagcgtaagctaggtctacatgaaagactgctcttgtcggctcatacctaacacgttataccaagctcaatcaaaacagacctcacaatcacacacaaatgatctttgacttaaaataaggcttggctaagggtatgagaaattgctctaaaaatgagagacaactacttggattaacagagggtggtgaagtgaataagataatccaagtatgtatatggtagccatgagttcacaaacaatgcatagatatgataattgcaaattcagttcaggttctaatagatagggaatggcatcagataagcgagtttcgaatcaaagtagtatagtcaagttacaaattcaaagcagggtgcagtcttacttcagagatacaatcggttatgcaacagagaactaacaacctgggcattgaacttacttcattgaatcaaaacatgcttatcggtttgaaatcatcattatcccctatgcaaatgagcaatcctaaatgcaaggacactatatacaatcctaaaatgaaatgcaatctacatgacactctgtttatgtgaaatcattttctgaaaaaatttcaaatttttttggtttttctatgtcttagatgatgcaaaatttaaaataagaaaagagaacacaatgttaaacatgtcttgaaccctcccccaaacttaaattacacagtcccttgtataataaaaatctgaaagagaattcaagaccaaaacaaacaacacacaaagaaaaataaaaagttaatcgtatgtacaatggttgaggtggtgttacctcagtgatcaggtgaagtagatggagacatagtcatccatactctcttgggtataggcaggggctgaagttgaggcgggagggttatgctcgttctgtctggtcgagcatgtggaagctcgtctttgcctactccttggctctctcagctcgaagatcacttcccgaggctcaaaagatgaagctcggggtggatcgatcctttcagctctccttgcagctgagctccttgaaccaatccttcttacttcgggggtgggagatggtggccttggctgatctggaagtccttgagttgagcagccatacttcttcattgttctcatcttcttcttgaaacccttcattgttttgctgtgaaggttcccaagctcttcaagcacactgagcttcttgtgaacttcagctatctcatctcctccttggtcagcaccttcttcataatgaccttgctcttgttcgctggtccctgttgataccgaatcccgcaaactggatctcttaagtatttcgaaggcccatcagttttcaagcccaagaaggaccatgttgcacaaaggaggtggtcaaatcttgacattaatttgtagtttaattcatggattaatgactatggtcaaaggaataaacttgtcattcaagtttatgaattgattgtggaagttattttgtgaattaattctataattaatagccaaataatggcacattggaagaaggaaagagactataaaagagaggtgaagactccaagaaaagggagctagagaatctacattttcaccacaaatcttaatattaaacattgttattttctgataaatacacaaaagattatttcttccctttttatgtaagatctttatacaagaaatactataccattttttatgtacaaattcttcgtacatttctatatactctcttatacttttattatgcacatttgtcttgtacttttgtactcgagagttttagcccacaaataatataaatacttgagtgtgtaaatccgacatccacattttggcaccgtctatggggacctgaagttctcaagcgtttcagaagtttcaagacatgaacaagccatcattgccgatcaaaccattaccgacgcccttaagatgctagctgacttcgtaactaccatctagggatgttcgatgacttcgtaactaccatctagggatgttcgacgcccaggtaacatttactaaaaactaaatcttgtttctactcgtgaggattacttagttctccaaatcctagttctcgcataactctcttagccaacgagacaccaatagctgaagaccaggaaaaaattggagctcaatcccagcaggagatccctagtaagctcgatcaaggagtcatccgagatgagtaagagctcgagcgaggtggaggcgaccatatccctttgacacataaagcggactatgagagagtccaccatgagctaaaagaattaaatcaaaactccaccaaaccaccagttcggctaaaaacatcgatatgagaatcacttagaggcattcaacatatagagcacgaagttgttgcagcaaaggaaggagattcacttttggatatttccaaaaacctcggcaacgacaaatttgacgatgcatatctatctacctctttggaagacattttcccactgatttttggataccatcataacattcaacatatgctcatgatgccccaagagtcagctttccaaggagctggacttttccttaaacggaattgtctatgaagagttataatcagatctctgcaagagtcacaacatctccgaactcttaaaacgcagatacaagccgctacatggcgaagtggtttcccgatgactctcaacgaacctcgtgacgattaacatatcagcgcgttgccccaagagtcagtttttcaaggagcccaaccttgctttggaaagaattgcccgtcaagagttatcgttaaagctctagaacaggtacaacaagtacgaaatcgtaaagtgcagattcaaaccactttatgatgaggtgattttccaaagatatacaaagaacctcggggcgtaaaacctatccaggcgttgccctgatagtcagttttccaaagagaccgagtttgttttaaatggagttatctgccgagagttatcatcaaatctttgcaatagatgcagtttgtatgaaattcccgaaacgcagatccgcctctgtcaatcaagctaacgtttagaagagtttcacggtgaatcagatgaaacctcgtgaaggctaacctaccaccgcgttgccccaagagtcaacttcttaactagcacgactttgcatcaaacgaagttgtctgttgagaattatcgtcaaagctttgcaccatatgcaatccgtacgaaatttgaaaaacacaggtccacgcttttcaaacaagcccacttcgggaagggtttcccggcgaactacatggaaccacaagactatttacatatcagcggaaagccccaagacttatctttccaacgaaaccaagcttgcatctgttaataagtctgcgttgaatttcttgttatgtacttgtagtcgcttcattttggtgaaatctaattgatgagtttgctcttcacaagactagatttcacccctcaagagttttttgggttccacctcttggaaaaatatattcatttcggtgaaatctaaatgatgagttcgctcttcacaagactagatttcatccctcaaggatttttccgagtttcacctcttcgaaaaatatattcatttcggtgaaatctaagtgatgagttcgctcttcacaagactagatttcatccctcacggatttttccaagttccacctcttggaaaaatatattcattttggtgaaatctaagtgatgagttcgctcttcacaagactagatttcacccctcaagagttttttgggttccacctcttggaaaaatatattcattttggtgaaatctaagtgatgagttcgctcttcacaagactagatttcatccctcaaggatttttccgagtttcacctcttggaaaaatatattcatttcggtgaaatctaagtgatgagttcgctcttcacaagattagatttcatccctcacggatttttccaagttccacctcttggaaaaatatattcattttggtgaaatctaagtgatgagttcgctcttcacaagactagatttcgtccctcaaggatttttccaagttccacctcttggaaaatatattcatttcggtgaaatctaagtgatcagttcgctctttacaagactagatttcatccctcaaggaattttctaagttccacctcttggaaaaatatattcatttcggtgaaatctaagtgattagttcgctcctcacaagactagatttcatccctcaaggatttttccgaattccatctcttggaataatatattcatttcggtgaaatttaagtgttgagttcgctcttcacaaaactagatttcatccctcaaggatttttccgagttccatctcttggaaaaatatattcatttcggtgaaatttaagtgttgagttcgctcttcacaaaactagatttcatccctcaaggatttttccgagtttcacctcttggaaaaatatattcatttcggtgaaatctaagtgatgagttcgctcttcacaagactagatttcatccctcacggatttttccaagttccacctcttggaaaatatattcatttcggtgaaatctaagcgatgagttcgcccttcacaagactagatttcatcactcaaggatttttccaagttccacctcttggaaaaatgtattcatttcggtgaaatctaagtgttgagttcgctcttcacaagactagatttcattctcaaggatttttccaagttgcacctcttggtaaatgttggagctggattcccctccaagaatccttctgcgaaaataccaagccagcccacaaaagcccaccaagcccaccaagtagaggacctacgcagctgacgtgcccacatacgcgaatgggtacttgggccagataagcccagtcacctgatgaagggagataagcgaataatgacctaggaactgatgacgagatattcgcggagcggacctgatatctcggaactgacctcccgaatatccaggaggatctccgcagagcccggacggagttaccacgtgcgtagacctatataagggagcaaggacgacttggaagagacattcaatctagcttacattcacacacacacttttacacttgtaatctcttttcacattgtaaaagctttgtcataattaatacaaaagtccattcgttcttagcaatataactctccaggtttcagtgaagatctagccgtcctttctcataatcttaaatacaaatctctagtgtggatttcagaacccacatttcacgccgtctgtggggacgaaaacagatcatttcaacacctaaactaacacatcaattgtgaccaacgatcatggatcccaattcatccaattcatcgggatctggtttaccagttcagatcccaaacgatgacgttacggacgggcacctcccaacggatctccctcccggagcccaggttgatgttgtccataatactgacatggagaacatctcctaaaacttgaattcttctggatctgaccaaatcactccccctccgcaaacaaggggcggagaacgaaacgtcacgatacagcctccaaacggagataacccggccaacccgtctaatcaggtccctccgcgacctgccagcgaattggccgagctccacgcaatgatcatgaacttgatcaacttaaccaaaaaccaagaaattgcgcatcgcaacctcgccgcaattgtgggtcagcagagacgcgactccactcgcatggtacatgaggtagagcgcgataccgcgggtaaggaggttccccccccctcgcgaaactaggattcctgcccaggtccccatagatctgacaggtaccgtctcccttgccgatcctactccgagaactcgtctggatttcgcttcgatagacgtctcacatcctatcaaccggtaggtcgcctttttacaggcacctgcgaatgctctcgtcaaaaacctggcaacaggaaacgaaacaagcacaacgcctgccttcccaaggctaccggtcccaactttactatcgatgggctgttcgccccctaggtacacgtggacgagaaaccaaacaaccgcatccagttcccgcattcccgggagctcaacgcaacaacagacctctatcgctaatccgccatccgtttcccggataccaggaagcgacctccttaacagtccaaccgatccccaagcaccggtcgatccgcataacgtcgtggatatggaaacattccgcaattacgcagctcaaacaaatgcgaacatggctcaaatgcattcgcgaatgcacctagcagtgagtgatgctcccgacatagatcgcgtgatcgaagataccatgcgcaccctgttcacgaataggatcgctcgtttttgcctccgagacgtcgggagactccgtttcccggagtacgacggaacgagcgacccaaaggctcatctgagatccttccgtttcgctataacatgagcgtacctgacagacgaagaaaatgaagcaggtcattgccgtttcttcgtagaaaacctcgtaggtcacgccctcgaatggtttgctagcctcgaagggaactccattgataccttcgaccagctcgccaccgctttcttaaaacagtattcggtacttatcgaacacaggacgtctgaagccgacctctggagtctcactcaacttcagaacgaatccctgcgatcttacgtcaaaaaattcaaagcaatcaaatcgaaaattgcgaacctaaacaaagaggtagccatagcagcccttcgtaacggtctgtgcactacaacaaatatccacattcttatcacgagagaaacgctataaaatgtcattaatagcgttttcataaacgctgtcttatgcccctgttatggtaaaccctccatatacgatagcattttttccgtatgctatgatatagtattctaccatagcattagtaaaatgctttcatttatcgactataatagcgatatatataggctatgatctataatgtttttgatgctgtaatattcagtgtcatgactctaattttatgcggttgtttgaatctatttgcatttggtggaacctgtttagttttcaaaatatccaatacatatataataataaacatccaaaaagtatacaccatttcataaaccaaaaatcaattcatacttaacacaagtctcaatccaacacttaaactaatatgctaacttctatatactacttttgccaatgaagttattgatgagatcatgcaaattccttacttcgttttttagatattggactccgttcttcaagtaagttagctcagcttcataggttgttgtagtctcttcctttctcttaggttttcgaaaaaattgctaccttttctcttaggttttccccaaagactgttgtcttcatctatctcactgtcctcaacgacgagattcattatatcttctgttagaacatgaaataaaacaagtaagatttcggcttcttgaacacaaacttattaagtcacattattagtaaacaaatctttttactcacctgaaaactcaatctgcgaatgagacataactttagcctgagaagagactaattccatttcctttctacctttactttctccaagaaacgcaaactcaagaccatcacttgtatccatcatcggtgactcatagacacaactcgaacaccattgacttagatcaggaacttctgagaattctgaaaacaaaaatgacaaacgacataagtgaaatcaatccagctaatctagctaaccactaacaatccacaaaatgatgtttttgaaaccaaaccaataaagcaagtctgatgctaccttgactatcacccatctctcaattctctatattcgaaagtcaagtctttttctctgtctccttggtcttaaccaaaactcagtctcctagtagcttaattgaagctaagtatattgtcaatattgaagcaagaaagaatatgtatagaggaaaagaaacttaggaaggaatcttgatactcacataaagccataatcttcaagtattacctgaaacaagttaaccaagtaagcaccaaacaacataaaaaacaaaacgaaatcctttttatgctacatatgctaacaaagagaccttgcttaatgacctaagatactacaatatccacggctgaatgcaatgtcgaaccatacacacaacataattcaacatgaggaagaacacttaagatgttatagataaagtatttgtaattagatttatgaatcatagtgatttgagatagaccacaaccttggagaagagagaaacgaacccagagaaagagatgttgagtcgtttcttggtttttgtctcacagtcaattcgtcgaacatcttgtgtgcacaaaaacacttcaaaaacgttacccttttgagctgcagattcaaagaaagaggagagacaaaaccaacagaggagagacacaaccaacaaacaaggattagaagctatagattcaaagggaaaagagagacaaatcaacaaaccttttccaactaaagcaatctctaactgaaacgtgagaggatgagtgaaagaagagagaaaggaggagagaaaggtgaagaacaatgtagaattttggatgtgtgaagtggaattagagatggacaaaagaagaaatttagggtttgaaggaatcaatttgggggatttttttttcttaagatgtgtttagcgttttgtcgcttaatatttttagatctgagacataaggcgcttaagtgaattttttcgcataagtattggcggaatagatgattttagcttcccgcttagtgattttctatcatagcgtttatcaaacgctattacaaaataatcaaaataaaaatttagttttcatagcagtaacgaaaaatgagctatcctcttgtgctattaatgtggatatttgttgtagtggtggttctcctctaggtttcgtgaggaactcactgttagataaccggtctctttagacaatgcccttcacaaagctctccacttcgccaaagccgaagaggagctcgctgtgctggccttacgattcaaagaatctaaaacgcaaaacgctccccttgcaattaaaaaacccttcaaaaaggaaaactaaacgcaggggcagcataccttattcgcaatagaagaggcagctgaggacgagagtccagaaacttgacctcggaaaatattgcaagtaccacaaaaaaagaggacattccaccgaggagtgtcgcgccgttaaaaagttaatcgcagctgggggtaaaactaaaaaaggttcaaaccccaaagttgaaacccctcctcccgacgaacaggaggaggagcaaactcccaagcaaaagaaacaggaacgaacaccggagggaagtgactctcccccacctgctaggagagaacgcatagacctagtctttgcaaaactcgatctaggtggcaggacaggaaggtcagtcaccacacctccccccgccccgcataagaaaaacatgaggtttccattacgcctctcgaaattctgcagaagcgcaactgagcacctctccccgaaacgcatcgatttcatcattggagggtctcagctctgcaacgactcaatcaattcgatcaaaactcatcagaggaaagcagattcttacacaaaaggcaagagcccgatgatgggacctgaccaccagatcacattctgggaaagcgaaaccaccgacctcgataaaccttacgatgacgctctcgttattcgaatcgatgtaggcaactatgaactttccgtataatgatcaagacgggaagctcagttgacgtactcttttacgaggccttcaaaaaaatggggcacctcgattccgagctgcaaggcagaaaaacgccacttaccgggtttgctggagatacgacattttctctaggaaccatccagctcccaaccgtcgcacgaggagtgaggcgactcacgagtttcctcgtagtcgataagaaagctcctttcaacgcaatactgggaagaccatggctacacgccatgaaagccgtcccatcaacctaccaccaatgcgttaaattcccctcggacaaggggatagcagtcgtatacgacagccaacgtagctcccgaaagtgctatatgggcagctacgagcttatcaaaaaagttgaccccgtagtactaatgatagaagacaaactcacgaaaatgaaaatagtcagatcctctgacccttcttagagcagacctcgaaaaccgttgataacacaggtctacatagacgaatcagatcccaaacgatgctttgggataggtcaagacctcgacccagcgatacgagaggatctcataacctttctcaaagaaaataaagacagcttcgcctggtcaagtgcgaacttccgaggaataagcctactgttataaagtaatgccctttggtttaaaaaacgctggagctacttaccaaagattggtgaacagaatgttcgccgaccagctaggtaaaacgatagaggtctatatcgacgacatgctggtcaagtcagctcgcgaaaaagaacacgtccagcaattaagagaatgcttcaaaatcctaaacaaatttgaaatgaagctaaaccccgagaaatgctctttcagagttccctaaggagaattcctcggatacctagtaactgaaagaggcatcaaggccaatcctaagcagattgcagccttcatcgacatgccatcgccaaaaacggcacgggaggtccaacgtctaaccggccgtatcgccgccctcaacaggttcatatccaggtgtaccgataaatgcgtccctttctatcagctcctccgaaaggataaaaagtttgattggaatgaggactgcgagcaagccatcaaacaattgaaagcgtacctgtccgaaccacccatactcgcaaaacccgaagaaggagaaccgttgtacctgtacacggcagtctcccgaaccgcgataagcggcgtcctggtgagagaagatcacgaaggacagaaaccgatctattacgttagtaaaacgttgatagacgctgaaacccgttatccagcaatggaaaaactggcactggcctagtcatgtcagctcgaaaactgagaccatattttcaatcacatcccatcgtagtgatgacgtctcaaccaatcagaaccattatgcacagtccaactcaatcaggtcgagttgcaaaatgggctatagaactaagtgagtacgatatagaatatcgcaccagcaccagcttgaaagcacaggtcctagccgactttgtaatcgagctcccgttagcggacctggatggaaccaactccaataagaaatggctcctccacgtcgatggctcctccaaccaacagggatccggagtaggaatacaactcacctcccccaccggggaagtcagcgaacaatcgttccaactcggattatacgcatcaaacaacgagtctgagtacgaagccctcattgctggcattaagatagcttaaggaatgacgagcgcatggaagcgtacctcaaactagtcaaaatccccaaaggagaaaacacctctgtagacggcttggcagctctcgcctccacgtcagatcctttcgtcaaaagaattatcccggtcgaaggaatagaacacccgagcatcgacctaatggtcaaacacgctgggacgaaaacacgctgaagcaccaccccgtggctagagctcttgcagcagccgcggagataggtgcagcggaggaagagccggagcttggaacccccgaacaacctacctcgtacaaacctgaaccgtacaacgacttgagaatcccaatcatcgattacatcgaacgagggatcacacctcccgacaagtgggagacaagaaaactcaaagcccagagcgcagggtactgcatcatggaagggagacttatgaaacgcaacatcgcaggtccctatatggtgtgtacctacgggcaacaaacgaaagacctcatgaaaagcaagcgcgaggggcaatgtggtagccactgtagtggacgtaccctcgccctcagagttaaaaagcaaggctacttctggccaacaatgctagccgattgcatagctcattcactcaggtgcgataaatgccaacgacatgcacctgctcttcatcaacctcccgaggaaatgtcctcgatatcttctccttacccgtttatgaagtggtccatggacgtcgtaggtcccatggaagcctccggtgggaagaaaagactaaaaaacctgctggtcctcaccgactactctaccaaatggattgaggctaaatccttccaacaggtaaccgagaaacaagtcgaggacttcgtatgggaaaatatcatatgccgacatggcataccttatgagatcgtcaccgataacgggactaacctcacctcgggaaaaatcaaagcattttgcgacaagtggaagatccgtcttaccacatccaccccccgttacccacaaggtaggcagaagccgccaacaaagctatacttaacaacatcaagaaaagacttgattccaaaaaatcaatgtggtccgacgtgctccacggagttctctgggcctaacgaactacacctcgcaagtcaacacaagaaacactgttctctctcgcctatggtttagaagcagtaatccctgtcgaaaccatagtaccaagcgtgagaaggaccgccagtcctgctaactcggacctgaacacacaaatgttacaggacaacatggacttcatcgatgaacgcagagatcaggcaatgatgcgagttcaaaactatcaacaagctgtcgcccgctactataacttcaatatccaaattcggagattcgaagtgggagagctcgttttacgaaaagtgttcagcaacacgagagagctaaacgctggaaaactgggaactaactgggaaggtccctatcgaatcaccgaggtggtatgtgacggcgtctataagctcgtaaaagtaatcaacggagtacctgagttacggccttggaatgccatgcatctcaagatataccacaaataggtactcaaaaacaatcgaactaggataaggcttgatctcttggcagggtacgtaggcagctccccccaagagcgcagccaccacttcaatcaaatcacaaaagggcttaatcccctaaccaggtatgcaggcagtcacctccgcaaacgcaattaccatctcaacccttccatttgaaagacgaaacttcaacaagggaaacaaacatcgcatcttccatcaacgaagatcagctgctcacctaacagttcaatctcccctctgtatcgaggaggtccctgctcgatgaccaaacgccagattgtcgcttgctttacctctttttgtacttaacaatttcgagataagaataaaagaaaattttgatactcattatcatattttgcaaaaacaatcatttacactatgatttaaaactcattcgtaatcttacgatacccaaagcccaacacccgaatgttggcggatccattttgtgatctcgcttctaaagagtcgatagtgaactaaacttatcagaacacatcacttcggcttcatcggagctcacctactacaaccaaatctaactctttcgctatcaacaaataacatagtaaacaaggaagaaacgaaggtttcattcgcgacctggcgataccacaagcccagctcccaaaatctggcaggtcccttgtgtgacctcacttcaacaggttctcgagacaaaacaactcaaactcactcaaagttttaaccttcaaagaacataccatatcacatccgaaataacttggactcgaaacaagtccaattattatccggaacatggacaaagcgaggtgatcatacaccaaaatcaacgaagtgtcaaccctcgaacgaaagataaaaaatacttgctaaaaaggataaaagccttcccaggcatccaagtgcttaaacgaacaaaagataaaagccttcccaggcaccaagttcaaaaagcaataaacgaaaggataaaagccttcccaggcaccaagtctgaaacaaaacacaaaatcctaaaacaaacaaggagtctggcgtagtgaagacagtaccagaaccctccgcgagacctcccggaaacgcgtctttgttgctcccgaactcgtccaagccaattggcgtcccttgctcgtcgacgtccatcggacgtaccaccgaaatctctgaaacctgcgggagatccaacttgcttagagtaaagtctgatacctccttcgatttgcaccgtgcctctagttcatccatctctgcttgcagccgaggtttctccacggtcagatcgatagcaacctttgtgatctggtcgatcaaagccaggttcgactccacctcggccgcttgcccctccagtaccgtgtactcctttttggcgacccacttctccttgatcccagccagcagcttcgaatacgcagcagccaactcaaccttagcatcatgaactgccttctttgcccctagtgcagtcgaagtcaggtccatcacctctttggagagctcttccctcctctgctccaagcgatgaatctgcttcctcgccgtctgcttgtcggcttgcaaccccccgatctccatctccatgagcccgatcttctcagcataacctttctcgaggtcttttgaagtggacaactccattttcagcctctcgatctctgcctgaaataacaattaggtcagaatcatcgaatcatcgatgaattatatacaaacaagtcaaaaccgaggtgtacctggaacgagacttcgcgatcctgaccagccttcacactcaacgccagctcccggttgagggtctttccttcttcgagctcactcaccgaggggacctagctcagacgctgctcatagagagcgaccagcttgtttgtggcagctatcgcctaccgaaggcaaaacagaaagttacgactagcataagaatagaattagaaggagacaattatcgactattacctagccctccttcgccatcatgtcagcataggccgccacctcggccatgttcttcactccaggaacctggcagttcctccctttgatgtgccaaagcaggttcgccaacccagcctcgtcctcaacgatcaggtgatcacggtcgtgagtgtaagaccagtggaaaggccttcttcccgcggatcctccgccggagttggacgtctgcctcacttcctgagaccggtttgaagacctgcccccacccctggagcctcgtcctccgccatgggacctgcccgaggatcgcctatccgcggaggcagctgctccggaatagcagccgtaggttccatcctctcctctctgggagtggcgaccccctgaagttcacgaccaactcagccgcaggattcacctccgtctgggtccgagctcttttcggagaggacggtacaccatcagaacgaacaactgcagatgacccagatacctgattgttatctgactgacctgctgcagcagaggtcccggtattgatctcaggaagtgagggatgagacgctgaggcagatgcgctggaaacagctagattgtttcgagccgcggtcactgcggccgaaagatcaccagcacaagcaggagccccggcgttggctcgttgaacacgaaggcttggacgcctcattcttctaatgagcgagagttctgaagtagagctggagttaggaggaactgaacaaacaaagcacgacatttgttagttagcagctcgagttgcgcagctgtctcgataactcgtacattttaaaaaaaaaatataacggaactcgtacctataggcagattagcctcggggactggttaaatctgcaggacctcttcgatcggatctagctatgctgctggagggacgattgcgggaactgctggagctacgggaactgctggatctacggcaagagcagctacgatgcgatctctgctaaaagtggactagttagtctgaccacgtcggagaagggttaacagctcgagttccgtctccgagagagtaacttccttggtccttgctacaaaccataaaaaaaaaacaattaatttaagtattaatgttcagcaaaagcagtcaaggattcaacacaaacaacaaagaaaaatcaagaggctcaggtctccatctgacccaggttggtagaccaggtccttgttatcctcgcgggatcaaaactgccaattgaatgacaatctactctgaaaaagaagtacttggatcgccaattggtgtctcgacaagcctttaaaccaactaggaccagagatccgggacgagcattgatgtagtacgtcccttggtccctcctagcattggtcttgacctggcagagctgaagtaggtcatggcagctgaattctctgtttacttcccgagcccgggtgaataacgcctgtacatggcggacaaagtttgggcacatctggggaaaggcgaggccgagacagtagagcatctcgaggatacacaccggaatcaggaaaaataggccacatttctcgaagaaattggcataagcgcaacaccacccgaccgacatgttctcaggatgcagcggcagccttgggagtatcatatttacctccaccagaacctggcatctcctccggaggtcgaccaggtcgctgttcgtcatcggagtgcctcctccttgcttggcagcctttttcttcttcgccttgtcggctctggttgacggcagacgaattggacccattctgcctagggttatgacgcgtctttgtactcgcggcggtaacgccgccgacctcgtctcgaacgaaatttcatcgttgtcgtaactgtggttgcttttattctgggaatcttcgaagtcgatcatctttcgatttcgacagagaaggacgagagagatgaaagaaaagagcaaagaaggcagatcgagtaagagggaatagaagagaaacgaaggagatagcaataagaaaaaaaaagacgagatttttctacctctacaaaacaaagcgcagtaaataataaaggaggagagaagttacctttagagtcgtgtgagttgacgtgacgtcaagtggagaggtgggaagttatttaaagccatcatcaccacaatttttgagatcgcagagatcccttcttcgcgcctgatctggaccgtcagatgcggtgcgctgaagagacgctccatctcagccgtccacatcagcagcgacttatctcgcgtatctactcgaaatctttcggttaaggaatctgaaattaaatcgaaattgttgagtttatcctcaaaaccgactgatcttatcacatttatcatcttacctgacctatatgtccgctcatcgagttcctctactcactcaatgggctggggggcaaatgttggggctggattcccctccaggaatccacctgcaaaaataccaagccagcccacaaaagcccaccaagcccaccaagtagaggacctacgcagctgacgagcccacatacgcgaatgggtacttgggccagataagcccagtcacctgatgaagggagataagcgaataatgacctaggaactgatgagtagaggtgtcagacgggccggcccgcgcccatctagcccgcctcgcagtgggctttcttttttcgggccgcgacgggttggcccgtttaggaccgcagacaaaattatcagtgtccaagcccggcccgcaaagcccatcggatatacgggtcggcccgcgggcatttctctactacgcatcaaggattcttgagctgtggcattgtctgtacaaggcaatatctcgtccagagccgtattgcttgatggtctctcaacccattcgctcattgccacacatgtgtctgtagtacaaatcgaagaaactgcaggaaaagaaatgataacaagatcactaaagtcaatacattagttgatagttgagtaacatgtactcaaagatgaaaacattaccgagaccaagaaaagtcaccacaagcatgacgattgaaactacgataagcgccactctcctgcgagtatagaaatgactattatacatttgtttttcaaaatccaaagattctacaatcaatctaaagatagttttgaataagaatgtatgggttacgcaaattacatgggttacgagaattacatgggttacgcagcggagtttgttacacagaatccaggaaatgtcttatgtgattggagttactagtcgatttctcagtgatagtagctacagaaaaatccagtttcgctccgatctgatcaatttcagtttgtacatttgcaggtaaaagaacctgaagaactgcagcctgcttggctgaagcaaaataatctgagatagctctaagctgcgaaatcgtgctatcagaaccttaacttaaactcaaatccaaaatatcccaaaaggaacaatgtcgtgtctcatcttgcaactcatttgtaaaccttaatctgaacttaaactcatattcaaaccttaattgtaacaagttaaactcaaatgtgaaacaaaaaatgaacttaagtcaagagaaagacctgcaacttcttaaacgcaaacatgataactgaaacatgaacttaaactcaaatccaaacatgaatatcaaacttaaaataaaatctccaactcaacatccatctgcatcatccacaagcgactggaaggaaggtagagtctcatcttcagcatcaaatttttcatactcctctacaaatatcatacaaactaacaatgttaattcatagactaagattgtgtgactataaaacttgaaaacaacttacttaccattttcataagattcaaaaccttttaaccaattgcgactgcatattaatgcttgaacatttctcggtaaaagacgatttctatacttgcttagaactcgagttccgatgctaaacgatgattcggacgcaactgttgtaataggaatgcttagaatgtcacaagccatggaagccaattttccaaaccgtggaccgttatcttatcaataattaagaatatctaaactctcaaacccttttacgttcattgccggttcatccaagtacatatccaacgtcgactttccattggcaacaacgtttgctttgcgaaaagcaaagaaatcctataacaaagataagaaattaaaataacataacacaaaaactaatgacttgctgtttttcataaaaaaaactgcatattaactaacaaaaacaaaacataagaaacttacatcgtaattgctaaaattcccttttgcagtttcatcatcaggtgtaacatcttcacgagactcagttgtaggtgataccgcattggacttgttctcataaacttcaaaaagtttacgtagttgagcacgcaaatgtttcattcctttctcacgagtactgatatctagttttgcaaaacaataatctgcaagtgtaagcttcaacctcggatcaaatactgtagcgattgcaaagatattacttacttctgcccaatacttatcaaacctctctttcattaggacaatcatgtttctgataacttcatcttggttggactcattcactgttaaccagttttggaacttccaaacttgcataaaatataaattcgaagttggatatatcgaacctgatataagattggttatttgatcaaacgactctaaaaaatcactcatttgctgtagtcgatgccattcagcatctgtaggatgaaatttgtagtttttggcatcaatgactttgagattaccaaatgcagctcgatacttcagagccctatcaagcatcttgaatgttgaattccacctatttgccacatccaacaacaaaccagctttcagattaataccaacgttttccatacactttgcaaataagatctcacgatgttctgatcctttaacgtacttgatactctctctaattttttctaatgtatcaccaatccctttcagcccaatttgaacaatgatgttgagaatgtgagttgcacatctaacatggaaaaactctcctttacacaacaaatcatctcggagtacaagctgagattttacaatttcttgcattgtgtcattgttacccgcgttgtctaccgtaatggagaaaactttcttctcaattccccagtccttcaatttcccaagtatcttcatcgctaagttcattcctgtatgcggtggagggaatgcacaaaaactaggatcttgttattgagcttccaatttctgtcaatgtaatgtgctgtaagacacatataaccttcatgagtgagcgcagaccacaaatctgtaattaaactaatccttccaggaagttgagctaactctctcttcagcttatccgtctcaatctcataaaacttataaatatctgcagcagctgtgtttcgactaaaaaacttgacatccgcatttaaatacttccacgtttctctaactctctcatactccacataagaaaatggaagatcatgttggataattgtcttagctaccaattcccggaaaacagattgatctatctttctagcttggaattttgctactgcattcaccatcatctgactaatatcaccatttctaggcacgagcttacatatttgcaaatgatgtcgatatgtattcgtaccatttttgtgtgcattgtacgcaaaatctgatttgcaatgcttgcacatagctctttcttcagtttttcccaaatgattaacctttttaatcactatgaaatcgttccagacttttgagtattgccttctcttctttggtttcgatgactttccattgtcctcatcatcatcaacatcatcagctccattgtccccatcgtcatcttcttcatcatcatcatcttcgtcttcatcactaatctcaaaaacttttttcggttttttaggtgcttcaacttcagacttttttcttctctctgttttagaggcagaagcttcatcacccttgcttcttctttgggtttttgatgcttctggttcacacacttttttcctctgcgtcataggtgtttctgtttcatctctcagttttcttttcagctttttagatcctcctgcttcctcattagcttgttgttgttcatatctagcttgttccaactcaatgactctccgagattccacaactaatgatctcaaatactcagcatcaacagaattcaacggatcctatcattaacaaaatacaaaataattgtttatgtgtagtcacaaataacataccattacaagtgttagatgctctgttttgatctgaaatctgaatctaagaagcttcaatgatcgtaaaaaagaaacttgaagagatagagaatgacttttcagtttccttgttaagcaattgagcgtgaactgctacttctagggtttgaactgcacaagaaactctaatagagagaaaaggtttgaaagcctctatgagaaatgaagggttttaaaagagttggtttttctttcgcgggctacccgcatacccgcagacggcaacgggcttgtctgctataatccgcagtccgtaatggcctgcccgcgaggcccgctaatttgtggacaaaaaaatcaacgtccaagcccgctccgccatgggctacttggacaaagcccgcgggctagcggcccgcttgacaactctactgatgaggagatattcgcggagcggacctgatacctcggaactgacctgccgaatatccaggaggatctccgcagaacccggatagagctaccacgtgcgtagacctatataagggagcaaggacgacttggaagagacattcaatctagcttacattcacacacacacttttacacttgtaatctcttttcacattgtaaaagctttgtcataattaatacaaagagaatattacgtaattaggcacttttaaaaaagttaatgcctaattaggcactttaaaaagaccagacacttttgataggttatttgacacatttaccctttaaatacatctctctttcgttatattttatttgtttctttctccttctcctctctcctctctccttctctctctttctcttctctctctttctcttatttttcaagaacaaataatcaagcggagaaaataaaaacctttaccatgattttgatctctctctctccctcttttcccaccatcatccaacttatcagttcgttcctcaattttgttatacttgaatttttagggttttgttgaaatctgatattcagattttgctctttctctctctctttactgcaaaattactatgaatcatttctctcaaggatagcttcattagtcaagtttcagattacaaaaacgacttgaagcaatctgttaccgtcttaaagcgtaacatcaagcacatccgcgattggttcgaagaagaatcctttgctgccttctccaagttagtactctctctctcacatgattcctattgattttcatgtcattatctccaattctccatctaacacactaagcatatgtgttcgtgtctttgattcatgtcattatctccaatgccccattttacatttcttcaaatctttacttagatcttagattcgttctccagctaattctgggtatcaatttgatataagaaattgattaaaaaaattgtttcctttgttcattgttcttatgtttagcatttagatctgcaattgatattggtcgaatttcgtaaagatcacatttttacgatttgaattgttccaaaagttttcgtttttttccatcgaatttaattttggcgattatcgttcatacataaacttgtgtattgaactgaaacgacccagtgagtcattagatgtccacatggactaaatctcttggacaatcatcaatggatacatgttgtctttgatttgctgtgaatttgttttatctctcagtaaaattatcactttcttgtttatgcttacaatatattttatggtttagagttttgttttacgattttggatttagtggataaaggattagggattgagggtttgggtttaattttagggtaaggaaattagattttagtgcaaagccttaatggtataaggtttacacaccacgaaccatttgtttgtgtcaacaacattgtatcatattctaaaaatatgtttgttgatggaccttgtattgatatatataaagcgaactgtttggataagtttatgtggacaatatatattggatacataattaggaacatagtttaatatgcgatatttgttaaaaatatataatactacttagcctataaatatttttatttgatttaaatcatttcatataatactaactgtttggataagtttacgtggacaatatatattggatacataattagaaacatagtttaatatctgatatttgttgggaatatataatattacttaggcttaaatatttttatttgatttaaagcatttcgtataatgcaaactgtttagatatgtttacgtggataatatatattggatacataattagaaacatagtttaatatctgatatttgttgggaatatataatattccttaagcttaaatatttttatttgatttaaatattttatttgattaaactaaattttaacaaatctgactattaatttttaatttgttatctctatctaatatcacttacaatatattgctttgctgttatttaatttggcaaaaaaaattaatttatttgctgttttttttccttctcacgtttgtaagggtaaattggtcacaaaatcaggaaaaaagtggaaaagtgcccactccctcaaaagtgtcccaaacgtccaaactttatcaataagtgccttataatggaacattccctaatacaaaagtccattcgttcttagcaatataactctcaaggtttcagtgaagatctagccctccattctcataatcttaaatacaaatctctagtgtggatttcagaacccataataaatatattcatttcggtgaaatctaagtgatgagttcgctcttcaaaagactagatttcatccctcaaggatttttccaagtttcacctcttggaaaaatatattcatttcggtgaaatctaagtgatgagtttgctcttcacaagactagatttcatccctcaaggatttttccaagtttcacctctgggaaaagtatattcatttcggtgaaatctaagtgatgagttcgctcttcacaagactagatttcatccctcaaagatttttccgagttccatctcttggaaaaatatatttatttcagtgaaatttaagtgttgagttcgctcttcacaaaactagatttcatccctcaaggatttttccgagttccatctcttggaaaaatatattcatttcggtgaaatttaagtgttgagttcgctcttcacaaaattagatttcatccctcaaagatttttccaagttccactgcttggaaaaatatattcatttcggtgaaatctaagtgttgagttcgctcttcacaagactagatttcattcctcatcgagttttccaagttccacctcttagaaatatattcatttcggtgaaattaagttttgagctcgctcttcacaagacaagatttcatccctcaagttgttttacaagttccacctctcagaaaaatgtattcattttggtgaaatttaagtgttgagttcgctcttcacaagactagatttcatcccttaaagatacttttgatgtccgactatcggaagaatgtgctcattccggtggaatttacgtatcgattcaactcttcatggactcaaattccaggtaaagcggtggcgattcatttttttcggaagcaagaaggtcgtaaaagaaaaaaaaaaaaaaagaggccatcaacgacctatgatggtccgagatgtcccattggctatacaaccttactaaagaagtcttggacctcaacaagactacagctcgtggtggcgaaacaacaaccttgtcacctccgaaaaatgagcacaagtttaggtagaagcaaggctgagtctactaaggtcaactcaatcgatcaagccatggcacaatgatacatagaagttttcatggtatttcttcggaaatcattagcggatgaccttcaacaattacaaccttgacatgacaagatcatatttgctcaaaaacatttggatcatgtatgaagcatcgaaaataagttcaactatggtgtacacgttgactccttaacgtaaaaagtctccatcttaagttacgcaaaattgttataacgaaaagcatacatatctaagaccaaaacggtgggggcgtcttccaaataatacaaagcaacgtcaagccgcttcggaggtggcccataacatctatgggatgaagataactgaagtcattatctacaagcaaataaagcgaatcttctccgaagtataggagaattttatggcattatcacttgacgtgattaacgaatggttgctacaaatttggagtccttatttatatcatcacccaaaattcaaggagtcaacattcgacatttatcaacaagaagcgattcaagtttgaagagacaactttgatgcttaacgacggtcttctaatactgttcaccttcatgaagatgcgaattcgatttggtggaatctaagtgttgagttcgctcttcacaaaattagattccatctgacagagattttttcaagctctaactcttgggaaaatgagttcattttgatggaatcttagttttgtgtttcctcttcacgaaattagattccatcccgaagagatttgtccaagttctaacccttggagaaatgtatttatttccttggaatcttagtgttgagttcggttgtcacgagattagattccacctcgaggagattataccaagttctaactcttggaaaaatgtgtttgttctggtggaatttaatcgttaagttcactcttcataagattccatccagaagtggaagacgagaagttttttccgagcaaacaattggatggaagtggaagacaaagaagattagcttcacttcacaaagaaaagtaagccggctatgccaattgttattgtcccttccaggaagccgaagttaaagggcaacaaagagatcaaaccacttggattaaacccgtttaacaattatgtggagagaccatctctatgaaaaagaagatttagacaaccatctcttacaacatggagttgcgataagatggcctacgacaacatccatagagtaaataatcatattacaaaagattgtaccgatttgaagaagcatcttgctgagctacggacaattggtgacctcgcaaaacctcgacatccgagagttcgtgcaaacttaccacaaagaaaaggcggaagctgaaaattcatcactagctgagaaaatacctaaaacgtctaatcccggagttgcttttggttctaagaagaagattaaaaattgtcatgaacgagtctaagttttgtagagattcgatcactatacaatcaaaaagtttaagggaatgttcttttaaaggcgaggagacattctgagtcccatccggagaatttctcggttacttagtaacaaagagagaaaccaaagcaaacccaagacagattaacgctcttttcgaacatgcctgccccgaggaacatcaaagatgtctgaagactctttggtacgattaccgcgttgaaccggttaacatctcaatcaacggataaatgcctttctttctatcaaatactaaaagggaacaaggagtttagttggatgaaagatgtgaagatggtttcggtcaactaaagacatacttaaatgtcgtctctaattctctgaagccggaagccgataaaaaattatacttatacatctcattttcaaatcataccgttagtggagtaataatttgtgaagaccaaggagagtgaaagccgattcgttacatgggcaagtcatcaaccagtccggaattaagttacacaatgatggagaaacttgcgcttgatgtagtcacttcaacttggaagctgcgaccttatctatgtttcatccaatcatagttcaaactcttgggaaaatttgttcatttcatcggagtctaagtgttcaattcgctcttcacgaaactagatctcaccccgagaagatttttccaagttccaattcttggaaaaataagattattttggtggactataagtgttgaggtcactcttcactgaactatctcgagaagaatattccaagttccaactcttggaaaaataaaatcatttcggtgaaatctaagtgttgaattcgctcttcacaaatttaaatatcacttcccatcaacaaccatttgtgaagaaatctttgagtacaagctcggaagaagatctttagttttctctctagattgtggctcaataacctgccttcctattctataagcagaatacactttgtaaactcaagcttatagctcccatgcgaaagtcgagttcacttttcaacaactaaactcgaggtcagcacccatgcataactcgagtttaactctcatactaaaactccatgattaaactgacgagttcgagtcaataaaggggtcgactagcaaaacaaagatatttacagtcaagtttagtcgatcaacctaatacttcttaagccgagcacagttctcgcaatcaaagaaagtccaaagattgacttgggggtctgatcaacgtatttctctcttagccacatggccctaatttctcttagccacatggcccaaattttcgaaaaagtacggactttgcaaatccgagaacttcgaaacaaatacttaaagcaagtatcattgtaaagcctctaaggtaacgcaaaggaaaaatgttcaaaagctccctctggcaaacaaccaataagtgttaaaaccccttgggaaaatagaaaattccctctcgcgaaagtcgtgtttataaaataaattgggacaatccccgaattttatggtcatagccatgaaagagttaagttgggccgaaagcctcatcaacattcggtgtgatttcgtcttggttcggagtagcaatggtcgttccttgctcgcgagtttctgttttgtacttaggagttgaacattagccggatgaagtatcagtagcaattaggacatacattttggcgagttcgagatcagcttgcaggaacttagtccaaattcatctccgacaccttaacaagaaaattaggcctccgaccaagtcaacttactcgaagaactgggggcttatgttgatatcggatcccgtaaaccggatctcttaagtatttcgaaggcccatcagttttcaagcccaagaaggaccatgttgcacaaaggaggtggtcaaatcttgacattaatttgtagtttaattcatggattaatgactatggtcaaaagaataaacttgtcattcaaatttatgaattgattgtggaagttattttgtgaattaattctataattaatagccaaataatggcacattggaagaaggaaagagactataaaagagaggtgaaaactccaaaaaaaggggctagagattctacattttcaccacaaatcttaatattaaacattgttattttctgataaatacacaaaagattatttcttccctttttatgtaagatctttatacaagaaatattataccattttttatgtacaatttcttcgtacatttctatatacttacttatacttttattatgcacatttgtcttgtacttttgtactcgagagttttagcccacaaataatataaatacttgagtgtgtgaatccgacatccacagtcctttgctccggttgatcaatatgttgctcaaactcgatttgctgctcatagtcagcttgagtaaagtactcatgttgctcatattcagcttaactatattccggttcatcctctcgagttcctccaatgtcgatgttcaaggcagagggagatggcatgaaattgatgttgcgccttgtcttcactgaagtccggttctcgcatggtaggggcaacagagtcaaagctccgtatggttgaacttgaagaggtagcgatccgctggagttattttctcaagaaaatccttccccttgagatagtcgaggtcaatgaacttaggtaatacgttaggtgttccgaattccatacccacagttcctagtattggcgttaagagaccactaacacaaagactcccgcgaattcccgagcgatggatggttgcagcatactccttgtagctcaagaggtgatctaagagaacaacactcagcgaagtgtccgctctatcacccgccatcttcctcccatcttttgtctccctcaaaatgaagaccaaagattgctctatcatgcatagctccttttcactaacgaatccggtggccttctttggaaagaggatgttggcgatgcattgatggaggtatctaatcacaggatttccgattgaagaactcttgctcttggttggcgagaagggcttcggaccggcaattgtcttccaaagagatttcagctcttcttgatcatagtcttggcagattccttcgccacttggaaacccgaaaattgtatcaagatggcgaatatcaaaagtatactcgacatccctaaccttgaaagttatgtaaccaagacctcctcactcctctttctctgaatcatcaacacaaaaatgaaccttgagggttgcaaggagttggcagctctcctctttgtatcccccacattggcagctcatgtatgttgcaagattggccaattccatcaagtattcgacatcaccacaaataccaagctcttgcattgtttccttatgagggtatctagttccgtcaaacttcaactcctttaagtattgatagtactcgctcggggttggctctctctttctccttggctggtttcttctcccaacaggggttggtgtatcatcccgatgatctcaacctcttcctcagaaaccgcttcttcaaagggtgcctcttcatggtgttcttcttcagcttcaacgaccctctttccctgatctacttcttctctttgcatggttgagcggctagagcttcctccttgaatcgagcttgatctttgagcacgacgagcttggcgaatttggcgttcagtcatctcactcatgtcaaacgcctcaacttcttcattatcaacagaggatcttcttgcccgagatgaactattccttcttgaatccatggagattggtggtgaatttcaataaagcaattaaaaacaactctccaagaggtatcaaaagagaaggggaatcggtttctttggtgataaaattttgagcttgaaaccgattgaatgcttgaggatagactttggagtggtcgagtaactttggtgaagtactggtgaagtgaaaacgaattcgtgataaggagagtttgaaatgaaactttggagctttgtgagagagtttgcgaaaatgagatgatgaaagagagatgtttcaaaagtggtttggagatttcaatgggtggaggaggatggccttgggattctctttggaaggatagtaaaggcgagttggaaatggtgaggggcatgggtaaatggtttgtccattgagtaatgaagtgaaggggaacatgtgggccacttgacctcactccttggtcgccgaatcattcaggctcgagtaaaggatcgggcatcctcttgaagtgcgaaatacttgatcaaacggtggagaatgcttctcccttggttactcgatcaaacggtgagggtgatttcccacatttagtcattcaaatcaatggctcaaaatgctcctcctcattctactcgatcaatggttaagatctttcttgacttggtttgaatttactcgaccgttgactcccttagggtcactaaaacaaacctgaaacacttaaacaaaaacatcaaaaataacaagaaaaatagaaagttatatacatggatagacatgggacttcctcccaagtgagcttgttttaagtcactaaggttgactcttacagagcttagtcagaaaaaaggttgaagagaggaacagagaagtcctcatcttctgtggttgaattttcattgcttgaatcatactctgcatcctctcttgagatatggtaggatgagtactcatttgatttttcttcaaagtaagcttcttcctgatcagcagagtaatcttcttcttctgaaccaggttccttttaccaatcctcaaattcaaaactagggtagcctctaaccatttcttgaagttccaagattgcatggttcagtccttccatcttgtaagttagctccccaatggtatcctcttgagctttgtatccaacctagagttccagaagttcttcagcaacaggatcatgaatcaagtgttcttcttcagcagaggggttggtgggctgtttaggcactcctggagaataagtcggaataggagtatcctcctcactcaacaacttgctctctaggcttcttttctctaagtgaactcctttctgatcttctggtgcaaaccattctgttgtgaaatcttcatcctccttgatagctagtgaagtttccatcttctctggatcaataccatttgaaaactttttaactcttttttttatacatccatagttaatctttcagcttcatcacccttgaagacaatccttctatgactctgctttgccatttaaatttttttcccatcgcatactagtcatcttctgtaggatcttcagtctgagctaactcttccattgccctcttcttgtggtcaaaagttcgcttcagcttgctgagttgggaagtatagttgacttttggtgaggttcctacttctgttttttcatcaacatccatgtcctaaatcccaaaattctgaactccggttgttgatttccgtgaagccttgctgatgtcaaatctcatcttgatacctttttcaaggtttagatcaatttttccattcctgacatctatgactgctccagctgaagctaagaatggtctgcctaggataaggggatccttgccttcttcatctacgtccaataccacaaaatctgtaggtatctcaacatttacaatcttgacaggcagattttctattagaccattagtatgtgcaacagaatcatcagctaagagtaaagctaagttgcagaacttgtattccatgatccttagccttttagctgtagagagaggcaaaaggctaacagatgctcccaaatcacaaaggcacctattgaatgtcaatggtcctagagagcatggcagagtgaatgaaccaggatcatcaagcttttcttggatgactttcttcttgtatgtttcttgggtagaggcactgctaatcatctcttgattctgatctttcctgagtttttcagttttgaacttttttcaagaatggtgagtatttagcaaagttgtgtgctctatagtccagatgaattgcttggtggcaggtgcagcaatttgagttgaatcccccccccccattcttgaatcatactgtcctcagtatggagggtttgattacttggtggagactcatcttcatggtggatggtgatagcattcgcagtagcatagtccttaggattctggactgctttccctagaagttgctgaggatgcttcggagcagaggttgatgcaaattgactctccacatacttgattttggaattcagagcttcgaacttgacatttagatcgttgtaagaacaatcgatcttgttgtgtaattcagctatcttcttgtcaaaagccatcgggccactcgcttatccatgaatgatttgttgaatgagttgcttaatttcgggatctttagctgttggggcttgttgtggttgttgagtgaaccctggtggtggattctgctgttggtagcctccattaaactgttgtttaggggcataaccttggttgtactgaacaaaaggcttggactgattctattgtcgtggatacacttgatcttgggggttagctacattagtgattttgtaggagaggtttgggttgggcttgtagttgttgtactccttgttgaaccctccttggttctggatgtagcacagctcttcagtttgatcattccccccttcttgcatttggaagtgctcttcatcagttatgtagtgtatgtgcttctgctgagccagcaacaacttgtctaacttttcatttagagccttgatatctttgctttgattatcctcactacctccagttcctctcactaagcgatcatagtcttcattgtatcacccatcagattgtgctagattttcgaccaactcccatcctttttctacatccttgttcaggaagtttccattggaggttgtgtcgagaagcattatgatctttggtaaagctcctctgtagagtgtgctcaaataatgaagccttcttaaaaccgtgatgggggcactgagtggtgtagcttttaaacctctcccaagcttcacagaatgtttcattgtttttctgtgtgaaacctcagatctcgttcctcaatctagcggtgcaagcgttagagaagaacttggcaagaaaagctttcttacaatcgtcccatgagttgatggagtctgggggcagagtcttctcccagtggtgtgtcttggctcccaaagagaagggaaatagtctgagcttaaacatatcttcagtgacaccattgatcttagtaaggccacagagcctatcaaagctgtcaagatggtccaggggatcttccataggtagaccatgaaacttgtttccttggatcattgagatgagaccactcttgatctcaaagttgttgttctgaactggtggtgacactatcccttgtctttggtgatgattccttggggcatcactgataacactgtattttactcattttaggtgtatgtttatcatcatttagctttgcatttgctcattgtataatatcattttgcaccattttagcttgttttgcatacttaggcatttcggatcatcttgcattcgcattgcatgttttggtgtgttttcaggtgcaaaaggagcttaaaaagactctactcgatccattcactcggtcctggcagctacagaagaggcatcatcctactcgacctctttactcggtccaggatgctacaaaggaggctgcagtttactcgaccctcctactcgattaaggcaacctcagatgaagcagcagattcaactactcgcccctcctactcgatccactactcgaagcatttactcgaccaagggtgaccatctctacaagacttgttgagctatcaaagcgtcttcggatcctcctcattccccactcaaccagacatctgagcatacaaataggagaggatgaagcatctactcgaccaattgatcagtcggagcatagacacaaaggcgtcgactttgcagcaccctctttactcgatccctaaggtcgagtattcgcccaaaccgccttaaatctcttgtcttctagtgaatctagggtttccaacactttagtataaatagatcattgaggtttatccaaaagagctagactttatctttcagtttttctttgtgtttatgaatcttgaaactttaattactcttaatctatttcctttttgcatttgattgtttaagtagagttgtttagcttgtttagatctacattttggtatgatttcagtaatttctgggtttgtgttcttgagaatgttgcttgagtagtgattagggttcttgaggatggattagattagggtaatctctaggttagttaggtggttagtgtttaggtttatacccttcaggattcgcttggcccgtatgcagttttcgctggctaatgtggagattcgatcatagacgtccagcgtccaaaagacgttcaaatggatgtctgacctacgaatttcagagatatgtagactcgaaacaacaatttaatggaggcttccaacagcagaatccaccaccagggttcactcaacaaccacaacaagccccagcagcttaagatcctgaaattaagcaactcattcaacagatcatccaaggacaagctactggagctatggcttttgaaaagaagatagctgaattccacaacaagatcgattgttcatacaacgatttgaatgtcaagtttgaagctctgaactcaaaaatcaagtatgtggagagtcaatttgcctcaacctctgctccgaagcatcctcaacaacttctacggaaagcagtcaagaaccctaaggactatgctactgctaatgctatcaccatccaccaagaagatgagtctccaccaagtcatttgactctcaatactgaggacattatgattcaagaaggggggattcaactcaaattgctgcacctgccacccagcaattcatctcgactatagagcacacacctttgctgaacactcaccattctcgaaaaaagctcaagaaatagcagaatcaagagatgattagcagtacctccactcaagaaacatacaagaagaaagtcatccaagaaaagcttgatgatcccggttcattcaccctgccatgctctctaggaccattgacattcaataggtgcctttgtgatctaggagcatctgttagccttattcctctctctacagctaaaaggctagggatcatggaattcaagttctgcaactttgccttactcttagctgacggttctgttgcacatcctcatggtctaatagaaaatctgcttgtcaagattgaaaatgttgagatacctacagactttgtggtattggacgtagatgaagaaggcaaggatcccctgatcctaggcagaccattcttagcttcagctggagcagtcatagatgtcaagaatggaaaaattaatctgaaccttgaaaaaggcatcaagatgaagttcgacatcagagaagctttaaagaaatcaacaacaggagatcagagttttggaattcaagatatggatgttgatgaagaaacataagctgaaacctcaccaaaagtcaattatacttctcaacttagcaagctgaagagaacttttgaccacaagaagagagcaacagaaaggctatctcagactgaagatcctacagaagatgactggtatgaaatgagaaaaaaatttaaatggcaaagaagagtcatagagggattatcttcaagggtgatgaagctgaaatatcaactttggatgttttaaaaaagtgttaaaaagttttcagttggtattgacccagagaagatagaaactgcactagctatcaaggaggacgaaaatttcacaacataatggtttgcaccagaagatcagaaaggagttcacttagaggaaagaagcctagagagcaagttgttgagtgaggaggaaactcctattccaatttattctccaggagcgcctaaacagcccaccaacccctctgctgaagaagaacacttgacacttgattctgttactgaagaactcctggaactcaggatagaatacaaagctcaagaggatatcattggggagctaacttacaaaatggaaggactgaaccatgcaatcttggaacttcaagaaatgatcaaatgctaccccagttttgaatttgaggattggtcaagggaaactagttcagaagaagaagactactctgctgatcagaaagaagcttactttgaagaaaaatcaagtgagtactcatcctaccatatctcaagagaggatgcacggtatgattcaagcactgaaaattcaaccactgaagatgaggacttctctgttcctctcttcaacctcttttctgactaagctctgtaagagtcaagcttaatgacttaaaacaagctcacttgggaagaagtcccatgtctatctatgtatataactttctatttttcttgttatttttgatgtttttatttaagtgtttcaggtttattttagtgaccctaagagagtcaacggtcgagtaaattcaaaccaagtcaagaaaaatctcaaccgttgatcgagtagaatgaggaggagaattttgagccattgatttggatgaccaaatgggaggagcatcaccaccgtttgatcgagtgaattcatgaggttcactttggtccgtttgatagagtaaataagattgaggagctctcctagccgttggatcaatttttgcgcaactcaagaagatgctcgattctttaatcgagctctcattatttgaagaccatggcataactttgtgaccccacttgctcccccaacactcttttactcgacggacaaagctattacccatgcccctcaccatttccaatcaactttctatcctttcccaaagaaaccaaacaccattctcctccacccattgatttcgcaatccttcattgaaactctctctttcatcatctcattttcgcaacctctccatctctcacaaagctt

SEQ ID NO: 542 - DNA, 54573 bp, Arabidopsis thaliana
gtattggagcgttttcgggcgaagctttgtctttcatgcccgaggtggttagctcggtaccagtgtgttgatagtaactggattttagtggacttgaatacccacggttgcgacccgatctgattcagtcatttaccaacgtttagaaacgagctggggcaccggtgttaagtataaccgggtttcagaagatagaattcatagcttgctcgggaaaaacataagagtagattgttatctcgaatatttatatagcgcgctgtaaccaaagcggtgtaaatgaaactttgacaataataggccgtcgcccgttaaaatatttcagagtaaaaagatttagaaatcaaatttcaagaaaatttgaagtagaaaaaatgaagttcaactttaaaccgaagcgagagtttaaaattgaagtgggagtatagatatacagaccccactccaccctttttttttgtggggctagctgaactcgtccggagacaaccaacccgtagttcaagttatggtgaaaaggccgaagctctttttttactcgatagaagagtttattttttactcggtagaggagtcttttcgctcggtagacgagtgtttttgctcagtagatgagtctttttcctcaatagactagtatttttgcttggtagacgagtgtttttgcaagtttacacaaaaaatataacatagaatgcatatatatgattgagttgtgcttgttagattttaatagataacacttatgttattggtttggagataaagatgatgacatctacgacatggacgatctgaatctcggtgcgcttgatgactgtctattgagctcagttgactgtgtcctgatgcgattcagatgttttctgaagcattctcacaatcggctcgggctgtgttcataagattaacatccgcgcaattttacgacctctctctgaaacggttgatcgaataaggtcccgaggtgctttgttctaggctaggggcaaatcatatgtttaaccatgaagtgattgttattcttagactgtttggctcggtcttgcttgtggtggaatccgaccccaacacctctcagacacaccatcatcattaactcacggtttttgtttttaaaccctaagctctctataaataagaagccatcattgaactccttccttcacaaaccattactctctagatttttaagaatcttgacgatggcaaatgaaggagtgtctcttatctgccccctcgacctaggcatccctctgttcttatacggtgacagtttcgacccgaccagtgtcctcttccctcactatgtcttctactttcctccaaaggataaaaaagaatcatacgattttgcggacaaggttggttatcgcctcttctaaagatgtagattgctgttctttttaaacctctttgggtattttgcgttttaggtcattgagaagcaccgtcgtgcttgcgacgagaggcagcatctaggccttaaaaggcagacgctcgaagctcgcatcgcgcagatggagaggaaagtaagggctttagagtgtgactccttttaatgggagtggaggaactttgactcatttgctaagattccgcgcatgcttcagatgtatcttggcagccaaggtcgggtccctgatcccaatcgcgtaccagtcaaagtaattccctttgacagcgaagagggcgatgaagaagaggatataaacacctggaagcgtgtaaaaacgaacccaaggtgggcgacaaaaccgaggcgtccacttcaaagtccaagccgacaatgaaggagtttgttcctgagccttttccaaaaatgtccccgaactaaaagtcccattttttttatttttttttggttggactcattatgggcttcaggctatttgtatttatgaaaactcagctctgatatgatatattcacgggaacaagcttaaatgcaggaatagctgacagatatcgatttctccgcaaatcactctctgatatgatttttagaactacgatgatcctataaattgacatttgattttgcttttctcttcatctttttctttggcagatatggagatcgacctttacagtacggagactgtgccagatcactccgcagacggaatgatacgggaagaagttccaaaagttccggaccaacgaccccctcttcctcgcggatactttcgctctgaaatttggactccgtgcacgctaatcaaagatcttccagaaagagaccaataaatcgcgatggggttcataaagaagctcgcattttgtcagcagaaactttcaatcgagaggaggtcactacggaaaaagattcctcagatggagcaaaagattaccaagatctcaagggaacttcataacttcgaatctcaccccagagaatggctcgagttaggtttcgccgacttcgcagacatcccgagttgcatgatgccgatttttgacttggccggattcgtagttcaactgttttgctcctcgaagaggatatcttaactccagatgggctaagacaaagaagatctaggtcttggccttgcttgcttttcacttttcccgaataattgttgtttttgcttcccgctttgtatgttcgcatagtcggactttttttagaaataagaataagtttttattagtagttgaactcttgttcgagctgcctacgtacccattccgggatcaactcacacggtagttcatgtacaacataaataaaatgcgtgtcattaaacataaaaccttttcaaattcaccacattccatagtcgctaaactgatctatcttcgaggtctattaacctataaacaccgtttcggactacttcagtaatgatataaggtccttcctaattaatcccgagcttgcctactccttcttctcgtgtattgtcgaaaactcggtttaggacatcgtctcctacaaagaaaggtctgcttttaaccttggcactgttgtatcaagccgccgcttgctgataattttgaatttagattaaagcttggtctcgtctttcattaatgagtccagcgactcatcaagcattgctgaattttcggctttgttcagaggagcctctgtttggcgaagtcgtggaacattgagttcggccgggacaactgcttctctcccgtaaaccacagagaacggagtctccctagtagaccttctaagagtcatgtgatcagcccacaaaacgggttggagctcatcgcaccatccaccttttagatgattcaaacgcttcttgagattgcttaaaattgtcttgtttgagcctcggcttggccattcccttgcggatatcgaggtgtggagtaactgaatttgatcccccaatccaaacaaaaagcttcaaaatcgtgcgaaatgaattgtggtccgttatcggtgactatctcgtatgggacaccatgccggcatatgatatttttctacatgaaagttttcactgccgaatctttgatattaacatatgcctctgcttcaatccacttcgagaagtagtccgtcaaaatcatgagattttgtacacctcttgttgacttatgtaatggtccgacaatgtccatcgaccacctcataaacgggtatggggcagagatagaagaaaaaaactctgaaggttgatggattaatggtgcatgaagttggcagtgcttacacctttaggcaaacttcacacattctgttatcatagtaggccaattatatcctagtctttttatcttgaaggccatagccctttccgatgaatgacttccgtaaagggtttcgtgcatttcgctcatgacaatctcaacttcgggtccaaaaatgcatagcaagtaaggatcgctaacaactcgcctatacaatacgctcttggctagacaaaactttccgctaacgattctcatctttctggcctgccactagatttttgggagctcccctgttaaaatgtaatgctttataggctccctccaatcagccccccaatgtttaaccgaattttggtctacttcgtggaatattcatggttccggttcaggatgctcattaggtccaaaactttcttcttcgacaaggggctctgtgacgcccctgaatcactctatgaccggacaagccaagggcaacccggaaacgctacggtgatagctcacacagccaacccaacttagattccaaaagaatttagacccttagacaaatcatccacatgaaccatccctcacgaacgcggtttaggcttttacccttgccatgatcatgagttttgtttgtttacacaagactaatatggaatggaacacactctctatacgaaaataatcttttataacatataaattctcagacaaccaagtatccaaaactttttaacaatgggccctttagcaaacacactcaaatccaacaaaaatcaaaatcattaagttttgcataaaacaacaaactctataccggattttctacgtcctgagcatccctctaatggttcctgatatggatcaaattaccctaagaactattctctcgaataagagatcaattgtagtatttaaggatcgatttccacaaagttcttttgttcacacagtgagttgaatgtcaagatttaagctagcagggtatgattgaaataataagaaaacaaattaaaaagacagcagattgattggttgtaacaattaaataaagagataggaacagggtattctcaggaaactattggttactagatctaatgaaagctaggttgttatcgaaccattcttaaactcaaactctaattatgcaataatcggtggtgttccgcgaaactccctatgtctatagctaagaataaccggagaagccgagaaatctttaacctaaacatgaattctaaacgagttcaattgttcaccttagtagataggccgattcttattacacacctgtaaaccaggctgatcaaataatagatccaattacagatacctatggtgggcatatctattgtctggattcaagatctagttaattactctagatctagcattaagaacaatcaaagatgaagaattctacagataacctaacatgggggcgatctactaaaccatatgaatccttaatgagaaaccctattcctaacaagcaaactactcagacatattgaatgaaacaaacaacataattgagatagaaataataaacacaacaaataagataagggaaagaagggatctctgcactgtattaagaactaaatgaatctctcaaggacaaaggatgaatagcttatgtctctcgaaatagggttggcaaagaacttcctaaaagaaacttaggtctaaataaaatataaaaagcctataaaacgtccagggactaataatgcaaataggaaagtcttctggagcaaatttcctcttctgtaaacttgaaagcgtcttggaatttgctgggccgaaactggtgtcgatcgacaaggggctctgtaacgcaacacaacctcccaaccataagccttaagcataagaatctaaaagatctcatatgcggctcattaccaccattcacaccattaatcaatactcatataattcataaaataaataatgaatgcaagagtatatgataatgcaaccaaacaagcaatcaatcacccaaataaacgtcaaacatatcatgtgccatatcacatgcttcgagactcacagagattcggcagaaagtttaaggttagcttcaacgattctcggacatctcacaatttctccacatcatttgcatccttaatctagcttctttctaggtaacctccctcattcttgagttttaacacgaatcggaagatcaaatcttttagtagaattccttattcgactcaacaagattcatggcatggatttctcgcttatgaactagaattcttgagtcaaggacaagaattcttcactcatggtcaaaggatcttagtcacgggcagcgtttctcgatggtaacaatttttcacaatttctcggtcggatggtcactttaaaactcgacagccactcggttccctcaattttctctctcaaaattctttaggacgaattgggcttatataggggtgtcaagggcgagtcagcatgtacacgtgtcatccgcccgcgatgacacgcatgcgcccttaatgggacgacgacttatagaaccctatttttactgcttttagctatgatttaggtataggttttagagtctacttgttatttctagagtcttttctagtccttttcaggtctttacagatttgtgattcatttggagataatagagcattctggaggaaaacaaagaatatatgctgttgaagcaacccggaaactaaaaagcgcttaggtgtccaacgacgccaatacgtgacggtaattcgaaaacgcaacttattgaagttttgaagatttccaaattcagcccagaactttcccttatttctaaagaaggtccaacatgtttttaagacatttatatatatatatatatatatatatatagtttttaggtcaatgtttagatcctaagcttggagaggctaatctccttatctcttttatactttgggagcaaaaccctgtggagactccttttggagaagatcttccttactctttctcttgctattattgatttcttattcagactttgatttgtgtttctactatcatgtctgagtaatcaccttattgggtttaaggagtctcaatagggatttagatggattagtagatcgaaaaccgcttaggattattcttagagttcttcatcttgattattcttattgctagttttagattgatcacttagaatttgatattagataataggtatgcccaccataggtacttgttatttaaactatcatagatgagcctaggcatttaagaaataatagatggctcctagaaggggtctggtttagatactaggtgaactaatcaaacttgataataatggatgttttagtataggatttctcggattctccggttatcttagccctaagtatagagagtttcgcggaacaccaccgattattctaaaatcatagtttgagttcgagaacggtgcgataacaatcctaatattagctacaatttatctatctcccgagacaattcctgagacccgatgctttaatctcttgaatctagaactcatttacttgcttaattgtctttacattaatctactttgtctatttaatttaattcatcataactctattgtgtgaacatcgagagctcagtggaattcgacccttaagtgctaacaaagatctcttatttgagggagtaagcttaaggcaatttgagctatatcagtaacaaaggaattctccggagggaactccaaaggtacacttcgccggattcaacttcatttggtattcattgagaattccaaagcactcctctaaatgttcaatatgatcctctatctcttattatttcaccaacatattgtctatgtttacttccatcgttttgccaaggtgtttgtgaaacatcttgttcactagtcgttggtaagttgctcctgcattttttaaaccaaaaggcattaccttataacaataaatacctgtatccgtgatgaatgaagttttttcttgatcctcagaattcatcattatttgattataacccgagaaggcatctatgagtgttagtagctcattcgccgcggtggattccacgagccggtgtataagtggaagtggaaaactgtccttggggcatgccttatttaggcccgtgatgtcgatgcacaccctatcttttccattcttctttttaactacattcgtgttgactacctactctgaatattgcacttctcttatagacccgatcttcaagagtttgtccaactcatcgttatatatgccatttgaagaaagaggtgaaaaactttgcatgagttgagggttctataatgaccagtgtactaacgaagaaaccttaaaattttcaaaatattactttccttcgcatgttcaaacgaagagtcgcctacctgcacgacacgatgatggtggtgagaaaccatattatccagtcaacgttccaaatatatttcaacaaattgggcgactaagtggaaaattccagaaaagtcgactaacaaagtaggagtatgatcacttgcatatatatgtacttaggaactgcgaggaagttctaatatcaaagtcgaattttcgacgatgtttataacaatttattggatttgttggctgaaactataaaattcgcatgcaaaataatattttatatttccaatggggttgcgaatgtttaaagtttatccgttaaaaatctgtcgggaacaaaaacaattatgcggcaatattttgtgggttccgacagatttccctctacttttgccgtcagaaatattttatttattaccatcaatgttttattttccctttaatttttacgcttcttcatctctccaaaacaaggcccttaaattcctctttcagatctctcaaatcttactcactatccctcaaatatctcttaatattctctcaattcctctcaaatctcaattttcctttaatttcttccagatctcaaatctcagctcccctcaatctctctcaatctctccactgtctccctcaaactctctgcaactatgtaagtgaaccttctctaccaatttcagttcgtgatttagttatgatttgttaacatttggatgcgtaggttgatagatatagattgttagtgatacgttaggttcatagatttgaactaaatttaggatgtttggactaaaacctagatgttgaggtttttagatgagaatattacactgtgggacacttttacaaaaatatttgtcgtttatgcccttctaaaagagaaggcactttaccttgttaaattgtccaatttgccctcaacattattttctctctctttagcaacatttcttctgtttttcgccatctcttttacgaaatcttctcttcttaatatctctctttttctagaatcaaaatcaaatattataagacaacctcaatattcaaaattcaaatttgaatcttatagggtttatcatcttcttccctatctctcaacaatctaacggtgacaataaactagactatctttaccaaaccccactccgcttcctccgtaacttccagcgtcacctcctccttagccacctccctcacggccaccacaacctccaccagatctgtaacctctgctatgtttctcgtaaccactagcgcctcttccatttccgccaccacctccatcatgggctcctccacccccttgagcaaatggatggttctggtaatttgatttttgttttttaatttcaatctcaagtcgagagagagagagagagagagagagagagagagagagagagagagagagagagagagagagagagagagagagagagagagagagagagagagagagagagagagagagagagagagagagagagagagagagagagagagagagagagagaaagagagagagagagagagagaaagagagagagatttactttatttacgttttgatggattgagggtaaaaaaatccaaaaaaaaaagaattagtgtaaaaagtgcatcttccctaaaaatggcctcaaatggaataaaattctttaaaagggcctaaacgtgtcacattccctttttagatttggatgaaaatttcagaattctataaacaaaaccaaaaatgacgtttgtaatatatttggaaaatataaaacattgctacaaattatttatgaaatatttagaatattttaagacaaatattcaataataatgtatacaaatttatagataaaattttagtatattatgataagcgatattatagaaattggattttaaccaattaaatctatagtaagaaaaatccaggctatttactttttagggcatccacataggattttaaaccaccaatcgggagcagccacatcaccggttaacatttatgaaattatacttatttctattgaagaatggaaatgtagttttttgaaaaacaatatatgaataaggaaaaaaaagaaatgtaaacttttgaaaaacaatatgtgaatacattaactaaacatatatcatatattttgttaatcttctattttccaacaaaaaatatattcatttaaccctacatcttatcaatataaataataccctgatgaaaccaattctatcatatttattaacattgtaaattttgagccgtcggtaatagttaggattggttgctacttttagtggcgcctctttttagtttttttttttattattattgtttttgtcattgtgagcacttatctctttgtcgagatgtttctacgttatatcttcgatgagtcgtaaaacatgtatttttgtatgatgttaaaaatgattttgaatgtttatttgattgttagaacaaaacaacgtcgtttattgaagacacaaaacgacgtcgttttgtctcttgaaacaaatataaaccataaatctccaaatcgatttcattatctgcgattttgaggtcaaggtaggtctgtgattttgagataatgaaatcgatttgggtatttagggtttatatttgtttcaacagacaaaacgagctgcaataaacaacgttgttttgttctaacagaggtgatacacgagacattaacgccgtaaaaaaattatgttaacctacttaacgacatgactgaaatgacaagttaacaaaaactttgacatttattgtgaaagtcaacaaaaactttacgatttatttgttttccgtaaagttcaatattaaatcgtcctaaatttgaaagttcgtgatttttttgatatttttcctagtattgttatctttataagtggcttaattcatagaacttagatgtttgagagaaataattttgatatttttattaggggaaaatctctgacatgtgttgcaagtgaatatacttgtgatttgtttgtgcgtttgtggagggaacttggtctataccttggctatgagtggactttcggtatgaattctacaacctgtgtgctttgattttggaaaggtttctgatcatgaaggtaatttaacactcttctcattgtatctttaatttatatagctaatgcatataataaaaacataaatattttaggtcgtcaatgtataatctcacataatggtgcttcaagaattacattcaatcaaagttacccagagattaacatggatcgcatcacataagaacatttatattttcattatcccttaactgtttagtgtattatacaaaattttagtcttagctatttatttcttttttgttttcctactgtttcaggactaaattctttgaacggatgcaaccagctgagctaggtaaagttgttgatgagaactgaagacatcaagaccaaaccccttttcatcattattataaaatcttctctattatgcttaaaaaatgtactgttaaaacttcgtttatgtttttatttcactgactatgcatgatttctgtaaaatattaactttgattatgcttcgttttatttaataattactaaatcactatagttccgtaaacttagataaaaatttaactgttttgatattgttattcttatttataatttggatttaaattatttagattttgtgttgattgtaacacaatgtatttgaaatggaacttttgatttcaaatttaaactaaaatatgagttagatatgcatgtattaaacaaagaaaataaatatgcaaaacttagagtttattaaaatatttgtccagtgaaatatgccattaaaacgttagagaatcttctaagttagaaacatccatgatttcaacgatgagtttcttaatcaagcatcccataatttttgttacaatttgcacaataatagagtagataaactaaagagtaaatttggaaaaatgccctacttatgagttttcgattgaaaagtacctttaaacaaaaaactatttttaatatataaatttacgaaatttgtctaaaaacaaattataaaaagtatattatatgtacatgtatactaatttaatgctaatctactaaattattcgtgaaaaatatttgctaatgttttcagtttgtgtttatatattgttaatacactacaaaaaaatttgttcattgatagcataacgttatatcacggattactcaactgctattgaagattatttacaaattttgttttcgtataacagcgttttatcaacgctattaaatagatttactcatatagcaaggttctaacgctatgacagaattcctctaacccgggaaactaaaatgactcataccgcgaaacacttaaaataatttttttttttctgtgaacagacatattttccctctgagctccagaaaaccctaagaaaataaaaccctcaaacggacgactcgaatcctggagccaccgattgaactcgccaccgccgttgttgaagtttgccgccgtcaaagcaggagccgcaacaacaatcccaatttcggccctaattgtccgattaaaccatctctctgaatcccaaatcgaaggcatgtctctctgaatctgtagatttatttcatctctttcgttaacctagttagttttcttttagctgtcgttaatcctttgaactgttttggttcttaatcactggatttatgggtttctctgattcgattcaggaaagtttttatcttttgcatgtccgtgttctttgcaaaattagaactttatgcttatgtggtttgatttaggcgtagctggataaatagaatgcacaattttgctttcggaaattttaaatttttagattttaacaaaacttctcgagatttacaagtgtttgttgacattctattacagctatttgtattgacttgttcttcgaatctttggatctttgagtgcttgtaatgacatggtctctgaatgtttagattatttccacaacttgtcaaacacattcttgcataaacaaacacatgaaactagatatactcattctattttttgtttttgcaagtgctactgtgtaaataatgggaatgtgaagctgatatttggctcttattacgcgacaggttagtatcatcttgatcatcactgtttctttttgtcttgaatatcactgtggctttgtgtatggaacatgactgtttctttttgtcttgaacatcactgtggctttctgtattgaacatgactgtttctttttgtcttgaacatcactgtggctttgtgtattgaacattactgtttctttttgtcgtgaaaataattgtggctttgtgtattgaacattattgtttcttttgtcttgaacatcactgtggctttgtgtattgaacattattgttttttttttgtcttgaacatcactgtttctttttgtcttgaacatcactgtggctttgtgtattgaacattactgtttctttttgtcttgaacatcactgtggctttttgtcttgaacatcactgtgaatatgagtttggggctgaatataaagtgatttagatatgtttcaagagtctttcatataatttgaaatcattcttatggtattaaaggttttaaaacacgctttcaatttataatggtggaaaaggattgggtgcatctactcttggccagtaggaaaatctggagatcttacctctctttttattctccttttaactcttcactaaagagttgatcatataatattttttttttaattaacctttaactcttctctgaagagttgatcctgcttatgagagaggggttacaaagtttgtacgagatgtggctgcagctatgggagacgtagatatgattatatgtccctgcattgattgtcgctgtttagattgtcattcagcctctgtttttgttgatcatcttgtaacaaggggaatggatgacgcatataagaagcggtgtgactggtatcatcatggggaatcaaactctagggctgagagtgatactaaagtgactcagtggaatgatgaggtgttatatcaagctgctgaatttttggatgaagagtttgcttataaggttggcttgagtgaaattgcagagtgtgatgacaagaaagaagatgagttccttgcaaagcttgcagatgctgaaacgccgttgtatccaagttgtgtgaaccatagcaagttgtcggctattgtatctttgtttagacttaatacaaaaaacgggtggtcggacaagagcttcaatgatcttctagagatattgccggagatgttgccaaaggataatgtgttgcacacatcactgtataaggtgaagaagtttttgaaatcttttgatatgggttatcagaagatccatgcatgtgtcaatgactgctgcctattcagaaagaattacaagaagcttgacagttgtcctaaatgcaacgcttcaagatggaagactaacttgcacattggtgaaataaagaaaggtgtcccacaaaaagtattaaggtactttccgataatcccgcgccttaagggaatgtttaggtctaaagaaatggataaggatttaaggtggcactttagcaacaaaagcagcgatgaaaaactttgtcaccctgtagatttagtaacatgggatcagatgaatgccaaatacccgtcatttgcaggtgaggaaaggaacctgaggcatgggctttctacagatggatttaatccattcaacatgaagaacactagatatagttgctggcctgatttatgcatgaagaaggagaacatcatgttgactttgctaattcctggtccacaacagcctggtaataacattgacgtctacttagaacctcttatagaggatctatgccacctgtgggacaatggggaattgacatatgacgcttacagtaaatcaacatttgatctgaaggcaatgttgctttggacgattagtgatttccctgcttacgggaatctagctggctgtaaagtaaagggaaaaatgggatgtcctctatgtgggaaaaatactgatagcatgtggttgaagttcagcagaaaacatgtctacatgtgccacataaagggtctgccaccaacacatcatttcagaatgaagaagtcttggtttgatgggaaagctgaaaatggtaggaagaggagaatattgagtggtcaggaaatttaccaaaacctgaaaaattttaagaataactttgggactttgaaacaatctgcaagtaaaaggaaaaggacggtgaatattgaagcagactctgatagtgatgatcaatctagtgaatcagaggaggatgaacaggaccaagtagatgaggaggaattatctagatggaagaaaaagtcaatttttttcaagttaccttattggcaggtgtgttaaacattcctgttatttaaatttcagatttcatcactaatcgttgattaaaagttctttactattatctcagatttcatcactaatcattggttaaatttttttgttttctttcgtgtgttgtataggaacttcttgtgagacacaacttggatgtcatgcatgtggagaggaatgtggctgcaagtattatatcgacattgttgcattgttggaaatccaaggatggactaaatgctagaaaagatttggaggtgcttgggattagaaaggatttgcatcctaaaaccaaaggcaaaagaacatatcttcctgcagcactttggtctctatcaaaggagatcgagtgtacagcccgttggagtacaaaattttgaaaatcttctgttgcacctagagaccttgcactcgagtaccttggtcgggtatgtgtgatgtttaaaacccaaacacttttaaatcatcatttactcgaccaacagaagcgacagagacttgcagaaatttcctgcagcttacagtaggttttctgcaaattttctcagtcaacagagtgtgggccacgcgctgaggataagctggagagagaatctaaaactcaacctacaccactcattttgaaaaatcactcgacctcacaaaatccactcgacctatctcttttcatttcaccaccaacactctaatctctctacaccacgaatcgccgtccaaagagctactcgatcctgacaatttcactcgacctccgagaaccactcgacctccgcgccgccgtcaccagttcattccctccgtcacccgaccagaccacttcactcgattcctttgatatactcgaccaattcatccacatcaaccgccgtctctttcaaaagaaactactcgacctcgtttcccagtctcgtagccgcactcgaccgacgccgccttagccgatttcaacagttcactcgaccaccacaaagcactcgacccctgcaaaagctactcggcttcttgttcttgaattcaacagagccttccaacttcagagaagttactcgacctctaggcttcacgactcactctacctccacgattcactcgacctactgtagcattccgactcgacctctgagaagatactcgatccaattcgtctaaggggagctcaagaacagctcaggttactcgagtacagaattgtactcgatcaattcaatctatttcattgcctattgacaataattttggtttcattgctatctttgagactaacctattgacatttgagctttgagttctaaatctctacaggagaatcatgagcaattacagtggcagttcttctgttgatcctgactacaacatggatgagacagagtcgtcatcttcaaggccagagagagaacagagagaatatgaaagctttagaaggaaagctaagatagcccgagggaagagagcgatgacagagaggtatgagcttatagacgaagatctagaagacgagtacatgcctgaacagactcgcagagctaccaaacttctgcacaagcccgacgtattacctgctgaggaatatgttaggcttttcaagctgaatgagttctgtagcacgaggtatccttgctcgacctcacttgcacaactcggattgttggaagatgttcagcacctgtatcagagttatcatctggacactctgatggcttatccgtatgtagcgtatgaagatgagacaatacaattcctctccatgctgcaagtagagctctaccaaggtatgacctctgatgagttggattgtgaaggattgagattcttgcgattttctgtgtatggtcatgagtataggttatcaatcaagcgcttggaaggattgtttggcttcaccagtggaacgggatctaagcccaagtatgacagagaagagttgaaagacttgtggatcaccattggcagctctgtaccgttgaatgcttccaggtcaaagagcaatcagatacgcagccctgtcatcaggtacttccagcgttctatagccaatgtactctactctcgagagatcatagggactgttactaactctgatatggagatgatcgcaaaggccctcaagggaactcttcgccaaactaaaaatggtatgtccctccagggtgaaatcaatgacacacctctctctgtacttcttctgatccatttgtgtggatacaagaactgggctcccagcaataaccgcaagagagcacgaggcgctctatgcataggtggcgttgtgacaccgattctgatagcttgtggagtcccaatcatttctgctggactcgagccgcgagcaatggatatcgagcacctacgtcactgcgaattcctggagtttgcaatggttgacgatttccacagattcaggtttgagcactctacagacaggagagctaacatccttctccctagccctgaggttacacagataatagagggagataacattgattttaggcctgaggttggacgcctctactatgagaacgctccgccattggatgaggatgatcttcttgaagaagctacttcggatgggatggatgaagatagggcagtggagttcgacactagcatgtatcactttggtgaacatgtacctccagcgaggcagagcaagagcttgacttaagctcataagaataacagtaaattgcagaagtggtgcaagaagcaggacaagctgatcgccaagtgtttcaagcttctgacagataagttgagttgctcttcctccaccactgctattccacaggtacagactcctctggagatgccatcgaggagatttaatgcacctgcgcacaggcctgagcttaacgagcagagagtcccacatgtccagggtaggcattcgtcattcgaatcccgggagcacaagagaagaaggaaggctacactcactcgatctagcagcagatcttgcctcattcactcgaggagatcactcgactgcggtgctggccgcagcagaaggagagaggtcgagtttcctcagagcggtgcttgccgccagagagctgatgaggtcgagtacccacctgctggagctgatacagaacaaggtggttcgtctatggcctgggagcaatcacaggcagccattgacgagcaactacgttcattcttcgactgaggtaagcgtctcacttcaccattgtattataccatctgttgtgatttgtttcttcattttttgtttctgtgattggatttgtcctgagtactctcttccaagtttattcgcacagtggactgtgtgatttaagtttgggggagggctcaggaagtgtgtgttgcattgtgtatatttttgagtctgcattcatctaaggcatagaaaaaccaaaaaaatttgaaaaatttcagaaaatgattttacaaaaaaaaaaagagtgttcatgtagttgcatcacatttaggatcgagtctagagtgtttcatttaggattgttgcatatgcataggggatgatgatgagatagtcttgtaagcattttgattcaccggataaactcagtgccctcgttgctagttgtctgttgaatagtcaatgaatttgaaaaaaaaaaaaaaactgaaccatgcctagactgctctactcgaccacactgtcatgatctgataccattccctatcaatttgaacctgaatctgatctttaattatcatgtctgcatcaaatttgaactcatggataccctaaaatacttggattttcttattcattttgatcactcttgttaatccaagtagctgactctccttattagagcagttaacccaaacccaaacctagactttctttcaagccctatatcacttgtgagtgtttgtgaggtcttattccgattaagcttggtagaaagtgttaggttcgtaacgacagagatagtgactcatgtagttctagtacgcatttttcggactagataggactaggtaggcgcttatactttgggttgggatgtgtttaaaagaaaaaaaggggttgattcattgataagaaaaggtaaaagactctaggtgaagtaagctaaagaagcagaaaaagtctagtaaaggttttgggatttgaaaagaaaagaaagagttcttgttagctattgaagatgggcaaaagcccttggttttaaaatgttaaaaacaggaaccttagttgttaaagaaatccaaatccgctagatgtatcaaagtgttgagaaaccttctcctagagttaagagaaaagaaaagaacgattagaaaaagggcttaaaagattcatgaatgcaaagggtagagtttagttcttgtattgggattggagatgggattaccattagatcttcatttgatgtactctgggtagatgggatcttatctctgtatgcatagcttgggacttacctttagcattctactagagcttaatcattttttgagagatcccctgttactgaagcctattctgtaagggaccatctttgtctcttgaccttttaccttagccaaatgagttctttgatgatgcattgcttgattcacgttccagaactaatgaatgttaaagggattggtagatttaaaaacttgtgtaggtcgagcatatgagtcggattgattgattgatgaggcatggctaacgtttttaagtagaattcgatcttccagcttagaactttcaacttggacattgatttcatctggtctatctggtgctttggctctgagtccccgctttcaaacctcacttccagcttgttcttgatcgtttgcttgagggcaagcaaagactaagtttgggggagttgataagtgtgtattttgcatgttttgagcatccatttgtcatcattttagcatcatatcatcactgttttataccatttcacatcatttgtcatcactttgcatgtttaggatagttttgcatgcatgttgcatatttgcgttgatttcaagtgatttgaagctgttgacgagctatctggaagaagcggacctgatcatgacaaaccacttgaccaagaggtcgagtaggagcttcaagatctcaagagaccactcgacccccaggtcgagcagaggacatcaccacttcacttcaccactcgaccacgaggtcgagtgccctcatctccatcaccagaccatcactcgatcacatcactcgaccatgaggtcgagtgtcttcacctccatcatcagaccaccactcgacctcctcactcaacttggaagtcgagtatcttctgacaccactcgatcacatcactcgacccccaggccgagtgacttcatcccattgctagatctctactcgacctcatcactctacctggatgtcgagtatcaccatcactcgactgcatactcgtgacaagctttagagccttcttcattccgcactcaaccagacactcgagcacaaggaagaaaaaaagactccagctattcactcgacctctcactcgaccacgtgggtcgagtacagttcttaacccgtcccaatacttcgtcgttttgagtattagggtttcgggatatttggctataagtagcatgtacttctcattttcgcagagaggaagtttttatctagttttatttccgcagaccttgtgtgctagactttttgtaatccggatttctctttatctattcagtattcagtattcagtttctgttcttgatttcgtttactgttgttcattctgttatcatcctgctgttacactgttgttatcatgttttcaacttgttcaacgtttatgctttctgttatgatgtctgagtagtgaataggtttctgaggatgggttagagtagtgtagaattctcagtatgctaggtgattgagtattggttgatagatcccttctggattagttgttcttaatgcctattgctttctgattaactggaatttgagcccagacatttccgcgcccaaaaggtgttcgatgaaatgtctgaaccactaattccagagattcgtgaccctgtaccaaggtattagttgcagggagcgttttggctttaacttattgattcgtaatgcttgttaggttagctctcgtcaatggtgattgagtctgggactaggttaatttgagagtctctgttgcggtggcacttagatttggttaatgaacttgttgtgtagggttaatttattgagcatgtcaatcacctgtaaactgaggaaacgaaactactcaattaccccatccttaggaattctttatcgattgattttattgtttactctactgttgattactgcatctggtcatttgttccttagtttctgcatttctttcctgttagtcgacctgatactcgaccacccagttatcgagtatccctgtttcactttctgcctgttactcgacctgtcactcgacctcatccagtgctctacacagagctgtgttggtcgagtgttttgctgtttctgtttgattttctgttttctgcatgttcacttagaactgctagaacacaccaaaacctgttattgcttggcttgacttagtgacttctgatcacatcttgattgttagcatcacacccatttggattgacaacctaaaatactacaacgatatgattggtgttttaggataattgactaaaaacctattatcaataagcgcacgattgcaacccttggacctttaggtagcaaccctctaagagcaataggcagaagctgttgcattaacacgtgataatcgtgtgacttaagccccgtgaccttacactcatctaatgagacgcctcttgatatgtttgagcagtacccatttggacctttgaagtcatacagccgcttacaaaagatctacttctctgtcttctgtagagtaaaagttttgaatttttactctatctccacattgttcctttgttcctgagaaccacaaacataaccaagacaaatcaaaaataacgagaaaataaaaatttaattacagagatagtcatgggacttcctcccaagtgagcttgtttaaagtcattagcttgactcctttactcctttaatcgtcaagaagttcctggagatgaaccgatgtcacctttggaaggatttggtctgctaagtatttcttgagcctttgaccatttactgtgaagtctccactcttaccagctagagtgagtgctccataatgacggacctcagtgatgcagaaggggccataccatctggatttaagttttcttggaaagagtttcaagcgagagttgaatagtagcacctgatcaccaacctggaaatccttagtgatgatcttcttgtcatggaaaagcttggttctctccttgtagattttagaactctcataagcttctagacggatctcatcgaggtcactgagttggatcaatcgcttctcctcagcagtttttatgtcaaagttcagaagttttaccgcccacattgctttgtactcgagctcaacgggtagatgacatgattttccatagaaaagattgaaaggagttgtaccaatgggggtcttgaaggctgtcctgtaagcccataatgcatcatctagctttgcagaccagtctttccttgtaatcccaacagtcttttccagaactgtttttatctccctattgcagatctcaacctgcccgcttgtctgtggatgataaggagtggcgaccttgtgctttactccatgcttcttcaagaggttctcaaaaaccttgttgatgaaatgctttccgccatcactgattactaccctgggaactccaaatcttgggaagattatggtcttaaatagcttcagcacaacttttgcatcgttggtaggactagcaatagcttcgacccactttgataggtagtctacgacgaccagtatatatttattaccgtaagaagatgggaatggacccataaaatcaatcctccatacatcaaagatctcaacttccaagattggattctgaggcatctcatttcttctactgatgttgccttttctctggcaagaatcacactttgaaacaaactcctgagcgtccttaaacattgttggccaccaaaagcctgcttgaagaatcttggacactgtcttgaacgtcgcgaagtgaccaccatatgccgagccatggcaatgcagcaggataccttccacttcatcttctgagacacatctcctgtagatcttatctttatagagagtgtaaagataaggctcatcccagtagtaatggtgtatgtctctgaaaaacttcttcctttcataacttgtcaggttgggaggctctactccgcatgccaagtaattgacgtgatcagcataccatggagattctccttcaacagcattcagttggtggaactctttcccactgtaactctttccgaagaactctacaaccatgagctgctcttctggcattgaatcgtctatcgaaaggggttcttcaattctcatccttgacagatggtccgctgcaccatttttaatgcctttcttatctactatctccatgtcaaactcttgcaataagagtatccatcttaacagtcttggtttagtatccttcttggcatacatatgcctcaaagctacatggtctgtatagacctttgatccaaccaaatagcttttgaacttctcaaatgcgaatgcaacagctagaagctccttctcagttgttgcatatcttccctgagcgtcatccaacgttcggctagcgtaatatatgacatgaagcttcttgtctattttctggcctaaaacagctcctactgcgtaatctgatgcatcacacatgatctcaaatggatagtcccaattaggcgctcgaacaaccggagcagataccaaagcatccttgatggtttgaaaggatttgaggcagtcctcatcgaatttaaattcggtttccttgcacaatagtctggttaactgtctggctatcttagagaagtctttaataaatcttctatagaacccagcatgaccaaggaaacttctgatttccttcaccgtttttggtggctgcaactgcatcatcacttcaacttttcctttgtcaacctctatacccttctcttatatcttgtgacccaacactatgccttccttcaccatgaaatgacacttttcccaattgagaacaagattcgtctcttcgcacctggtcaataccctgccaacattcaacaaacatgaggagaaagaggggccatagaccgacaaatcgtccatgaaaaccttcaccatctcctcgattaagtctaaaaatatagaggtcatacacctctgaaatgttgcaggagcattgcataaaccaaatggcattctcttataagcaaaagttccataaggacacgtgaaagtggttttttcttgatcattagggtgaattggtatttgaaagaaaccactgtatccatcaagaaagcaataatatggatgattagccaaacgttcaagcatttggtcaatgaatggtaaaggaaaatgatctttcctagatgcaacattcaacttcctataatcaatgcacattctatgaccagttctagttctagtagggatcagttcatctttttcatttttgacaacagtcattccaccctttttagggacgcaatgcactggagaaacccaagtactatcagagatagggtagatgacaccagcatcaagcagtttcaaaatttcttttttcactacttctttcaaattgggatttaacctcctctgtggttcaatgctagaatatgattcgttttcaagatggatcctatggttgcataaactaggtgaaattcccttaatgtcggataatgaataaccaatcgctctcctatactttctaagctcagataatagcaggttcacttcatcactatttaactcagcattaatgatcatagggtaagtagagtttagaccaagcaatgcgtaccttagaccttttggaagtggtttgagatcaaccttcggtgccttaagttcagaacagtcatctgaagttggaatgatcggctccccagattcgttggtagacaaggtcgagtggctggtcgagtacgtcctcgagagtgcaggttgaactcgagttgacccttcttcgctcattaccattacctccgttgctggtccattcaattcctcaaagggttctgattcttccatcactttatgggagtctaacagcttctggtttcccaatgttttcaaatgcagaaacccatcttcaccacttttggttaaagcactgttaagatgatcttcttctgccagctcttccagtaactcatcagctaactgatccatttcttcgatccaaaagagttgcccttctatggtaggcttcttcatcgcgtctttgacatcaaaggtcatcctaaagtctttgccaaggtctagatcaatcttccctttcttgacatcaatcatagctcctacagtggctaagaaaggtctccctagaatcaaagggtccttgggctcttcatccatctccaggactacaaagtcagttggtatctccacagcaccgatcctgattgggaggttttcgagcaaaccatgagggatccttactgatctgtcagctaggatgagggatatattgcaggacttgtattgagtgaaccccaatcttttggcgacagagagtggcatgagactgactgatgctcctaaatcgcataggcatctattgaaagccaatggacctaaagagcatggtagagtgaatgaaccaggatcactaagcttcttagcaatgatcttcttctgtatgatagcgctgcattcatgactcaataccaccatcccttgcacttcttgaattctttccacgatcaagtctttcagaaacttgtgagagtctgggattagcgctagagcgtcaacaagaggtatccgtaactcaacctccttaatattcttggcgaacatagctctatatttatctgccaacgctttcttgtgacggccaggaaatggaagttgtggtttgtagggaggagggacaaagaccttttctttgtttttgacagcaactggttttggagcaattggtgatgttgttgggatgacaggtcgagtggttggtcgagtaacgctgtcgagtggcagatcgagtggttgctcgagtgacaggtcgagtggttgctcgagtgacaggtcgagtggttgctcgaatgacaggttgagtggttgcttgaaacttaaatcctccccatcttgatcttcactgtcctcaatgaccgtctttggttcctccctagttggaagtgctttaccactacgcagtgtgatagcatgagcatattcttttggattctgaattgctttgcctggtagttgggttgtctgttttggaggtgaagaagatgcagaatgtccctctaagtaacggactttggtattcagtgtttccatcttgacattgagatcattgtagctacagtccagctttttatgtaactcagatatcttctttgctatctccatggagccagaggcttgcccgtgaagcagctgtcgtagcatttgtttcatatcagcctcaggagcagcaggaccttggtggtgattgagtcatggggcatattcttctcccagatgtgtgctttgtcgcccaaggagaatgggaacaaacggagcttgaatccgtcttcactgacaccattgatcttcgttaggttgtagagcctgtcgaattcatcaaggtggtcgagtggatcctccattggcagaccatgaaatttgttcccctgaatcatcgagatgagaccactcttaatctcgaagttgttgttctggatagcaggaggtgcaattcccttcctctgacggtgatcacatggtgcatctccagcaccaatgttggcagggccattttgttgattctgttcttcagccatttcgagtggttgctgaggtacagggttgactgtggttctcctttttctgagttcgcgagctgtgcggttgatgttgtcgttgaaaaggaggttctgattgcctgttgatcgagttcgcatacagcagaggtgtacctggatcaagaagacaacaagaaaaacacacagttagtaactgaaaagaaaattaacaaagaacttgatctaagcaagtctgaaatctcaaatgtaacaaacaaacacccaattggcaacggcgccaaattgataataggtttttagtcaattatcctaaaacaccaatcatatcgttgtagtattttaggttgtcaatccaaatgggtgtgatgctaacaatcaagatgtgatcagaagtcactaagttaagccaagcaataacaggttttggtgtgttctagcagttctaagtgaacatgcagaaaacagaaaatcaaacaaaaacagcaaaacactcgaccaacacagctctgtgtagagcactggatgaggtcgagtgacaggtcgagtaacaggcagaaagtaaaacagggatactcgactgcacagtctgtttccagacaactgggtggtcgagtatcaggtcgagtaacaggacaaaaatgcagaaactaaggaacagatgaccagatgcagtaatcaacagtagaataaacaataaaatcaatcagataaagaattcctaaggatggggtaattgagtagtttcgtttcctcagtttacaggtgattgacatgctcaataaattaaccctacacaacaagttcattaaccaaatctaagtgccaccgcaacaaagactctcaaattaacctagtcccagactcaatcaccattgacgagagctaacctaacaggcattacgaatcaacaagttaaagccaaaacgctccctgcaaccaataccttggtacagggtcacgaatctctagaattagtggttcagacatttcatcgaacaccttttgggcgcggaaatgtctgggctcaaattccagttgatcaaaaagcaataggcattaagaacaactaatccagaagggatctatcaaccaatactcagtcacctagcatactgagaattctacactactctaacccatcctcagaaacctattcactactcagacatcttccagatagctcgtcaacagctccaaatcacctgaaatcaacgcaaatatgcaacatgcatgcaaaactatcctaaacatgcaaagtgatgacaaatgatgtgaaatggtataaaacagtgatgatataatgctaaaattacgacaaatggatgctcaaaacatgcaaaatacacttatcacttatgtactttctttaaccacttgtgtcagcgagtaattgatatggagcagcttttggaactagaaactgagatcgttgaaaccctttgcctgtttgaaaggtttttcccaccaagcttctttgatataatggtgcatttgacagtacatttaggcagagaagctcggttaggtggaccagttcatttcaaatggatgtatccgtttgaaagatatatgaaagttctgaaggattttgtgagaaacattgcaagaccggaagggtgtatagctgagtgttatctagctgaagaatgcctacagttttgtagtgaatttttgaagaagacaacaaatgttcaggaaagtgttgatagaaacactgagtatgagagcaactctatacttgaagggtgtccaatctcagcaggctcttatattaatcttactgaaatggagacaaaaatagcccatatgactgtcatccagaatatggcagtctctgaatcttatgttgagtaagttccaatctcaatagggtcttatattacttagctatatatattttacttatccatatggctgtctctaactaattctaatttgtccttgtattagtgagcacctgcaacatctacaagactcaaatgtaagatgcagatgtgatgcatcacacttatggaacttgcacacttagaattttgcttcatggcttaaaaaacacgcatgtttatctctcacacttgacacttaaacactatactttatcagtaagcatataggtgtctgacattttctttttaaatttgttagatacctcttgattcaaacaaacatgaagaaccacttaaatggttagcttatggtccacgtagttgtgcaaggacatattctggttatatagtgaatgggaagcaatttcatacaagaacagtggataagaaaactcagaacagtggtgtgtactatgaggcaaaagacacttctcaagtggtcgatttggtttcatactatggttgcattactgatattatattgtcggattataatgtcttttacgttccattgttccactgcaactgagcagtaaaaggcaatggagtgaagcaagaggatggttttacacttgtaaacctgaatcatagtcaagtctcatttataagggaaccgtacatactagtctctcaagcaaaacaagttttttacctaagagaagatgactcatcaccttggtatgttgcattgagaggttcttcaagaagattcagtaagaaagagtttttagattcagttgcagccattggcacattgccaccaaatgttgacatagacgctgacttggatgaagctgagaatgagaggactgattgtgaaggaatatatgtttgtgaaatgtagttttttttttgcttcattttcattccttgttgcattctctatgtttgatgtctgtttcccatagtgtgttcaatgtcttatttgcatccagtgtacttaaccctttactctttcatttttctcaggtgatttaagatgggacaacagaagaaaaagcgaggtaaaagtaacaaaaaaaggtcaatgcaaagaatgccaatgatgaggtcgagtatattggaacaattgaaccacaagtcaatgatgaggaacatgcaaaaccagctgaagatcaagtatcagatgcagaacaagtaccagatccagatcaggtggttgatggagattaggtgaatgatgaagatcatttggaaccagatcaagtagcaaatccagatcaggtggttgatggagatctggataaggtcaatgaggaagagcctcacggagagcttgttttatctgagggtgatgattgtgttgagccaaagcgtaaacgacatcgaggaccaactaggctgaaggatattgccaaggatgaacagaagaaatacagagctcgagttatagaagctgactctcagcttttatccgttctcatgtgcgaccccacgtgctaagctttgactaactcaagaccgaagaacctcttccttgaccagaagctttcctgtacttaggatatattagcatttgggtcattaatccacaagtagagttcactaacatgggagagcctattggtaaaggctcagttaagctgacatcatatgtaggggcattggtaagagaacacgttccagtcacaattgaacgttggactaaaattggtgaagaacttaggacagttctctggaaatctgttcaggtaagctttgtgtaaaatttacaagtttatttgatattggtgagtacttgactgttttgtttttgattgcaggcaaggtttgaactagatgaagagtatcaaaaggttacagtgcttaggcagatgggacgtttgtgaaggtcctggaaatcaaggcaagttacaaatattagagaagctaagactaaccaagagaggatgaacatgcgacctaaaaacatttctccttttgattggcgtaaatttgtgaagctcaaaacaagccaagaatttaaggtatgcatttggaatttgtaaatttatctatatactatagaaattagcattcatctgttaggttgtaagcaatagctacaaggaaagaaagcgcaatcagattccacatacttgtagtcgcaggggaatggttagacttgccgaagacatggtaacagttgtacacacttatattgttcatattgctcagcctttttacaaagtccaaacacttatgtattaattgagatcatttttttggtttagaaaactgctagtgcagacccatctgaagtgaaaaggctaaaggtttgggttaagtcacgtactaagaaagatgctacaccagtgaatacgaatgctactgaaaagattgtgagttattttgtttcgtttgatttgcactttggcattttgaatcacacttgatattttaaaatgtattttatgagtttcagaaaaaggcagaagagattgttaagagtgataatccatcatcaaatgaagcacaagattcactaagccaactgttagggcctgataatcctggtagactgagagcaatgggtcgcaatatgaataagacaaagttagcttgtttccaagtgcagcacaagtgtatggctgaaatgcaagagaatcagcttcatctacaaaagaaggtcaatgagatacaagaagtaattgagaaaatgaagaaccaggttagtgcacttatctatttatatataaagacttatggctcaattagtacataagatttgactttgtttttcttttgttgtaacagagacaatcagctgaagtaggtgaaaactcagctgcaagagtaagtcactcatatcatatgctttgatttgttctaaacgatactaacttaatattatgtttatcttttacttttacagagtgtgaacaaaagaacacaaccaaaatgtttcttacttgattgggctggttctgatgcaaaagttgctaagggatgtattatttcttctgatccggatgaattagtgaatgactgtcgcttaggccctaccgatgttaaattcttgattgacactgctattgaaccagaagcattcctttggagacttgcggctaatatgttcatcattgaaaaagctgttggacatatgattgcatggcctgctgctatgtgttttagcctagaagaggatctccaacaagaagacattgcatgtcaggtaaagtttattattcagtctcattctcatatatagagtaatgatcttctattaacataatgtatttctgggtttcaatgtttttgacagggaccaaataacaaatgccagcttttggatttgtcttcaaatgatgttgttgttgcagaaggacgttggtagacacaagaaccaaatgcattagtcaatgggcttcctctcggacatgtagcagtgaagatatttgtcgatgcagttcttcaaccagagacgtttatatggaggccaacgatgaatgtaacttatcttgaggactgtttaatgtcttttgttgcatggcctgtcaacaaagttatctttgaaaaccctgcagatgcaacataccagaaatctccacttcagacttctgctgcaagaggaaaatcaccattggaagcaacaacatcagtaggcaagtcagcagcatcagtaggcaagtcaccaggatcactaggcaagtcagcaagatccaagaaagcagtagcgtccgggaaagcagcagcatcaggttcacaaactgcagcaggttataagccatcctctgagatatttacagcaaaaggtacaaaatccgttgcaacagtttcaaaggccatagctgagaagtccatagctaaaggttcaaagtctcctgtcaagaaaagtcagctgctggattcacaactccatctgagaagatctccggtattttgtttgttgttattacctagctcttgaatctggttatttttctacatatattaaaattggttatattgtgacatggcagcgtaaaggtgtagctgaagttatcaagactaatcataagtgtaagttaatggatatcagtggaaggaagcaggtggttgctgaaggacgtgtgcattcagtcgacccagaccaaaagaaacaacatgttcgcttgggagataatgcagctagagtttgggtggatatagtgaaaatagatgatgcaacagtttggagggcatcagatgaaatcgagtatatgagagattcacttggttcatctattgcatgaccaatggataagttggtcatctattgtgtttaagaataaactggggtaagtttctagattacagtgatccttgtactttggttttatatatgaaactgaaatgagacattgttgattattgcagggaatgaagaaactttggtccatgttagctagtttaaaatagtttaagactagactaatcaacttgtgttatgtaattcagaatcagacttgttgtctacttggatttagaattatgatttagacttatgttatgttgaatgatttgtatggatttttcctctatgttggatttgattcagacttaagattaaatttttattcagagttttttcatagaccagtcctattttctcaccaaagaacattgatttttttttctgctgtgatacacaagtgtttcaattgtaggtttcattacatgatcaattctaccttcatgtacttgttccacttcagtccatccctgactccaatccttcttgctcattttataccctttgatcacaagatcaaaaacatgtaacagatccttgttctttaggattcttttttaaaaccaagtggtcatattcataagaattaacaccaactcttggtttcacttcaacctgcaaatatatctctcgcaaaattgtgaggtacttgcgaaccgaaaaccctagatgttggtataacagagaagagattcgataaaaaaaaaaatcgaacaaacccaaatataaaactttagtgtcataaatttgtaaccttctattgattcctttgctggagaaacaaaatttcttcaaatctaagaaagaagacatagtgagagagacgacagtttttatagaccagtcctattttctcaagaacattgattttttttttctgctatgatacacaagtgtttcaattggaggtttcattacatgatcaattctaccttcatgtacttgttccacttcaatccatccctgactccaatccttcttgctcattttataccctttgatcacaagatcaaaaacttgtaacagatccttgtctttaggattcatttgtgaaacacaggggtcatattcatgagaattaacaccaaatattggtttcacttccaattgcaaatatattcctcgtaaaatttcaaggtacttgcgaggaacttgtaatgaattttctcacaaattcgtcgcagaattgctgggactttgcgagcagataggagaacgtcgctaatttgttgcaaaatttgcgagtaatatatccctcgcaaaattttcttcttcctcttgtttttcttcttctctagtagaactggcagaaactctttcgattcctaaatagtattccatccttctaactttgtacctaagaacttcacaattttcatagacaagtcctattttctcaccaaaggacattaatttcctttttctgcagcaatagacaagtgtttcaattgtaggtttcattacatgatcagttctaccttcatgtgcttgtttcacttcaatccatccctgactccaatccttcttgctcattttatatcctttgttcataagataaaaaatatgtaacagatccttgtccttaggattcttttttgaaaccaagtggtcatattcataagaattaacaccaagtattggtttcacttcaacctgcaaatatatctctcgcaaaattgtgaggtacttgcgaaccgaaaaccctaaatattgttataacagagaagagattcgataaaaaaaaataatcgaacaaacccaaatataaaactttagtgtcataaatttgtaaccttcaattgattcctttgctggagaaacaaaatttcttcaaatctaagaaagaagacacagtgagagagacgacaattttcatagaccagtcctattttctcaccaaagaacattgatttttttttctgctatgatacacaagtgtttccattgcaggtttcattacatgatcaattctaccttcaagtacttgttccacttcaatccatccctgactctaatccttcttgctcattttataccctttgataacaagatcaaaaacatgtaatagatccttgtctttaggattcatttgtggaacacaaggatcatattcatgagaattcacacctcgtaaaaggtccctcggaaatttgctacagaattgacgggactttgcgagcagataggagaacgtcgctaattctttgcaaattttgcgaggaatatatccctcgcaaaattttcttcttcctcttcattttcttcttctctagtagaactggcagaaactctttcgatcgctaaatagtcctccatcttctaactttgtacctaagatctttacaattttcatagacaagtcctattttcgcaccaaaggacattgatttcctttttctcagcaatacacaagtgtttcaattgcaggtttcattacatgatcaattctaccttcatgtacttgtttcacttcaatccatccctgactccaatctttcttgctcattttatatcctttgttcacaagatcaaaaataagtaacagatccttgtctttagaattcttttttgaaaccaagtggtcatattcataagaattaataccaactattggtttcacttcaacctgcaaatatatatctcgcaaaatagcgaggtacttgcgaagcgaaaaccatagatattgttataacagagaagagattcgacaaaaataaataaagtcgaacaaacccaaatatcaaactttagtgtcataaatttgttaccttcaattgattcctttgctggagaaacaaaatttcttcaaactgttctaagaaagaagacacagtgagagagacgacagtttctctaaaatttttattttactttttgttactttcacagttcctctttttttttttttttttttggttttcagtgaactttaggctttagtgaatttatactaaaacggttttctttcgaaaataagaggtctaggctcaattactagcatttaaagtgttaacattacaataactttttcaacgctttaaaattcttttagaaacctttgtactataagaaaacaagcgatttgcgagaaaatttgcgatggaaaacgttcctctcaaatttgctatagaattatgtggactttgcgagcagataggagaacgtcgctaattcgttgcaaaatttgctaggaatatatccctcgcaaaattttcttcttcctcttgtttttcttcttctctagtagaactggcagaaactctttcgatccctaaatagtattccatccttctaactttgtacctaagaacttctaaattttcatagaccaatcttattttctcagcaaaggacattaattttctttttctacagcactaaacaagtgtttcatttgtaggtttcattacatgatcaattctaccttcaagtacttgttccacttcaatccatccctgactctaatccttcttgctcattttatatcctttgatcacaagatcaaaaacatgtaacagatccttgtctttaggattcatttgtggaacacaagggtcatattcatgataattaacaccaactattgatttcccttcaacctgctaatatatccctcgtaaaattgtgaggaacttgcgatgaattttctcgcacattcgtcgcagaattgcggggactttgcgagaagataggagaacgtcgctaattcattgcaaaatttgcgaggaatatatccctcgcaaaattttcttcttcctcttctttttcttcttctctagtagaactggcagaaactctttcgatccctaaatagtcctccatccttctaactttgtacctaaaaacttcacaattttcatagacaagtcctattttctcagcaaaggatattgatttcatttttctactgcaatacacaagtgtttcaattgcaggtttcatttcatgatcaattctaccttcatgttactgttccactttaatccatccctgactccaatacttcttgctcattttatatcctttgttcacaagatcaaaaatatgtaacagatccttgtctttaggattcttttttgaaaccaagtggtcatattcatgagaattaataccaactattggtttttacttcaacctgcaaatatatatctcgccaaattgcgaggtacttccgaaccgaaaaaccaagatattgattcgacaaaaagaaataaaaatcgaacaaacccaaatataaaactttagtgccttaaatttgttatcttcaattgattcctttgctggagaaacaaaaaattttaaattgttctaaggaagaagacagtgtagacgacagtttctctaaattttttctttactttttattactttcttgggttcctttttttcttttttgatttggttttctagtgaatttatgctaaaacggtttgctttttcgaaaataagaggtctagacccaattactaacagttaaagtgttaacgttacaataacttcttcaacactttaaaattcttttagaaacctttttactacaagaaaacaagcgctttgcaaggaacatttgcgttggaaaaggtctctcgccaatttgctacaaaattgcgagtacattgcgaccagataggagaacatcgctaattcgtcgcaaaatttgcgaggaatatatccctcgcaaaattttcttcttcctcttctttttcttcttctctaatagaactggcagaaactctttcgatccctaaatagtcctccatccttctaactttgtacctaagaactacacaattttcatagaacagtcctattttcttatcaaaggacattgattttctttttctacttcaatacacaactgtttcaattgcaggtttcattacatgatcaattctaccttcatgttactgttccactttcatccatccctgactccaatcctttttgctcattttatatcctttgttcacaagatcaaaaaaatatgtaacagatccttgtctttaggattcttttttgaaaccaagtggtcatattcatgagaattaacaccaactattggtttttactttaacctgcaaatatatccctcgcaaaattgagaggtacttgcgaaccaaaaaccctagatattgtaataacagagaagagattcgacaaaaaaaaataaaaatcgaacaaacccaaatatcaaactttagtgccttaaatttgttatcttcaattgattcctttgctggagaaacaaaaaaatttcaaattgttctaaggaagaagacactgtagacgacagtttctctaatttttttttttactttttattactttcacggtttcccttttttttttttttttggttttctagtaaatttatgctaaaacggtttgctttttcgaaaataaaaggtctagacccaattactaacagttaaagtgttaacattattgtaacttcttcaacgctttaaaattcttttaaaaacctttttactagaagaaaacaagcgatttgcaaggaagatttgggttggaaaaggtcccttgcaaatttgctacagaattgcgagtacattgcgagcagaaaggagaacgtcgttaattcgtcgcaaaatttttgaggaatatatctctcgcaaaattttcttcttcctcttgttttttttcttctctagtagaactggcagaaactatttcgatccctaaatagtattccatccttctaactttgtacctaagaacttcacaattttcatagacaagtcctattttctcaccaaaggacattaattttctttttctacagcaatacacaagtgtttcaattgtaggtttcattacatgatcaattctaccttcaaatacttgttccacttcaatccatccctgaatctaatcctttttgcttattttataccctttgatcacaagataaaaaacatgtaacagatccttgtctttaggattcttttttgaaaccaagtggtcatattcatgagaattaacaccaactattggtttttacttcaacctgcaaatatatccctcgcaaaattgagaggtacttgcgaaccgaaaaccctagatattgttataacagagaagagattcgacaaaaagaaataaaaatcgaacaaacccaaatatcaaactttagtgccttaaatttgttatcttcaattgattcctttgctggagaaacaaaaaaatttcaaattgttctaaggaagaagacactgtagacgacagtttctctaaaattttttttttactttttattttactttcacggtttccttttttttttttttttttggttttctagtaaatttatgctaaaacggtttgctttttcgaaaataagaggtctagacccagttactaacagttacagtgttaacattattgtaacttcttcaacgctttaaaattcttttaaaaacctttttactagaagaaaacaagcgatttgcaaggaagatttgcgttggaaaaggtcccttgcaaatttgctacagaattgcgagtatattgcgagcagataggagaacatcgctaattcgtcgcaaaatttccgaggaatatatccctcgcaaaattttcttcttactcttgtttttattcttctctagtagaactggcaaaaactctttcgatccctatatagtatttcatccttctaactttgtacctatgaacttcaccattttcatagacaagtcttattttctcaccaaaggacttaattttctttttctgcaccaatacacaagtgtttcaattgtaggtttcattacatgtcaattcttcatccatgtgcttgtttcacttcaatccatctctgactccaatccttcttgctcaatttatatcatttgttcacaagatcaaaaatatgtaacagatccttgtctttaagattcttttttgaagaccaagtggtcatattcataagaattaacaccaactattggtttcacttcaacctgcaaatatatctcttgcaaaattgcgaggtactttcgaaccgaaaaccctagatgttgttataagaagaagagattagataaaaaaaaaaaaatcgaacaaacccaaatatcaaactttagtgtcataaatttgttaccttcaattgattcctttgctggagaaacaaaatatcttcaaattgttctaagaaagaagactcagtaagagagacggcaatttctctaaaattgtttttttactttttgttactttcacggtttcctttttttttttttttgattttcagtgaattttgggctttagtgaatttatactaaaacggtttgctttttcgaaaataagaggtctacgctcaattactaacatttaaagtgttaacattacaataactctttttacgctttaaaattcttttagaaacctttgtactacaagaaaacaagcgatttgcgagaaacatttgcgatggaaaaggttcctagcaaatttgctatagaattatgaggaatttgcgagcagataggagaacgtcgctaattttttgcaaaatttgcgaggaatatatccctcggaaaattttcttcttcctcttctttttctttttctttagtagaactagcagaaactctttcgatccctagataatcctccatctttccaactttgtacctaagaacttcacagttttcatagaccagtcctattttcttaccaaaggacattgattttctttttctggtgtgatacacaagtgtttcaattgcaggtttcattacatgatcaattctaccttcaagtacttgttccacttcaatccctccctgactctaatccttcttgctcattttatacactttgatcacaagatcaaaaacatgtaacagatccttgtctttaggattcatttgtggaacacaagggtcatattcatgataattaacaccaactattgatttcccttcaacctgctaatatatccctcgtaaaattgcgaggaacttgcgatgaattttctcgcacattcgtcgcagaattgcggggactttgcgagaagataggagaacatcgctaattcgtcgcaaaatttgcgaggaatatatccctcgcaaaattttcttcttcctcttctttttcttcttctctaatagaactggcagaaactctttcgatccctaaatagtcctccatccttctaactttgtacctaagaactacacaattttcatagaacagtcctattttcttatcaaaggacattgattttctttttctacttcaatacacaactgtttcaattgcaggtttcattacatgatcaattctaccttcatgttactgttccactttcatccatccctgactccaatcctttttgctcattttatatcctttgttcacaagatcaaaaaaatatgtaacagatccttgtctttaggattcttttttgaaaccaagtggtcatattcatgagaattaacaccaactattggtttttacttcaacctgcaaatatatccctcgcaaaattgagaggtacttgcgaaccaaaaaccctagatattgttataacagagaagagattcgacaaaaaaaaataaaaatcgaacaaacccaaatatcaaactttagtgccttaaatttgttatcttcaattgattcctttgctggagaaacaaaaaaatttcaaattgttctaaggaagaagacactgtagacgacagtttctctaatttttttttttactttttattactttcacggtttcctttttttttttttttttggttttctagtaaatttatgctaaaacggtttgctttttagaaaataaaaggtctagacccaattactaacagttaaagtgttaacattattgtaacttcttcaacgctttaaaattcttttaaaaacctttttactagaagaaaacaagcgatttgcaaggaagatttgggttggaaaaggtcccttgcaaatttgctacagaattgcgagtacattgcgagcagaaaggagaacgtcgttaattcgtcgcaaaatttttgaggaatatatctctcgcaaaattttcttcttcctcttgttttttttcttctctagtagaactggcagaaactatttcgatccctaaatagtattccatccttctaactttgtacctaagaacttcacaattttcatagacaagtcctattttctcaccaaaggacattaattttctttttctacagcaatacacaagtgtttcaattgcaggtttcattacatgatcaattctaccttcaaatacttgttccacttcaatccatccctgaatctaatcctttttgcttattttataccctttgatcacaagataaaaaacatgtaacagatccttgtctttaggattcttttttgaaaccaagtggtcatattcatgagaattaacaccaactattggtttttacttcaacctgcaaatatatccctcgcaaaattgagaggtacttgcgaaccgaaaaccctagatattgttataacagagaagagattcgacaaaaagaaataaaaatcgaacaaacccaaatatcaaactttagtgccttaaatttgttatcttcaattgattcctttgctggagaaacaaaaaaatttcaaattgttctaaggaagaagacactgtagacgacagtttctctaaaattttttttttactttttattttactttcacggtttcctttttttttttttttttggttttctagtaaatttatgctaaaacggtttgctttttcgaaaataagaggtctagacccagttactaacagttacagtgttaacattattgtaacttcttcaacgctttaaaattcttttaaaaacctttttactagaagaaaacaagcgatttgcaaggaagatttgcgttggaaaaggtcccttgcaaatttgctacagaattgcgagtacattgcgagcagataggagaacatcgctaattcgtcgcaaaatttccgaggaatatatccctcgcaaaattttcttcttactcttgtttttattcttctctagtagaactggcaaaaactctttcgatccctatatagtatttcatccttctaactttgtacctatgaacttcaccattttcatagacaagtcttattttctcaccaaaggacttaattttctttttctgcaccaatacacaagtgtttcaattgtaggtttcattacatgtcaattcttcatccatgtgcttgtttcacttcaatccatctctgactccaatccttcttgctcaatttatatcatttgttcacaagatcaaaaatatgtaacagatccttgtctttaggattcttttttgaaaccaagtggtcgtattcataagaattaacaccaactattggtttcacttcaacctgcaaatatatctcttgcaaaattgcgaggtactttcgaaccgaaaaccctagatgttgttataagaagaagagattagataaaaaaaaaaaaatcgaacaaacccaaatatcaaactttagtgtcataaatttgttaccttcaattgattcctttgctggagaaacaaaatatcttcaaattgttctaagaaagaagactcagtaagagagacggcaatttctctaaaattgtttttttactttttgttactttcacggtttccttttttttttttttgattttcagtgaattttgggctttagtgaatttatactaaaacggtttgctttttcgaaaataagaggtctacgctcaattactaacatttaaagtgttaacattacaataactcttcttacgctttaaaattcttttagaaacctttgtactacaagaaaacaagcgatttgcgagaaacatttgcgatggaaaaggttcctagcaaatttgctatagaattatgaggaatttgcgagcagataggagaacgtcgctaattttttgcaaaatttgcgaggaatatatccctcggaaaattttcttcttcctcttctttttctttttctttagtagaactagcagaaactctttcgatccctagataatcctccatctttccaactttgtacctaagaacttcacagttttcatagacaagtcctattttcttaccaaaggacattgattttctttttctggtgtgatacacaagtgtttcaattgcaggtttcattacatgatcaattctaccttcaagtacttgttccacttcaatccctccctgactctaatccttcttgctcattttatacactttgatcacaagatcaaaaacatgtaacagatccttgtctttaggattcatttgtggaacacaagggtcatattcatgataattaacaccaactattgatttcccttcaacctgctaatatatccctcgtaaaattgcgaggaacttgcgatgaattttctcgcacattcgtcgcagaattgcggggactttgcgagaagataggagaacgtcgctaattcattgcaaaatttgcgaggaatatatccctcgcaaaattttcttcttcctcttctttttcttcttctctagtagaactggcagaaactctttcgatccctaaatagtcctccatccttctaactttgtacctaaaaacttcacaattttcatagacaagtcctattttctcagcaaaggatattgatttcatttttctactgcaatacacaagtgtttcaattgcaggtttcatttcatgatcaattctaccttcatgttactgttccactttaatccatccctgactccaatacttcttgctcattttatatcctttgttcacaagatcaaaaatatgtaacagatccttgtctttaggattcttttttgaaaccaagtggtcatattcatgagaattaataccaactattggtttttacttcaacctgcaaatatatatctcgccaaattgcgaggtacttccgaaccgaaaaaccaagatattgattcgacaaaaagaaataaaaatcgaacaaacccaaatataaaactttagtgccttaaatttgttatcttcaattgattcctttgctggagaaacaaaaaattttaaattgttctaaggaagaagacagtgtagacgacagtttctctaaattttttctttactttttattactttcttgggttccttttcttcttttttgatttggttttctagtgaatttatgctaaaacggtttgctttttcgaaaataagaggtctagacccaattactaacagttaaagtgttaacgttacaataacttcttcaacactttaaaattcttttagaaacctttttactacaagaaaacaagcgctttgcaaggaacatttgcgttggaaaaggtctctcgccaatttgctacaaaattgcgagtacattgcgaccagataggagaacatcgctaattcgtcgcaaaatttgcgaggaatatatccctcgcaaaattttcttcttcctcttctttttcttcttctctaatagaactggcagaaactctttcgatccctaaatagtcctccatccttctaactttgtacctaagaactacacaattttcatagaacagtcctattttcttatcaaaggacattgattttctttttctacttcaatacacaactgtttcaattgcaggtttcattacatgatcaattctaccttcatgttactgttccactttcatccatccctgactccaatcctttttgctcattttatatcctttgttcacaagatcaaaaaaatatgtaacagatccttgtctttaggattcttttttgaaaccaagtggtcatattcatgagaattaacaccaactattggtttttacttcaacctgcaaatatatccctcgcaaaattgagaggtacttgcgaaccaaaaaccctagatattgtaataacatagaagagattcgacaaaaaaaaataaaaatcgaacaaacccaaatatcaaactttagtgccttaaatttgttatcttcaattgattcctttgctggagaaacaaaaaaatttcaaattgttctaaggaagaagacactgtagacgacagtttctctaatttttttttttactttttattactttcacggtttccttttttttttttttttggttttctagtaaatttatgctaaaacggtttgctttttcgaaaataaaaggtctagacccaattactaacagttaaagtgttaacattattgtaacttcttcaacgctttaaaattcttttaaaaacctttttactagaagaaaacaagcgatttgcaaggaagatttgggttggaaaaggtcccttgcaaatttgctacagaattgcgagtacattgcgagcagaaaggagaacatcgttaattcgtcgcaaaatttttgaggaatatatctctcgcaaaattttcttcttcctcttgttttttttcttctctagtagaactggcagaaactatttcgatccctaaatagtattccatccttctaactttgtacctaagaacttcacaattttcatagacaagtcctattttctcaccaaaggacattaattttctttttctacagcaatacacaagtgtttcaattgtaggtttcattacatgatcaattctaccttcaaatacttgttccacttcaatccatccctgaatctaatcctttttgcttattttataccctttgatcacaagataaaaaacatgtaacagatccttgtctttaggattcttttttgaaaccaagtggtcatattcatgagaattaacaccaactattggtttttacttcaacctgcaaatatatccctcgcaaaattgagaggtacttgcgaaccgaaaaccctagatattgttataacagagaagagattcgacaaaaagaaataaaaatcgaacaaacccaaatatcaaactttagtgccttaaatttgttatcttcaattgattcctttgctggagaaacaaaaaaatttcaaattgttctaaggaagaagacactgtagacgacagtttctctaaaatttttttttactttttattttactttcacggtttcctttttttttttttttttggttttctagtaaatttatgctaaaacggtttgctttttcgaaaataagaggtctagacccagttaataacagttacagtgttaacattattgtaacttcttcaacgctttaaaattcttttaaaaacctttttactagaagaaaacaagcgatttgcaaggaagatttgcgttggaaaaggtcccttgcaaatttgctacagaattgcgagtacattgcgagcagataggagaacatcgctaattcgtcgcaaaatttccgaggaatatatccctcgcaaaattttcttcttactcttgtttttattcttctctagtagaactggcaaaaactctttcgatccctatatagtatttcatccttctaactttgtacctatgaacttcaccattttcatagacaagtcttattttctcaccaaaggacattaattttctttttctgcaccaatacacaagtgtttcaattgtaggtttcattacatgtcaattcttcatccatgtgcttgtttcacttcaatccatctctgactccaatccttcttgctcaatttatatcatttgttcacaagatcaaaaatatgtaacagatccttgtctttaggattcttttttgaaaccaagtggtcatattcataagaattaacaccaactattggtttcacttcaacctgcaaatatatctcttgcaaaattgcgaggtactttcgaaccgaaaaccctagatgttgttataagaagaagagattagataaaaaaaaaaaaaaatcgaacaaacccaaatatcaaactttagtgtcataaatttgttaccttcaattgattcctttgctggagaaacaaaatatcttcaaattgttctaagaaagaagactcagtaagagagacggcaatttctctaaaattgtttttttactttttgttactttcacggtttccttttttttttttttgattttcagtgaattttgggctttagtgaatttatactaaaacggtttgctttttcgaaaataagaggtctaggctcaattactaacatttaaagtgttaacattacaataactctttttacgctttaaaattcttttagaaacctttgtactacaagaaaacaagcgatttgcgagaaacatttgcgatggaaaaggttcctagcaaatttgctatagaattatgaggaatttgcgagcagataggagaacgtcgctaatttttcgcaaaatttgcgaggaatatatccctcggaaaattttcttcttcctcttctttttctttttctttagtagaactagcagaaactctttcgatccctagataatcctccatctttccaactttgtacctaagaacttcacagttttcatagaccagtcctattttcttaccaaaggacattgattttctttttctggtgtgatacacaagtgtttcaattgcaggtttcattacatgatcaattctaccttcaagtacttgttccacttcaatccctccctgactctaatccttcttgctcattttgtatcctttgatcacaagatcaaaaacatgtaacagatccttgtctttaggattcatttgtggaacacaagggtcatattcatgagaattaacaccaactattgatttcacttcaacctgctaatatatccctcataaaattgcgtggtacttgcgaggaacttgtgatgaattttctcgcacattctatctcttttgtcctttgggggcaaaaccctgcggagagtacctttagagaagatctttctaactctattcttctcttgttttcttactttgatttctactttatacatgtattgttcttctatgatcatgtttgagtagtcttcttgtttggtttagggtttctcattagggatttagatgatttggtagattgccccctttgctaggttatctgttaggattctttatctttaattttcttaatgctagatctagattgatcacctagaatttgaatccagacaatagatatgcccaccataggtatatgtagttggatctattatttgatgagcctggtttataggtgtgtaataagaatctgcctatctactaaagtaaacaatcgaactcgtttagaatgcatgtttaggttaataatctctcggcttctccggtcattcttatctatagacatatggagtttcgcggaacgccactggttattccataattagagttttgagtttaagaaaggttcgataacaacctagctatcagtagatctactaattatctatctcctgagaataccgtaaacctgactttttcccatctgatttacatcttgatatttattgcttttctttgtttcttatataatctattggtctagatcttttgaaaacattataagtctattgtgtgaacatcaagagctcagtggaattcgacccttaagtgctaacgacgatctcttatttgcgggagtaagcttaaggcaatttgagctatatcacatattaaaatatatttaaccaaaatttcttttaaaaatgaaacgtgatgcaattgattctatttaattaaaattaccaaactttaaaatctataagcttctaaggacatccacataggatttaaaatctataattgtagttagccatgtcatgtattaacatatttggattctgttaattttctatttaaaatgaccaataacaattagcaatcttagtgattaacaattttagatagctcactaattaacattttcaatacatgtggattttaaatcgtgtacatgtgaacgtattaataattaagtgcaagaggtggcgttgttggttttgaattaaacaaatcttacgagaaaagaggcaaagactggttttggaggttgcatgaggttggttgggacaagttgtgtgggattctaaaataaattattttgaatggttattcaggaattttgacgaatgcaacatcaaatgcttatattcgggaagtgtcgagggcttataaatctaaagagtataggtggtaggagttgaggaacatacatgtaagaccgtggaaggaagctgtcttgggaaatatgtttaggtcaatatagtgaaaattgtttacgtgaaattgtaagtggatgcagctatggttcgtgacgtaatttattacatggttctttttaaaaaatttggttgaatatactttagttggataatatctaacaggacaaaaaggtatgcagacttttgttgaaattgtgggatacgttgttcttcttggaataccaatttcaatcaagaacgagaattggtaagacgtaaaaaaaggtgataaattttaactgatgagagttctcttgcattatgaacaattaacgtaataatttaggtaacaaagaggaatgccttccatctaaaaatgaaggagaaaaagatgaatgtggatagatttgcgacaagaaagagagatataaagagaatgccattttcttgatgaagaataggtcatattgtcacactataagacaagcttagattattagttatgaaaaaggtgagaaaacagttatgaaatgaactccttgaagcaacatttggttcatatattaaagagtttctggtattaatatctttaggttgaatggtggatttacgttcaaacattttttgtatgtgtattttatctaaggttcttcaatttgtttgaaaagatttttcgcctaaagttttaaatatgaccagtttgtaaagatatcaaacgaacatccaaacataattggaataatctgaaatttggtaggagacgtgaaactagtataaagacatcaaagtttgagttcaaatgttaaataaacaacactgttccgggttgtttaatttatttataggtttatagaattatgttgggttaaggttagtatgtttaaattcattcttgttttcaacccataatacttgtacgtagaagaagatggagaagatgaggaagaaaatgatgaagatgacgagaaagagaaagaagaagagtataacaaatatgcggatggtgaaagtaacgacgacaatggcaatgaaaatttgacaataaaaataatgagattgaatatgaagattatacaaagacacgtgttggtaatgatttgaatatgagaaatgagttgtttttctgaaatagtaatttaaaaaatttaaagaccaacacattataatcatataagttattaataactatcatcattcaaaaataattttacccaaaatatatcaagtagtcccacgcgtaacgtgggttcaaaacctagtttatactatagaaaagtcgaggctatttgcttcgaaagacgtccacataggattttaaatgaccaatcggatatcaacatataattaattaccatttttacaaaccttgcaaattaatatttacagaattataattactttttatataagtcatcttaccaatttacatttttttattttaatatttttatacaatatatttctttaaaaaataaataaaaatggcaaatgtgtcaaattacttttttaaaaaaacttataaatttatattcttattattattttactaatattcttattttcctacaaaaaagaatgatcaatcatgattagccatctcactaatcaatatttttagtaatctcactattgaatatttttaaattgaataatatattttcggatattccattaagatttttttgctaacgtgtattggcgacttcaaaggcgatttagagttttttgcttctctcacaggtatgatgccagcggtggtagatcctctaccgaaggggattgtttaaaggtcagaaaagggtttgctagctccgatggccgatggtgcagttgttggtttggagagtttggaggttttagagaattctcaacaagtagattccaaggtaatagaaacattggaaaacgttcaaaccgtgaaagagactaatgagatttcaaaaaaggaggtggttgtgttcccggtggttacaacgtcggcttccagtgcaaatccggtgttgaaaaaatcatgggttcgagctgctacaaaacatctcttcacgcagcaggaggttgtggtgtctgaggtgattggtaaacagagagtggtggtgccgaaagaggttgttgcagatgcaaaaccgctttgggaatattttcttattggaaaatttctcaatgcttcggctccacacgttggtaagattcacatgatcgtgaacaaaatatggagacttggagatactacttcacttattgatgtgtttgcagtcaatgattcaacagttgagtttcgaatccggaatgaagcgatgcgaagaaggattttaaacagaggcatgtggaatatcatgggaattccaatgcttatttcaaagtggactccgtttgctgaggaagcataacagccatgaagtcaattccattatgggttacattgaaaaatgttccaccttcaatcttcagagacaagggattggaatttctatctagtgtagttgggaaaccaataaagttacttccaaaaactgagacatgtgttagctttgaagaagctcagattttggttcaagcggatctcatcaaacctttaccaaaggagtattacattacaggtgaagagaagggcgaattagatgtactagttcagtatttctatccatggttgcctcctcgatgtggtaaatgtcaaaaatgggggcatcaaacttaagcttgtcttgtagtaggcggtagtgacacaactcaccattgaaaaactgtgcaatgtgaaactgttcaggaagtggagaatgtaggatatgtatccacacaggcccgtcccaaagctaaatcccgtaaagcatgggctttaggcaacagatgattataaaataatttaggggcatcattttgtagatatatatggtggtagagcagccgagttcaagccttcctaatggaagctgtattttttttgtttttagctgtatttaatgatgggccaattttttttttttttaagcagcattttaccttgggccggctctgtatccacaaataaggttagtgataaaacagagatacaaaaggaggttgttgaagtgatgggggataaggaggcgttttcagcagagaatgaggatgatgaaggatagatcactccttgaaagactggtcgtagccctggaaaacagagtgatggtctaaaatatggagaaacttccatattgtctaatacttattcagctctaagtgagaaaatagcggatggggagaatgacgaaagctctgaagaagaacatgatgaagttaacagtagtgaaaataaacaacatgaaacttcacctacaaggattgccgacgtttcaatctcggatacaacagagaaagtaaagaaagcaaaagggaataaggcacagaaagatcgaggtcttcctccacgccaacatctccctcgtgattcaaaatctacttataaatttgttcaaaaccggtcctctcaatctgctagggatctctctagagaaaagagtaacagttccactcaaaatctttaaatgtcgagcttcttctcgaatgttcgtggttctaataaaaggtcaaagcattacgttgttaaggattgggtagcaaaagcgaatttacagtttggatgtcttcttgagacgcgggttaaggaaagacaagcagaaatagtgtttcaatcagtgtttccggattggtcatttctatctaattatgtttctcatcgattaggccggatttgggttgtttggagttcaaaggtgcgacttactcctgttttcactagcagtaagatgattacagtctcggttttaatggaaggcatatcgaatgaattcctccacgccaacatctcccagatttcaacactcccaatcagtaagcatttgttaaagattgtctcctgaaggaaaatgttttgttggcatctgaaatcgttaaaggttatcataaagattcaatctcgactcgaagtgcgataaagatcgacatatccaaggcatttgatttggtgcagtggccattcctcctc

SEQ ID NO: 543 - DNA, 109786 bp, Arabidopsis thaliana
gaattcctccacgccaacatctcccagatttcaacactcccaatcagtaagcatttgttaaagattgtctcctgaaggaaaatgttttgttggcatctgaaatcgttaaaggttatcataaagattcaatctcgactcgaagtgcgataaagatcgacatatccaaggcatttgatttggtgcagtggccattcctcctcgccactctctctactttgaatcttccatcaaaatttatcaaatggattgagctctgcatatctacggcctcattctcgatccaaataaatggtgaattatccggcttgtttcgcagcgcaaggggtttaaggcaaggttgttccttatctccatatatgtttgttatatgcatgaactttctttcacatatgctcgacaaggctgcagtggaacgaaaataggctaccatccaaaatgccagaatctccaattgacacacttgtgttttgtagatgatttgttggttgttacagatggatgaaaaagctcaatagaaggaactcttaatatctttcgacaatttgcagaattttcagggctgcaaactagtcttgagaaatcaactctttatatggcaggagtaaaggagagtgatatggaagtcattctacaagctttttctttcgcttctggtgaactacccgtcagatatctggcttaccattgttaacaaagagaatgactaggaatgactacactcggctcatagagaaaatcagagacaaaattggtaaatggactaccaggcatttatcttttgcaggtcagctgcagcttattagttctgtgattcagaaccttaccaacttctggatgtctgcgttttggttgccaactgcgtgcattaaagagattaatagcttgtgttctgctttcttatggtccggacccaaactaagtactaaaaaggcaaaagtggtttggagtgaggtatgcacaccgaaatgtgagggaggactcggtctgcgttctctaatagaaacgaacaaggtcagctgtttaaagctcatccggagaattacatcatcaacatccttttcgtctcttaaagagaactcgactttagggtcatggatgtggaaaaagttactcaaatatcgagagttagctgcggggtttatccaaactgaggttcagaatggacgatctacttctttttggtttgataactggtcacaccttgggcgtttgattgaacgtacgggacaacgaggttgcattgatatgggattcactcttcatgccacagtttctgaagcagtattgcgacataagaaaaggcgacacagaattgataccttgaatccaatagaaacagccttaaacgatattcgttccaaaggacacatagaagcagaggatatagtgcgttggaaggggaaggggaacatttttaaaacaagattcagtactaaagaaacttgagctgctactcgtgactcaagacctctagcagagtggtataaaggcatatggttctctcatgtcacggctaaatgttcactccttgcttggcttgcacagaaaaatcaattaagtatcggtgacagaatgctttatttgaatgtttggtcgggtctcactcataaactaatcccctcacaattcttaaccagctggaacactattattaagactctcacagacacatctcttgatagagaaagcttgtttttgatgagattttttttcagcttgtagtgcattcactatggaaagaaagaaatggtcgcagacatggagaagctcctatctcttcacttcagctcattcgactactcgataagcaagttcgaaacaggatctcttccattagagaacagggagacgggagatatgacggttgtattgcaaagtggtttggttcaagataacaaattcactttttgcttgtttcaaaatttcctaccaaaaacttgtatattaatcatacgctgcagctgcatgtgatgtaaccacgttttttcgaataaattttgcattttatatataaaaagaaggatattttttaattctaataatttttatacaaaatatatactattaattgagaatcattacaaattttacaaccgtgtgagaggtaatttattagtagcttaacactaacttaaatattttgtccatgggcaaaaaagacaattaacatttgaaataaaacgcagatcttgggtgggtaatttctggtatccatccctttatgaatcttaaccctttctatatgttctattgggttctacgtaataggcttaatgaaaatctcaaatggcgtttatcttcaattttcgattgcattatttaagttaactatatttaaaattttcgattacaataattatcatctactataaaaaaagatgcaattttgaaatcactaaaatttcggtgcaagttaatatttgatttaccaaaacagattgaaaatataaggaatatttgatttattaacagcctgctccttaattactattattattccttaactaatcgaaattctttaaatatagaagatccattcattttaaattcaaattagaaaacagacatacatttcctgtacaagttaatatacatgcccattaattatcatttactataagaaaacaatgcaattttaaataaccttaagaaataagaaatcaattcactaaaattccgttgcaacttcatatacgatttaccataacagatttaaactataaggaatatctgaataattcaagcatataccttattatgttttcttcgaaaaatatttttttgcatcgtatattcccaaacccgacaatgagaacctaccatgtcgaattagtataaatatagggtaaagaatgaatacggacgtcaaacctttcaaaaatgaataaaaattcaagttaaaattgtgcattcgtggacacaatacacgaaatactcaggtgaaacaatggagatgattctttctgatgcatctgtaagtttagatttctttttcacttactggtcttaattctgtttcactctaatatattaatctactcctcatcttatatatatatatatatatataaagaaggtactttgatacatgctactatcaaaaaggaataagtgaacaagctacagaggttcatcaaaactagagagtggcgtattatcgaaaaatttcaggtagctaaagcaatgggaaagtatcgggcaacaaaacatgttttcaaaatgaccatgtccaacttgacttctataagtagtgctcctgtaatttctgacgatatgtacttggacctggcaaactacactgatattttgaatgaagcaggactcaatgaaaacatattgattggcaatatttctctcatattcatacgttttctatgtgttatagtttgagtttaataattgtatacactcaaaataatatacatattttttcattggtgtagatgttgttggtcaagttgttagtttcagtgagatgaaaacccatgacgtcaaaaataaggtcacaaagaagcttgaatctgaacttcgagataccaagtatgtgtatctatactatattcgattacatatatgtaatcaatatatactatctttaagcttaaaactttatgtgtataaaactgtatgtgtgtatagagtttgtatatatgtattgacttttaattacaatcggtgcaaagatgaacgattgaaatgtactctttgggggagatttgatgtcgcaatgtggactacatgtcagaatggagggactgtgaaggttatttgtttgattcggctggctaagatcaattcatttaaaggtttagaatgctttactttaacaaattaaacgatttttatttaatatccctctacgtagacatatttgattatatatatttcatttgtaggtttaagatcaatttcaaatgcatttgaaatgtcactgctagaaatcaattccactgatgtgattcaaattaccctaatgactactctctcaaataaagtggtcagttgtagcacttaggggtcgaattccacaaagttttcggatcacacaatagactaataatttcaaataaagctaaaccggaaatattataaaagtaaaagacaagaaagcaataaaagagattggttgtagatttagatgattaagacgtcgggtttagtgaaattctaagaaaaatcagaatagtagatcttgcagtaaattaggattattatcgaaccattctagaactcaaatcactaatatagagtaactggtggcgttctgtgctactcactaagcttaatagtattgatcccaactctcttgtaaatccctagaactaagcaagcattataatctggtttgagaagttcacctaagtatgtaaatcgacgttagtccgcatttaaataataggctcatctaagatagttccactaacagataccttcagtgggtatacctaatatcctaaggtcaagttctagttaattactctagaactaacattaagaacattcaaagatgaagaattctaaatatattatcttaacaggattttcgatgtactaattcatccaaatctctaatgagactccctaaacccaacaagagatctactcagacatggttatcaaagaacaaaacatgtttgaataagaaatcaatgtaagaaacaggaagagaatagagtttagaaagatcttctctaaagagagtctctagagcgttttactcccaataataaagagataataagagttagagttaaaacaatgaccttaaaaacgatatatatacgacctaaaacgtgatgggccttctttgaaaaaaggaagaagttctggggcgaatttgaaaatcttcaaaacatcaataagttacgtttttgaattgccgtcaagtattgatgtcgctcgacaccaggggttgtgtcgatcgacacctacgcggattttggtctgcgaactgctactgcggcttaagttgtctgttttgctccagaatgctccataatctccaaatgcatcccaaacatgtaaagacctgacaaagactagaaagaactctacatataacaaaaggactataaaactatacctaaatcatagctaaaagcagtgaaaatcgagatatatcacccacctaccatgttgttcttgatttcgtggcaaagtaagttgttatatgattggagaattgtataattatcagaataaaaatttattggtgtatacatactatattattgtttaaattaactacaatatttgtagtttgcctcccgatgttttgtctctcactatacaagaagctaatccaagagaagggaatgaaatgattagaaagaaacaatagtatgatcgttttctaaggaaaacaatctccgacctctttgagctttcttaggtaatattcttaatagtatagactaatttagttaaatggttgaatctttttaaattattgaaaatcttaaaaaatttctaagttcagaggtgcaatatcatttgtaccatattggaaagtggacacagactattcttggtttttcttttgttgtctgaaatgtaacaaaacagttcttaagataccaaaagttgaaaatgagattgttaagaaaggtaagaaacaaatgttttggtctcccgcatgcaaagaagatactcctaaggttcaaccaaggtaagtacctaataatttgtcgtaaaaaatcatttgttaaataatagtagagtctatcaaatactattttttgttcatttcaattataggtgccttttaaacattattgttatggacaatactggagacactaaactattggtgtttgataaaaatgcacaagagatagtcggtgtctctgcggaggatattttggacggtaactaggatgaggtaacatcattacaattgctacgttatactatcctaacatttataaaaaaaaacatgaagtattgaacacttttgtattgctttataacagatacatgatcatataaacttgcctcaaagaatccaagacttaaaagggaaaactttccatttgacaaaaaaaaaaggaggtcactattacgagagtggattgacccagtttttgaatctatcgtttagggtttctgcctttcacttgttagccacctgatgaaccctagagttgcccttatcaatgaatccatccttaggacttctattcttcttagatttatttatattcaccccctgattgcacttttatttacctgttatttgtatcacctgttgattgcattttcgttcttaaatttgttgcatgttggttctactcgacccaatgatcaagtagggctcttaagttcttatctttgttgttcgaatcttgacctaggattgttactagaaaccaaccatctctataatctggcttgacttagttgcttctgtacacatcttgattgctagcaataacagtggactggattgacaccccctatagctgcatcgacatgttagtgtttaaggggaattgaactgaacacaccacacttcagctaataagtaggcgtaaaaacttacttattagtttggcgccgttgccaattcattgttacattcaagatattagaaaaagttaagatcaagttcttttacattaatcaagttactaactcatcttttcgtcttcttgtttttgtggtataggtactaatctttgtgcatgcaaactcggtccaaagtttctgcacacctactaccattcagagacagaattgacagaatagctcgtgagttacaagaaaccaaagcaagggcagcctgtgatctgcaaagaccaactgctatggatcaacagaacaaactagttgatgttcaagacccacctaatgttgatcaaccaagaaacattggtgctggggatgccccaaggaatcatcaccaaagacaagggatagtgcctccaccagttcagatcaacaactttgagatcatgagtggtctcatctccatgatccaaggaaacaagttccatggtctacctaaggaagatccccttgacaatcttgacagctttgataggctctgtggccttacaaagatcaatggtgtcactaaagatatgtttaagctcagactatttcccttctctttgggagacaaggcacaccactggaagaagactctacccccagactccatcacctcttgggatgattgtaagaaagattttcttgccaagtttttctctaacgctcgcacagctagattaaggaacgagatctcaggcttcacacagaaaaacaatgaaactttctttgaagcttctgagaggtttaaaagctacaccacttactgtccccatcacggattcaagaaggcttcattattgaggacactctacagaggagctttacccaagataagaatgctactcgacactacctcaaatggaaacttcctgaacaacgatgtagcagaaggatgggagttggtcgaaaatctagcacaatctgatgggtgctacaatgaagactatgatcgctcagtgagaggaactggaggaactgaggataaatagagcaaagatatcaaagccctgaatgaaaagctagacaagctgttgctggctcaaagaagcagatacactacatcactgatgaagagcatttccaaatgcaagaaggggggaatgatcaaactgaagagctgtgttacattcaaaaccaaggagggttcaacaagggctacaacaactaccagcccaacccaaacctctcctacagaagcactaatgtagctaacccccaagatcaagtgtatccaccacaacagaatcagtctaagccttttgttcagtacaaccaaggttatgtccctaaacaacagtttaatggaggctaccaacagcagaatccaccaccagggttcactcaacaaccataacaagcccgagcagctcaagatcctgaatttaagcaacttattcaacagatcattcaaggacaagctactagcgctacggcttttgacaaaaagatagttgaattacacaacaagatcgattgttcttacaacgatctaaatgtcaagttcgaagctctgaattccaaaatcaagtatgtcgagagtcaatttgcatcaacctctgctccgaagcatccttagcaacttccagggaatgtagttcaaaatcctaaggactatgctactgctaatgctatcatcatccacgaagaagatgagtctccaccaagtcatcagacacccaatactgaggacaatatgattcaagaaggggggattcaactcaaattgatgcacctgccacccaacaattcatctggactatagagcacacacctttgctgaatactcaccattctcgaaaaaagttcaaaattgaaaaactcaagaaggatcagaatcaagagatgattagtagagtcagcactcaagaaacatataagaagaaattcatccaagaaaagcttgatgatcccggttcattcactctgccatgctctctaggaccattgacattcaataggtgcctttgtgatttgggagcatctgttagccttatgcctctctctacagctaaaaggctagggatcgtggaatacaagttctgcaacttagctttactcttacctgatggttctgttgcacatccccatggtctaataggaaatctgcctgtcaagattggaaacgatgagatacctacagactttgtagtgctggatacggatgaagaaggaaaggatcccttgatcctaggtagaccattcttagcttcagctggagcagtcatagatgttgggaatggaaaaattgatctaaatcttgaaaaatgtatcgagatgagatttaacatcagcaaggcttcagggaaatcaacaacaagaggtcagagttttgggattcaggtcatggatgttgatgaagaaacagaagccgtcaaaaagatcaaaaaggagttcacttagaggaaagaagcttggagagcaagttgttgagtgaggaggaaatccctattctgacttattctccaggagtgcctaaaccgcccactaacccctctgttgaagaagaacacttgattcttgattattttgctaaagaactccttgagctctagattgggtataaagctcaggaggatacaattggaaagttaacccacaagatggaagagttaaacaacaccattctggaacttcaagaaatggttaaggactaccccagctttgaaattgaagattggtccaaagagcctggttcagtaggagaagactactctgctgatcacaaagaagcttattttgaagaaaaatcaaatgagtactcatccttccatatgtcaagagaggatgcagaatatgattcacgaaatgaaaatttaaccattgaagatgaggacttctctgttcctctcttcaacatttttttgactaagctctgtaagaatcaagcatagtgacttaaaacaagctcgcttgggaggaagtctcatgtctatccatgtatataactttctttttttcttttatttttgatgtttttgtttaagtgtttcaggtctatttcattgaccctgagaaagtaaagagatgatctcaaccgttgatcgagtaaattgaataggagtgttccaagccattggattgaatgaccaaatgggagaagcatcaccaccgtttgatcgagtaaattcgtgagatttaatctggtctgtttgattgagtgtttggatcctcctcattccccactcaaccagacatctgagcatgcgaataggagaggaagaagcatctactcgaccaattgatcactcggagcatagacactaaggcgcaaactttgcagcaccctctttactcgatccccaagatcgagcactcgcccaaaccacctcaattctcttgtcttctagtgaatctagggttttcaacattttagtataaatagatcactttgggatttgtccaagggatctagattttatcctttagttttcctttgtgttcttgaatcttcaaaacttaattactattaatctattttgtttttgcatttagttctttgagtaaacttaattacttttaatctacattttggtatgatttcagtaatttctgggtttgtgttcttagttatgttgcttgagtagtgattagggttattgaggatggattagattagggtaatcacttggttagttaggtggttaagattaggttagatcccttctagactcgttggcccctatgcggttttcgctggctaatatggagattcgaccataggtatccagcgtccaaaagacgttcaaatggatgcctaactacgaattccagagatttgtaggctatagaccaagagattggctagtctgcctattggctttggtagattgtttcttaaaccctgctctgctatgtttcatcaacgagagttaagattaggaagtggtagagttatgggggtctctgtcacgagagtggattgacccggtttttgaatctatcgtctagggtttctgcctttcacatgttagccacctgatgaaccccagagttgcccttatcaatgaatccatccttaggacttctattcttcttagatttatttgtattcaccccctgattgcacttttatttacctgttatttgtattacatgttatttgtatcacctattgattgcattttagttcttaaatgtgttgcatgttggttctactcgatccaatgattgagtagggctcttaagttcttatttttgttgttcgaatcctgacctagaattgttactagaaactaaccatctctataatttggcttgacttagttgcttctgtacacatcttgattgctagcaataacagttgactcgattgacaccctttatagttgcatcgacatgttagtgtttaagggaattgaactgaacacaccacacttcagcaaataagtaggcgcaaaaacctacttatcagatgtcaaacttattataaattatttacatatctcagagtatataaaacttacccaaaaatatcgcctacttttcaatcatttacgcagatctctgttcaaacataaagctgttttaagacaggaacaacaatcaaatctattgaaatataaggaatctttaacatattcaaattggcggttacctctttgatgaatacgaatttgccgatttagagatgattcacgaagacatagaatttcgattccccataagaatctgggttcttctacgactttgacgcagatctatatgttaagaactgaatcaaattctagaaatctatttgaccaatttaaaagcactaaaaacataaatccgatgcaagaatataacttacgtctttgtagatctaacaatttgctaacaacaagtctaggatgacgacgaaatcataagattctgtgtgaattttgtgattgaatcttagatcgacggattatgaaatttttttgggttcgaatgatttttgtttttacagacaacgtttgttgaccatcgaatatctgtatattaatatacaaaactgcataagcaattcaagatatagttctggccgatattaacaaaaaatttggcccatattacaataaaacatttttattgtaatcttatgagctgtggattatatctactttatataatcttatgagctgtgaaatatgtctttgtgtataaaattttagatggttaatgttgttttgtaaaagtttaggtgttacaaaaggaaaaatgacaatcatcattggtcaatattggttaacaatcggaagaccataattcaatgtttttttccttttacttttggggttttctacaactttctattagttatacaagtagtttaaaaaatttatagcattaaagaatttgattcgaaaaggttcaatatgtgtggaagttaaaccatgtatatgtgtgaaagtatcaataattgagtgaagatggtggcaacgctgatcttaaaacgcacaaatcttatgagaaaaaacaacaatgctgttattagaggttgcaggagatttgtttggaacaaattatttgctactctaaaataaattattttgaatggttattcagtagttttgacgaatgcaacatcaatttcttgtgtccaaaaagtaacacggtctaataacataaggaagtggtggtggcggcgggagttgagtgaacttacatgtgaaaccgtgcaagaaagctctcatgggaaaaatgtctagaccaataagttaaagttgtttacgttaaactctatgtggaacaactatgactaatgaggtaaaattttgtttggttcatttttttaaaactcttgttgtatatattttagctagatgatacatggccgggcaaaaggtatgggaacttgtgttgaaattgtgaaaaacaattgttctttttggaatacaatttcaataaaaacaggaattggtgagacgtaggataggtgataagtttaattgatgataatttctttacattatgaacagttgatgtcataatataggtaataaatagatttgctttccgtgtaaaaactgaagaagaacaagagaaatgtggatagattgcgacaagattaatagagggaacgagccattgtagtgaaaaaaaaaacgtttgattgtgacaccataagacaaacctggattatcagttaaggaaaagaaaagtgagaaaatagttatgtaatctcttaaaggcaacgtttggatcttgtatagttgaaatttaaatacgaggtttatggtattactatgttgatgtttaattgtaaggtgtattgtaaagatgtgacactaagtttaattcatagtagaaggacgaaagtgaggaaaatggagaagaaagaaagtgaggaagaagaagaagagtatagtgaagaagcggatgttgaaagtaacaataacaacgtcaataaaaaattggcaatgaagatgactgaatacaagaataagaaacctatgaatgtgaagagaaatatgaaaacgttggtgttatcggccaattgaacaattcgcattattgaaaacaaaaatgatacagtagtacttttgcattatgaatgtttttaaagtaacataaaggaaacttaaaaaaaacatttctgttaaatagatagaaaaagttatacaataatacttttgcattattaatttattatcattatcatatatcaatgtatagctaattagctactgaaatgattactatgcaaaatatatattgaaataatcgataacatcaaagcatagtagcggtggtaaataacctagtatttttaaaaattgacaataaaaaaggtattctttaaaaaagacatagtaaaagagtatttttattaatactgaaatgtatatatagatttcatatctttatatagttgtttttcgtctaaccactatataaagatatgaaatctatatatacatttttgcattacttttttgaagataatgtttgaaatctgagctttaattcattaattaattcaaatgggtgggttttaccctgtttaattctgttcggatcctaaattacagaagtttaaggaataatgttatttgtatccaggatttaagaagtttaaggaatatgctaagtttaaaggaatataatctaataactttcagaagcataataaactgtaatccaaagtcgagccaaatttaaaagaatattatctaacttcaaatattttcgaatattttctgttatatgatctttcaaaattcttgcaatctctacaattatgcatcaaacaacctttgaatcctaatatcccgaaacaataattcgctcaatgacatcaatataatctcaaaatattgcagtttaaccaattaaggttaaaatcctttacaaacattacgtttccctcctaatacatcatatgatctaatattcctatattccaatttttcagtagatattctcatacttgcaggttacagaaaatctcaacaattactgtcattaacataattagctcatgaatctataattttaaaacgcaataagattttattccatttcagttagtaagtagaatattttcttatcattcctcactaattcgtaagtctaatgtgtaccagtatgtatataggtattgtgacctactcatttcaccatcattcacctcctctaatagttttttagctgccacatttgcataccttactgatgtccaaccttacaagacgtcctcgagagtgcaggtaaagactcttcatgcttggcgtcaatacacaagcaacataggtgaaacacttgaagttctgttctctgaagaaaatgcaagaaacaattacaacagttatatgttcgtttctaatcatgatatatagatagcatgtctacaatattaatattctgtttctttaatgcatggcaaaaacattcattgtaccgtgtggaaagatttggtgagcaagtacgctcacatgctaaccattggaaattgggtttttgttgagacttttagtctcaactatgccaatggaggttttcgcccaacgtcccatctctacaagatttcctttgtcaatggaacttcaataattccaagtcccccaaagtcaaattccaactatctgactttagccagttttcaaaagatccaaactagggagcttaatcccaccatgttggttggtaagttttcgttgtataacactaataactgttttttgaattaagttatgattcacagtatggatcttgattttatgtagatgtaatcagtcatattgtaattattggtgagttagaagaacttgaggcaagtaataaattcacaaccaaaattgattttgatatcagagatgaagcgtgagtttactcttctaaattttcgtactatatccaacaatttatcttatagtaattgttttagtaaattttaaaactaacattaaagttaactattataatgatgagcgcattggatttaccttgtggggtgcatttgctgaagaagtttatagatggtgtaacgaagctggtgctcgacctgttgtttgtgtgcttaggtttgtgaaaatcaaatcatacaaaggtaaactcaccaatccgttgtcttattttagatttgtataatgcaaaaatattaacacgtaaacattattctaatggcaggtgtacggaatttgtctaacgcttttgatgcatcaaaagtttttgtgaatcctcaatttcctgagatcgatgctttcctgaggacgtaagtttagtaatatgattctcaaaaaggatatctttatatgtaacacgtttgaattattaacaattgtcttttctaaattgactaccatctgatggtatactcttgacgtaccttgagagaatcccaaggatggagattgttgtttttaaaaagagtgatagtcgtcttgagtatccctcaaacacaattcttgtactccttaattctgttgatgtatgttttatatataacctaattgtctttatatgcacttaatctataatatatactcatttatgctaatacattgtatttactatatgtttgtatatatttaggttgggaaggcaaggttgatgtgtaatacatacgtaattgatatggattgggcttggtattacattagctgtcgttcttgcattaagaaagtcacacatatccattctggagtgatggtgtgaacaacaaaagaaaaaaaaaacagatgtgacacttgcaaaaatgtcgtcactaatatgattgctaggtacatgctttatgctaaaatgattgacaacaacggcaaggtaaaacttttgttatttgaacaaatatgtactgaaattatcggagaaactgctccatcagtcttgaatggttctgttgatgaggttagttttagtaatggttgtcttctatttctatgtcttatttgttagttattattttcgtttagtgattcttatttaatctagattgatgacccaaacaatctccctgacacacttaagaatctgtatggtaagactttccttttctcggtgtctattgagaaagaaaatacttgggatgggaaggaaatatacaatgtttcaaaagtccttcttaaggatggactacatgaggaagaattgttggaggatccaactgatatgatcaatccagcctctattgtgtctggtgatcaggtaatataacaaacttaatttttctagttgtttttagactctgaatctcttaaactaatatgtatttgtgtttctaatagattccactaatgatagagtgtgctcaagagagtaatgactttgttactccatcatctaaacgtgtgtatgctgataatcctaccgcatctgatcaagcttctgctttaaagaagttgtacatggaaccggttgacttggagcagtctagtgatgacttcggtgaacagatgtctgataagtagtttttttaggcctacttatgctgaatgtgtgaggttcatttcaatttccctaaaacacaaacatgtcgatgcagctatagggggtgtcaatccagtccactgttattgctagcaatcaagacgtgtacagaagcaactaagtcaagccagattataatgatggtgggtttctagtaacaatcctaggtcatgattcaaacaagtaaaaatgagaacttaagagccctactcaatcattgggtcgagtagaaccaacatgtgacaaaattaagtaactaaaatgcaatcaacaggggatacaaataataggtaaataaaagtgcaatcaacaggggatacaaataaatctaatagaagtcctaaggatggattcattgataaaggaaactctagggttcatcagatggctaataggtgaaaggtagatacccttgacgatagattcaaaaattgggtcaatccattgtcgtgacaaaggcccccataactctaccacttcctaatctcaactgtcgttgatgaaacatagcagagcaggttttaagaaacaatctaccaaagtcaataagcagacaagccaatgtcttggtcgagtctacaaatctctggaattcgtagatcagacatccatttgaatgtcttttggacgatggacgtctatgatcgaatctccacattagccagcaaaaatcgcataggggccaagcgaatccagaagggttctaacctaatcttaaccacctggctaacctagagattaccttaatctaatccatcctcaaaaaccctaatcactactcaagcaacatatctaagaacacaaacccagaaattactgaaatcataccaaaatgtagattaaaagtaattaagtttattcaaagaactaaatgcaaaaacgaaatagattaagagtaattaagttttgaagattcaagaacacaaaggaaaactaaaggataaaggctagatccgttggacaaatcccaaagtgatctatttatactaaaatgttaaaaaccctagattcactagaagacaagagacttgtggtggtctggttgagtggggaatgaggaggatccgaagacgctttgatagctcaacaagtcttgtagagttggtcacccttggtcgagtaaatggatcgagtagaggatcgagtaggaggggcgagtagatcaatctgctgcttcatctgaggctgccttgatctagtaagagggtcgagtgaattttagcctcatctgtagctgcctggatcgagtaaagaggtcgagtgaaatgatgcctcttctgtagctgcctggatcgagtgaatggatcgagtagagtcctttttagctccttctgcacctgaaaaacacaccacaacatgcaatgcgtatgcaagaagatcctagatgcctaaatatgcaaaataagctaaaatagtgtaaaatgatatgatacaataagcaaatgcacatctaaatgatgataaacatacacctaaaatgagtaaaatacagtgttatcaatgtctacaactaaggtggaagaatatgagcctaaagaaggtgtgatttcaaatgattgaagaccagcattgctgttattgattctcgagctgttgggcacgcaattgttgacagaaatgttggtgttggagcaaacatagtgaaaaaggaaggggccatcaagaagggagctgtgaaggtcaaggtagagaataagtagtgatctaaagtgtttattgggtgtggtggaaggctgttggtgttacgcaagttttatgttttatgtttctgtttttcctttatcactttgtttggattatttgttatttgtgttgaattctactgttctatttttctttcatgcaagttatatctaaaacgcttatgaataaaaatttgattattgtttaatttgtttcatatctgcctaatgttttgtatttttttaataattctattgctttatctagcttatagacactttatatctataagtttagattcagaagttgataatgttttattaaattcatatagttataattttctttaatacatatcagaatattgatttttcatcaaaaagataacactacctagattctttctgtataaaataataattatggttaagtatatctaaacataaataaatgacgattcaatttcgcttttttgtaacaattaagttaactctgcaccgtttcacttttttattttttatacaaggttaacgcggtgtttccttattttgtttgcgttcttctataattttctctattagtaataaaactgtagaagttctagctttatcaatggaggttatgcaccatctttctaatttacatgttcactccactaactggagggtttatgttaagatacaagcggtatacaaccatactccaacccttaaaggtaatgaaacgactatgctattggttgatgaaaatgtgctcttatattctaatgttattcttagttttttgttattataaagtttgtatattttgtgttaaccaaagtgacgatctattggttgtttttttctttagtgcaaccgtatggatgccaaagttccaaaaagctcatccctctacaagtttcaggatgtagtgagagcggtttctggtactacatgtctgacttttaaatgattttgtctcatagtgaagtcaaatacgccctcagatctattcatatcaaatgtatgttccaaacacaaatgtggtcggttcctcttaagtcagttagaaacttctttgactttgtggctctcgatgaagtgaaatatgctacagatgatcaatataattgtgtgacaggtaactatcttgatccggttttctactcgatgtacataattttataaattgatattattttcctatctttaatcctcacacgctattggtgtgatttccaaagtgtatactatcagaagttttccatttgtatgtcgttaaagcaagatagactacgagtcaaaaaatgttgctttcaagataaaggataatatataattatttgatatacaatatatattttatatatgattgatatatagattggtttatacgacttcttttgtagggggaatgaaatattatgtgttgccgttggcaagtattgtgaggattttgtaaacaagtggttttggagaatcagtttttgatcacctagaattacgagcccattgttgctgtcttgcaattttggagaatcagaaattatcatggtatttctttttctgatcaagtggacttggaatatatcatagtagaatgacctatgtgtttgagaatgtgcctattttcttctaggatctaatgtcataatgattgaacatggattttcacggctttttattgatcctaagttcaatgatcttgatataccatcctatatgtaagtgtcaattaaccgatattaaggtttttttaaaaaaaaattaactttgtagagttaattgttcacacattactcgcagtcgtggattccctgatcaagaagacgaagaggatgatttcatgatggagatcgttgaagagaactgaaattgcggtatactttaggatataattttctcagccgatgaaacttatgctctatttatgttttgaatttatatattaaggatcctaaaatttttattaatgttttaatacttaagttccaatttttaaatctgttgttttttatgtttaagaagggattagctaaacaatatgcatcattacttaactagcaaggattagctaaagtacacatcttatactatagaagatattaatacataccttttaagaagtactagaatcgatgataaagagttcattcttgatgtcatagtagaataatgtccttatcaacaaaacaattgaaagtaaacaattaaggaaaataattaattggttcaggatttgcaaatcaaatcttattgagaatcctataatatacattggttttatcttccatttagaaattatatagattactaggtttgatcgatattttgttaacaagtctcaacacaacatcatcatcgatgctactttgattttcaatcataaaaaaaatatgcaaattctcttttagattataattttggcccaaaatcaccgaagaggttgcgtgttactgaaacactaacccctcaaagtcaaattattcaatctaccgtaactaataacaattgttttgttcctcttaaatctgtttttgatagattgtttaaagatataagtaatatcccttcaaggagatatgaaaagagagtttgatcatcttctcacaatcagattttgggaatggaacaccacatttcatgggtatatttctaattcaccattctttttctactaatgtttatgcaactttatatacgtatagagttgtttggcagagagtggactcacaacattttcaaacaaggagaatgaccgacaaaggcaaagacactctgcttcagtattacaagacatcaacaacgtttatcatcaattctcacacctcttacacatccacacactttctcttattctgcaattaatagttcaacaggttagtttgacttcttcgagagccattcaatggaactgtaacattttatgtatagattataattaacaaaataaatatcatattctatgcaaagaaaaatttatggacatcctaattcatgtattaccaatcagccacgatcaattattaattttccatctagcaactttcatatcagaaacctacaagaagacttcagaaatgcttctctaactcctactgataaaggtaatatactaaaatattcatcattgaactatatgtttatggataataaacagtcccacacactttttcttattttacaattaataggcaaagctccaatgtgtacgcaaccagcctacaatgataatagcactgatgacgaaagcatgtaacatcttcaacgacaatatataactgacaatgaaactgatagtgaacaaaattactatcttagtgcttaagaggacgattgttctaaagagaattttgttctatcttactatcttacttaataacattcctaaaaaatgtggagacgaatattggtttcgctgacgaaaaatgtcgaattaatattttcacctgaagatactcttattgaatgtggagaaatagaacaaacagttccctctgtttcacaaccgaaaaagagaggcacaccatttggaaaacaacaaagtaaaaaggcagtagagaaaggtacaaaaataggtaaattttatagttaaaatcagcttatagctttctttaatatcattgtagttggttttcttatgtttaacttctacatgggataaaagctaaaaaaatttatactttattcgttctatttttctaaataatagtgtcgccaaacaatcttgttttagagccaaaaaagagaggtcgtcctaagcgaaaacatccaactaaaaaaggagcagctttagccaataaaattggtaagtgtcataacttttatttgaatattgtgttcttcagtttttaacattgattaaatctgaatactttgttattctctattgactgataagcagtttaaaacctgcaaatggtgattatgctaaatattcacaactttatattgtggatactaaaaatgaagttgataaaaaagctaatgttattgggtactcctcaaaccaatctacctatgttacatctaattaaataatgcgatattgttacatgtttgataagcatatctaactaatatttttttactcattgtagaaagggaaataatgcaacctcaacaacagccgagaaaaatctgaacaagcaactcattgatgttattattaagatattcaaccaagttaacccatatgtaaaaaaaatcagatatgctagagagaggattgagtctactaatgatgaaccgtttcatatgcgaattaatgatgatcgtgaaggtactggtgggaggttatataatatgcctacagtagaagcggttgcaactttgatccctggtgattttgtaaaccaaatgcctgcccgtgatataatacttgaaataaaaatctactggttgcctaaagaggataagccagattcatatatcctatttgacactacagtacccactaatgttttgttacggtgaagatggttacactcctgcaattgagaagtgttataactcgggaagcaccaagaaaaaaagtgtatcagtatgagacagtggtttgcattcagaattcaagagaggaaaagatgagtgtcatactctgcttcattcaaagaggttgtttcaacagtttctaattgatgcatatacaattattgaatcaaaccgactagcttatatcaaattcaatcaatctaagttacgatgtgagaactacaactctatgaaagaagctgcatcatctggaacaacaactatgagtgaagaaggtaatcaagttcttatttgagcttctttcactagtgcctctaggtatatgcttcaaacctattacgatgctatggccatttgtaagcattatggtttcccagattttttatcacgtttacgtgtaacccaaaatagccggagatagcaagatattacgaaaagagagggttaagagctgatgatagaccagacattgtcgcaaaaaatttcaaaatcaagctagattctctaatgagagatttaacagaaaggaatctccttagaaaaacagttgcatgtaagtttatttacatatattgtcagtaatctatcttttaaactatttcatatttttatttctgaattataattaatttatatctcttggagctatgtatacagtcaaattcaagaaaagaggactacctcgtgctcgcatacttttatttatggaggctaatagaaaattaccaatagctgacgacatcgagtagataatatctgcggagattcctaacaaagaacagaacaagagctctatgagcttatcaaaaactctatgattcatggactatgtggttcagcaaatacgaattctctgtgtatggttgatggtcagtgttcaaagctatatccgaagaaacatcaagagctcacaaaagtaggtgctgatgggtatcctgtctataggagaagacccatagacggctgtattgagaagggtggtgttaaatgtgacaatatgtatgttgtgccttataataggttttctttaaaataccaagctcatatcaatgtggaatggtgtaaccagaatggttctatcaaatacttatttaaatacatcaacaaaggtccggaccgtgttgtttttattgttgagctagtaaaagaggaaacaaacagtaacactacaactcttggagatgagacagttacaacaaagaaaaagaaggatggaataaaagattggttcgactacatgtatgttttcacaaaccatagttaacttagttacgtatgtaccttgtatagaatctagctgatacataatttactttgttttttagatatgtatctgcgtcagaagctatatggagaattttcaaatttccaattcagcatagatcaacacctgttcagaaactatcttttcatgttgaagggaagcaaccagcctatttcgatgccaaggccaaaatggttgatgtcctagaacgtgtttcaaatgaagactctcagtttatggtttggttgactttgaataagaaaaatgttgttggaaagaatgggaaacgtgctcgaaactgtctatatgctgaaatcccaacatactttacatgggatggagaaaataaaccatttaaaaagagaacaagaggattctttttgggtcgtattaattacgttctcaggaaaatggaagacgaaaattacttgatagtgttacttaacattgtcagaggtccatagagctatgatgaaataaaaacatttagcggtgttgtttatccatcttaaaaacaagcctgttttgcacgtgatattctagatgacgaccaggtttatatcgatggtttgattgaagcagctcaattttgtttggagattatttgtagcaagttttaaaatgccataattttctcaatgatgttgcttttttattgtctatctagaccagaacatgtttgggtagaaacatgacatctattatcagaagatattttgaataagaagagagacaatgatggcattttaaaacttgctacaaaatctataggttatcaaaatgtaatattaaaaatgctatgttcgagtcatctactgcagcgcaacaagttagtaatttaaacaaatttgaaaaatagacaaacgctataaaatactatatcataacataaattaactacataaactaaaccgctttaacaaagctatcgtagagtcccctaacatagcatggataatgagtaattacataattttaaacaaattaatacgctttaatacatagcgtttccataaagctataatagaattatttaacatagcatacatatctgacgctaccttatatggggtacttacgataacaggggcataatatagcgtttatgaaatcgttattaatgtaacacccaaaattaaaagaaaatttaggatcagattttgggttaaattgatcgttttgaaattgtctgatttcaggagatttctgagaatttgaaaaatctggagggaatctgtaaatagagaaaaatcagaggactaaaatgcaaaatcgtggaaaatgagagaaattcgagtttatcttttccgaaactgaagggaagttgttggaaattcgaatcattgttccttaaccctaatatcgtgtatatatgcgttttaaagccccaacgaattagaagccgaatccataataaatttgagacttttggtgagtttcttagaccctttttgcctcagtgccaatttgaatatttgttgatatttttgtgaccagattttgtggctgtttaggttggttgtgacttcagttgttgactctttagtattgggttgttttcagccttctccagagttttaggtaagcttcatcttcttcctatgttcttctgttctgatggtattattctgtctgatgatattattgtgttctgatgatttaataatgtattttgttagcataagttctgatgtgctttactttataaaaaattaatcgaattgaaactatgtctgttagtaccagcacgtgaacattattctgtatgggattagaccgtgttggtacttgttcttcgggtttatagtctcacttggcgatttttcgctcacataagttctgattccgtgcatagggcattgacgaggagcggtatgcagctgaggtttagagtttgttattcgtaaagcgagacttgatagattttctaaagtttaatttatttgtttttgagatttggagttagtacgagattttaactttgtatattttgggaatttttgtatttttattatagcaatgcttcaaaaattcttttgaatttttggggcgttacaattaatgacataacatagagtttctctcgtgataagaatgtggatttttcttgtagtgcaagttcaataacccacgtacttaattttccttatagttaaataaaataaattactacaatattagattattttcatattttcttactttgtatatttcccgtgtgcagaacttacactaacaggagctcaaattcagaactatactcttcaagagattgagaaaacaatgttgtttaatggagcaactctagaagatattgaacattttcctaagccttcaagagagggtattgataattcaaaccgcctaattgttgatgagttgaggtataacaatcaatccaacttgacagagaagcatgctgagtggatacaaatgcttacgcctgaacagaaaggtatatacgatcagattactacgacaatattcaatgacttgggaggagttgtttttgtttacggctctggagaaacaggaaaaacatttatttgaaaaacactagctgctgcagtaagatctaaaggacatatttgtcttaatgtcgcctctagtggcatcgtttatttgttgttagaagggggtagaataacacattctatgttttcaatacctttgaatcctgtgaattttcagtatgtaagatcaaaccaaaattagatttagctgatctaattaaagaagcatctctcattatatgggatgaagctccaataatgagcaagttttgttttgaagtattagatcaaagcttctcagatattatctagcgcgtagacaataaggtatttggtggaaagttcattgtttttggaggtaattttggacaagtgctaccaataattaatggtgcagggagagaaaaaattgttatgtcatcactaaatgcttcatatctttcggaccactacaacgtgttgtagttgactaagaatatgcaacttttaaacaacaatttaagtgttgatgaagctaaagaaatccaagaatttttccattggttattggctattggtgatggaagggtcaatgagcctaatgatggtgaagcgctaatagatataccttgagaattgttagaaaaaaaagaagcagataatccgatagaagctattagtagagaaatttatggagatccaactaaacttcacgaaatcattgatccaaaattctttcagaggagagctattctagctccaaaaaacgatgatgttaacacaatcaatcaatatatgctagggcatctatatagtaagtttagatttactctatattatttaatcttttaatttatgtttgggtatctagacaaaatatttagtgacaagagtctactcacatattctgtgaaatctatagtctgtggtatatttactataccttcataatatttgaattcaattatgatttgcataacccccaaacaaacaatctcatgaaaaacatatgttcttttcatatgcaggaaactcagtttcaaacaagcaaaatcatgattcatcaaataagctacgaaatcatccaaaaataattagaaaaatcttagtcaagactttggttttccagtttgatttagatttacaatttaaacaagtactttttatactctttgatttccaagctgcactgtggcaagtgttttccattccaacaagttggacctatcttaggtgttagtaaacactcgatttgtgtagcagcaattaaaaaaagcagtctacgatcaaaatagagataagctaaatcttactcttcttcaataatttcggactttgtcgtacaacttgatggtataataactctactcttcatatgatatcttcagttaccattattcagggtaaatatgctaaagatatcatagccaacttccaacagcatacacgggaaatcaaaacacctaatactgcagaagattagaatctcacctctgcaatatatggccacatcttgcttagtagtttattcagccatttgacctggaaaaacaaaagaacaaaaggtttggagtttaaaatttttgctatgtttctgagaaaccgagtggttaaactgtactaaactgttccaaaaccagagacatataaatcaagtattgttgaattcaaaaataatatccaaagtctgcaaaaaatcacacaccttctatgtaaattaatatccaaaatcagcaaaaactcacacacctttagaaacttaaaacgcttataattctgctgagttgattgtctgtctccatgtctcctttcagttcgcatcatcaaagctgtggtggtttggggagaaattcggatcaaattaaggaattgataacctcatagatctcccgatattataattaatcgtttgttggaggatcgacaagctagtagactatttgctgattcgagaaatattacaaaagaagaacaacagagattgctaactcatctctattacaaaagaagaagaacaattagtcgagataaatggctgtttttttattttcatttcattcctcttcaaataaaaaaaagtttgccgacaaagtagataattattttttcagatatattgtggtttttattttcataaacaatttagtcattttagtggatctgtgggcctaataaaatgtgaaatacgaagcccacattatgttttttaattgtaaagcaacatttttaaaaaatttgacacttccttgaagttgaagattgatttctatattttgatatatagatttcaaaatacaacctgaacagaaactcaaaagaacatatacagtatatttaaattctctggataccaaattagaaactgtcattattttaaattaaataaaatagtcaaaccaaatttataaggtgtaattacttattttctacatttagattgtacacaataaaacaatcatatttaacccactaagacatactaagtattatatctaaacatacaaaaaaattgtgacaaaagaaaatacaagaaaataaaattaacatttaaatattaaactgtgaattatgtcttacgaaattaattagtcgcgttactaaaataaaatatataataacggctgttaaaaaagttaagaaaaaacttttgcaacttaatatatctacatatacatttttgcaacaattttatgaaataaattctcaagttggaacttatttacaaggaatgccattgacattaaatttttttctaaattatttgattttagtttcaattcttgatttaaaatatcaatcatattatcattcaaatttaatccaaacaacaaacttcaaatcaatcccttaaaattagctacacataatggtacacaacattctaaataacttaaaatagttttttctaaaaaattcaaaaaaatatttgatattaatctaacttcccaaaatcaaacccaattcaagaatttaaaacaatatctacgctaacaacattttccccaattcgatcaattctgagattttgtattatatgtaccaagatttgtgcttagtattaaacacttcgcattaacttaagtaattctttccttcaacatctctaaaaaaacacaaattatgaaaataaattaaatactcgaatacacgattgatcctagcatattccaatcaaaaactaagtaaaataatttccccccctaaaatcttgcaagatattatatattttctatcggttgctatgcattaccgaaacatatctagctttccgataaatactatacacataaacctcatttctcatcaccaaacacaaatatcaaaaatgttttactttagatttgattcgtgtttctttctttttagaaagagaagcaacgtttgaagataaaaaatattcacgagacaggaagatgactacaatgttgacaaaagattttaccagaaaagcagtgtgagaatttgttttttaaataccaatatgatttattttatacatattattttttgcataacatgaatattcataacatcgtcacgaaaataccaatatcatatttttctcttttagttttttatattactttgactttattttctcaaatttatgttttacagttgggatattcttggtagttcttgatcattttaagaatatgtaaagaagaactgatatagttcttggtagttcttgatcataacatgaatgttttacacttcggatattcttggtagtttgtgatcttccttcaattattcttggaataatgttttacaattagaatagaactatctcgtttaattattcttgggattgtatatttataaaatacaatacaatatgttatatatagataatatataaacaaattatatcttcatttttctataaaaaattgtttcgcggtgcaccgcgagttaaaatctagtttcttatagatatttggtactgtgacattttttatacatataattctaatatgacatacataattaacaaacagccgacaaaaaaaaataattaaccaacaaaaaaaaaaagaaaatttcagagacatcaaccattcctgacaaattgcctagcttgcacaacatcaacaagttgtttctcatgtcaatgtttatcctctagtctgcttatcaaattgtttatttgatgacgaaatctaattagaaagagaagtttacaagaaatttgaattcatgaatatttaaatatgaaaatataaatgtaaaattaaaataaattttcttcagatttattttgaaattaggatttaatagtataccgtgagatgatttttttatgtaattttgttgagttaagtttgaatcctagagagattaggactagaatatctaggagttatctagagaatatttaggagttatctaaatataagttctattaggattaggattgtttaagagatctctatataaggagatgcaagtatgttgcataacttatgagttgagagaattaagaacaagagagtttaagttttgagcaattttcttaaactaataaagagagttattctttaatctttgtgttcttgacaatctccaattatatttggtatcagagcggttataatcattttgtgatcaagagagattagaagagataaaatgatacctcttgtgtatatgcttactttgtccgtgaaatatcgggttcttggtgagtgctattgcagatttgttgtcaagtaaaatcagcatcttctcgcatggttttccattgatctctccaagaagctcttgatgtcatagtgcttattttgctgcctcagtagcggccataaactcggcctcacatgatgataaagccacattatcttgcttttgcgagcaccaagtgatcagacacttgttgagatagaaaatgtgacatattgttttccttccatcgtcctcatcaacgttgtgactgctatcactgaagcctatcaacttggcttcgtttttctgagtgaaggagagaccataagcccgtgtaccttgtcagtacctaagtatttgttttagagctgcaccatgagactcctttggttcatgcatgtacctgctcaagactccaacactataagaaagatcagggcttgtatgaagtaaatatcgaaggcacccgatatttcttctatactccttctcatcgatgtttttctcatcatgtgctttacttagctttaagttcgcgttcattggtatgtctacaacattgcattcttccatttgagtttcacttagaatttttgatgcatacttttcttgcttcaacgtaatacctccttcgtgttgacatactcaagaccgagatagtatgttaacaaaccaaggtcactcatcccgaattttttcgccatttccttcttgaactcgagaatcaacttcaagctaaaccccgagattaatagatcatccacatagactgcaactagaagaactttatctttgtcttgtttctgatacaatgaaggttccttaggacacttgacaaactttaactcattaagtatcgagttaagcttatgattctaggccctaggcgcttgtttgaggccacacaatgctttgtttaacttataaactttctcctcactccctcttgtaacaaaaccctccggttgtataacataaacttcttctttcagctccccatgtagaaacgccgttttgacatcgaggtggtgaacttgctatccatgtgaagcagcaagaacaagcataaggcgaatggtttcttttcttgctaccggagtgaagacttcgtcataatctattccatgtctttgtatgtaacattttgctacaaccttgctttatgcttgttaatactaccatcagaattttgctttagtttaaacacccactttagtcctatagccttgactccgactggaagttctactaggtcccatgttttatttttggtaatagacatgatttcttctacacgagtctctccatacctttagctcttttgcttcaatgtaatcccatggttcttcactgattgtcatcaagagtttttcgacttcaagttcagcaaacaaaatatagtcatcttgatgattaggtctatgacgttgtctctctgatctccttaagatgacctcattagtctgttcatcttgatcgttatcgtttggaatgtcttcttcctcttcaactgaaccctcgttattctcatcggctccgttctcctctgtttcttgtactgagtcctcattttcaataccattgtttccaaagctgactttaaacgttcatgggctctcacttgtctcgttttttgtctcattccaagaccagtttttactctcatcaaaaacgacatccctactcacaataattctccgcctagatggatccaacaagcgataagctttagagccaggttctgttcccagatgaactaaccttctcgacctgtcatctagcttctttaactgtggactctcagtctatgcatatccgatacacccgaacacacgtaaatgttcaatatttggccttcttcccttgaatacctcatatggagtttgtttaaccagtgatcttattgcgactctattaaaaagattggtagcatgcctcactggttctccccatagatagtttggtacatccatgtgcttcatgatgcttatggtcatctctagcaaatttctattcctcctttcaacaactccgttttgttgtggtgagtaaggtgcagttatgtgtcttgtgattctggatttatcacaaatatcttgtgattccggatttatcacaaaaatcttgaaattcatgtgaagtgaactcaccacctctatctatacgaagtgttttgatctttgctcctgtttcttcttcaactagtgctttaaattttttgaatttgtcgaatgattgactcttttccttcaatagcactgtccacatataacgagagtgatcgtcgataagaacaaagatatacctattttgtgctgctgtcataggtgtgataggtccgcagagatccgcatgtatgagttcaagtagtcgtgaggctcgaaaagaagtagcttgagggaatattcttcttacttatttcccaagcgaacatgaggccaatgtttccttttcgactgtgatctttggtaacccgacaactaactctttgttcatcattcacctcatagtgtttaacccaacatgtcctaaccttgagtgccatattgatgaatcgtcgataagatttagttgtaaacacttcttagcttcggtttccatggtaactttgtaaagccgattctttgaccttatcgctttcaccaacaactttccatcacgatcatacaatgttagatagttttctttcatcctcacatcgcatcctgctttggtggcttgaccacgacttatgatattgctctttagatccggtatgtagtacacttctacttacaaagagtattgagcccttccctttgatatcaatacgagagttatctccaaatctcactttccctgtgattgactcgtcgattttagagaaataagaacggttttctgtcatgtgattccttgccccgttgtcaagataccacacattatctccatctgattgtgtttcaaaagtttgacattcttttcatttaaatagactacctcatgtatcatgagctcatccgcttcttgagtttcttcttcttgtttgcacatgcttcttgaagcttaagtaatctatctggacaattagaagcataatgccctatcttatcacacctgtaacacatgatctttgacttatctcttgtattacgaccacgtcctcttcctcttccaccaaatcgtcctctttgacctcttcctctactagcagttatcttgataggattgtgaattagtattaacttacatgagttttcttatgtcatcttgctcatctcctacatcaccaacttattcttcatatactttcatacggcccacaatatcctcaaatcttgtattattaaggtcaagaacttgtttgtatatatctctttcttggcaaaccgttaagaaatttcttaacgagtcttggtacttcaatctcaactcctagttccgcagattttgtagagagttccgaaagtcttccaacgaagttatcaatatgttctttccttcatctttattttctcaaactctgccatcaaggtttgtaaccttgcttctttgaccctctccactcctacatgtcgagtttttattgattcccatactttttttgttgtattaagattcccgacttgtagtgtcaaagtctctggtataggttgcaatatgaaacccctagccatgagattcttgtcaacatcatcagatcctggatttattacctcccacaccttatgtatactaagcgtaatctccatacgtatggcccaacccgtgtagttcgtagcattgagcataggacatgttattgatgatgagatattctcctttggttttgccacaactatgtcacccatgtttctagcttgaaacgttgatctctactaacaaatctgcaattgcactcaccaagaacccggtgtttcacggacgaagtaagcatatacacaaaaggtatcattttattcgtgagtttgtgacgaatgaacaagtggaggtagagcacgttcctagaaaaagaccaaaggcagatattctaaccaaggctctaggaaggatcaagtttaaagaaatgagggagctagttggagttcaagatgtgtcgaagtatggcttcaaacttaagagggtgaatgttgggttaagtttgaatatgacttgagcactaagtcattaaatccttgagagattaggactagaatatctaggagtgatctagaaaatatttaggagttatctaaatatacttctattaagattatgattgtttaagagatctctatataaggagatgtaagtatgttgcgtaacttatgagttgagagaattaagaacaagagagtttaagttttgagtagttttcttaaactaattaagaaagttattctttaatctttgtgttcttgacaatttcaaactataaattttaattgaatcaatttaattcgatatggctaatattctaatattgatgatgttaaaaacagaaaagaatgatgatttaatttactgtattatactgtgtggttaatggtatttttaatttatattaatattgattcaaataaccccccctcccccccggctataataactatctcgtgatatataataaaatattaaatgttgaagaacttaaaattttaactcataattattcatatgagtttctttaaagacttttacctataaaattaggacctactatatatattaacttggcacagaagttgccaaaaaaaattaaacgagatagttctattctaattctgcctatgttttcacgtccaacgatccggtgaaccgattaaaccggccagctatgtgttttgaaattctcatttgattttggaataaaatataaggttttaaactttattcagttatttttataactttttcagtaaactcatttgatgttttagatttagtgaaaacctcacaatgccagtcttaaaagaattatcaaatatgtattggtacaatgacccggtttaccggtttatctatttttgtcttggttaagtagattgtatttgaggatcaaaccttgtttcctttattgtcaatgaagcatatttctaatctaaggtaaagtttgttagatctaaaatggtattagagcttttcccagcttcattcatcttcttctgcaaattttcttctattctctgataatttctcttgattctcttttgtttctcaatctttgtttcattctctatcgtttgatcggagaatttctttgatcgcgtttcattccgatcattttttcattttctggttttgttactcttcgcgatggctaatccagctccgacgagctccaatccttactcaaatccattgtgtcttcatgctgctgacaattcgggtgttaaatctcgttctcgacaagctcatcggtgaatcttactatcttacaaggcgtcgttctatcatcaaagctctcaacgctaaaagcaagctcggattcatctatggaagtgtcgttaaacctccggaagatcacaatgactatggatcttagactcgctgtaacgatatggtatgtacctggattacgaactttgtttcaaaggatttaggatctggaatggtctatttttatgatgctcatctcttatggttgaaactagaaggtagatctaggcagagtaatttgtctaagatctatagtgttcaaaaccaactagatcgtctacatcaaggatcattagatctcagtgcttattacactcgtcttacggttaccttcattagatctcagtgcttatcatgggaagaattgaagaattttgaagagttaccttcctgtacttgtggaaaatgcacttgcggttcaaatgatcgttggattcagttgtatgagaagcacaacattgtcagattcttaatgcgtctcaatgaatcgtttattcaagcgcgtcgtcagattcttatgatggatccacttccagaattcacaaatctctataacttcatctctcaagatgatcaacaaagaagttttaattcaatgcctaccacagagaaacctgtttttcaagcttctataactcaacagaaacctaagtttttcaatcaacaaggaaaatctcgtcctctttgcacttactgtggtttattgggtcatactaatgctcgatgttataaacttcatggatatcctccaggctacaaggttcctgttggtacatgctacaataatgacaaatcaagaggtcagccttatccacataatggcattcacatggtttattctcaacctcccgaacagatgatgtattctctagaaaagctccacagattcaatctatgattccatagagtcatcttatcacttacaatgggaactcatatgctccaattgttcaagctaataacaatgctccatatgctctttataatcaagcttataatgggaattcgtatgctcctatggctcagaactttgctggaaatcatattatctctgatggatcttcaatgtctgctggtaatgtgactagtgaatcgccaactgtaaatcattctgtcaatatgatgaattctggaagaggttttcttggtagtagttcacatggtagggaacaggttaatcagatggttactcaattgaacacacaacttcaaggttctccgtatcaagttattcgaccaccaactgtctcgcaaaatcatggttctatctcagcacaaggtatgtcacctataccttctcactatatttctgctttcgaaccatgtcttataattccacaaaatacctggagtcttgatactagagctagttgtcatatctgttgtgacttgagtttgttctgtaatgtctaccatattgatcacacgaatatcactctaccaaataatatcaaaatttccattaacatagctgaaacagttaaactcaatgataggctcattcttcatcttgttttctatgttccttcttttcatttcaatcttattagtgttagttctttaacaaaaacaaataaaaaaaattcagtgcatttttatcataagaattgtttcattcaggatcatactcacgcatggacgattggtagatgagattagcccaatgatctttatctcttaaatcatcaacctccacctgatacataacatcatgctgcatcattcattcaacctgattcgcaactcatgttgcatcattcattgttgtttcacctaagctttggcatcagcgtctaggtcacccatctatgtcaagggttcaggctttatcttcaaatttacatattcctcagaaactttctgaatttcattgtaagatttgtcatttgtcaaaacaaaaatgtttatcttttgtttctaataataaaatttatgaggaacctttccctttgattcatattgatgtttggggtccttttcatattacttctgtcaaaggatatcgttaatttcttactattgtcgatgattgcactagaatgacatggatttatttcttgcgtttaaagagtgatgttacaacgatttttccagaatttttaaaacttgttcaaactcaatttggttgcacagtgaaaagcataaggtctgataatgcacctgaattacaatttaaggacttactagcaacttttggcatttttcattatcattcatgtgcatacacacctcagcaaaattatgttgtcgaacgtaatcatcaacatcttctgaatgttgctagatctctttattttcaatcaaatattccacttgcatattggcctgaatgtgtttctactgctgcatttcttataaatagaacaccaactcccaatttagaacacaagagtccttatgaggttctttataagaaattacctgactataattctcttagggtgttttgttgtttatgttatgcatctacacatcaacatgaacgtcataaatttactgaaagagctacaagttgtgtttttattggttatgaatctggttttaaaggatataaaattctggatcttgagtcaaatactgtttctgttacacgcaatgttgttttccatgaaactatttttccttttattgataagcatagtactcaaaacgtttctttctttgatgattctgttttacctatttctgaaaaacaaaaagaaaatcgttttcaaatttatgattatttcaatgttttaaatcttgaggtttgtcctgtcattgagcctactactgttccagcacacacacacacacgatccctcgctccattaagcactactgttactaatgatcaatttgggaatgacatggacaacacgctcatgccccgcaaagagacacgtgctcctagttatctttcacagtaccattgctctaatgttctaaaagagccttcatcttctcttcatggtactgctcattctctctcttcccatttgtcttacgataaactctctaatgagtatcgtctgttctgctttgccattattgctgagaaagaaccaaccacctttaaagaggcagctttgttgcaaaaatggcttgatgcgatgaacgtggagttggatgctcttgtgagtacttccaccagggaaatttgttctttacatgatggaaaacgtgccattggttgtaagtgggtcttcaagattaagtataaatccgatggtactattgaacggtataaggctcgcttggttgctaatggctatactcaacaagaaggagttgattacattgatacattcagccctatagctaagcttacttcagtcagattaattcttgctttagctgctattcataactggagtattagtcagatggatgttactaatgcttttctccatggtgattttgaggaggagatatatatgcagctaccacaaggttatacaccaagaaagggggagcttttaccaaagagacctgtgtgtcgcctagtcaagtccttatatggtctaaaacaagcttcacgtcaatggtttcacaagttctccggtgttctaatacagaatggttttatgcaatctctctttgatccgactttgtttgtcagagttagagaagatacttttctggccctgttggtatatgtggatgatataatgcttgttagtaacaaggattctgctgtgatagaagtcaagcagatattagccaaggagttcaagctaaaagatttgggacagaagagatattttttgggattggaaatagctcgctctaaggaaggtatctctatttcacagagaaaatatgctttggagttacttgaagagtttggctttcttggttgtaaacctgtcccaacaccaatggagctgaaccttaagctaagtcaggaagatggtgccttacttctggatgcctcacattacagaaaactcattggaagattggtttatctcactgtgactcgaccagatatatgttttgcagtgaataaactcaatcagtatatgagtgctcctagggaaccacatttgatggctgcacgtcgcatcttacgttatttgaagaatgatccaggtcaaggtgtgttctatccagcctcttctactctgacttttcgtgcttttgctgatgctgattggagtaattgcccggagagtagcatatccatttctatagtttgtgtgtttcttggagattccttaatctcttggaaatccaagaaacaagatgctgttagtcgcagtttggctgaagctgagtacagaagcatggctagtgctatctttgcctgacacaatttttgtgtactatgacgatgagtctgcacttcacattgctaagaactcagtcttccatgagagtaccaagaacttccttcatgatattcatgtggtgcgagaaaaggttgctgttggttttatcaagactcttcatgttgatactgaacacaacattgttgatctgctcactaagcctctcacagcgcttcggttcaattatctactgtccaagatgggactgcatcacttgtactctccatcttgagggggagtatcaaatatgtattggtacaatgacccgatttaccggtttatctatttttgtcttggttttgtagattgtcaatgaagcatatttctaatctaaggaaaattttgttagatctaaaaagaatgaatggaatggtgagagagaaaaccgagattcattattttaaattcacgatgttttattagtttatttttgtcatcgatgatctctattattttttattacagctttagactttagttggacttaagcatataattaaattttaattgattatttttgttagactaaaatgacgatcgaatattaccattaattagtattaatcgaatttagtcaaaattttaattgtttattattcgttagacttcatattttgttaaccatggtatgattatttttatttttattttataaaaactataatatctctataaatattaattaaatacatttaataaactttattcaattgagtcgtggttgaacctggttgacccaatgatccgatgaccccgaaggtagtctattcatcgtcagggtttaaaaacatttatttctgctgtaaattctcctaaataatttttttaaacgttgactattaaatagttgcatatctactttacatatatatatatatatatatatatatatatatattaagaatatgtttgattcgtttaataacaagttttcttgatgtttttactatccatttaatacataagttcattctttttccaatgcaaatcttactatatgaagcttttttttttgtcaaacaagatcttcattcattcaatccttaaaagaggaaggttcatacacaaagacataagataatacaatgaaattaaagataggagctgcatgagttttccaaagagatatatacttttaaataagtttacaaggattgaaaaatctgttgaggccttagtggattcgccatgaagtcgggcttcgcgaaatccttgaccaccaaatggtcattaccagctcttgcaaacaatgcatccgagcttttgagaaggtgctccacggaagaggctgatgggttagtgacgttgaaaaagagatggtaaccaactctagaagacatggtcataatgccatacttttccaaacaaactgagggttgcaaattatccaagcaaaagattaaaacatgactaagcttgttaaatggtgtatgggtagatagagagttgtagaggcttcggtaacaccttctccgtagagacagggtcataatacagatactcttaactctaaaaagcaaatgactatagttaggtaaactagtcctggaaagggtccaaaggaaactaagtaacagatctcgacaaaagtacctatcaatccatcttactatatgaagcttagattttaatgttagtaacacggatgatcgctagatgtatcattgcttataaaattttcaaaaaaatataaaatttatagtaaattatgcaaacatggcaaaatcttttatccatagatttgaatgtgttgcaataatgttagtgactaactttgtaatagtcacaagagttgatacatcaagaataaatcagataaatatgaaaacagtcgttttgcgagggaagtaatccctcgcaaatttgcgagggaattgcaggcatttttctagaacacggacgcacgttgcaaatccctcgcaaatcttgcgagagactgtttcctcacaaatttgcgaggaaagtacgagtactttgcaatgaacaatatcaaccctcgcaaaccacccgcaaaaatctcgcaaatctttaccctaaaccctaaaatacatagaagttatttgagatctttgattttcatctataaatgtaaatctaaatgactgtataatcatacaagtggattatatggtgatgcacaaaaacatattatatatatttcaatattaacatttcattttgaaaatgttaaacacttatgattcaaattattgaaaacacataagttcattattgatgtatttggggaaaatgcacatttgaagtttttgagatgaaattagattctaatgtagatatttaacttcctaatgattcagaataacgaatccaaatgattttaagtagtgttttcttgtattttttcaaattgattcaacaatgcgaggtctttgcgagggatttgcaaggctatcgtagcacttccctcgcaaatatttaccctaaaccttaaattattaaaaatatttagtcatgtttttatttgctgagagtcttattcgaaaaaggagaatctaaatcagatatgattcaaacagtgaatcaaaatggtggagttaattggttgaaggattgggagggaattgctagacgcactcgcacttctctcgcaaatattaccctaaaccctaaattatttaaaatcaaaggttacgagggacttgctaggacatctcgcagttccctcgcagtatgtggtgcgttttaattggtttaaaagatcttcctcgcaatttcatagcaaactatacgagggttttgcgaggaaatatatatctatatatactcgaatcaaacacttcttcgtggaatatattacttttttactaagtaaactcttgtatatatatgttcctttgattcattgtcaaaatgtaagagaagaataaagcaataatagaactcttgtttggtctttactctctctagtctttattcttctttttagttaaatattttataacaagagttgaattaatcaatggtaaggttgtaaaatattacaaggaataccaagtgatcttaaaccgttgaaataactcttctcaatctcaaggatcatttatctcccaagatataattactaccactggttcataaaatctaatttgatcgtatatcaaactttcaatacttaaaacatttcagaaactataccttatattgaaaacaaacaaatatctttgtatcactccattccatcacaaacgtatatattttacatatgacaaatgaatcaccatatatagatgatgatatttattgaacagaaaatactgaaatagatacatatgtcctctatggacaatttcaattgtgtatataattcaaaaaggtcgttcactaagaatgacagacggatcatagctacaaatggcaaggaatccaccattattgcatttgactttggcacacccaagaaacaccgactttcgaaacaaaacctgcttataaccgtcacatgatttcccagcacgacatgtgtttgtagtataatcgtaatcagacttctggttaagaaaggtgctcacaaactcctcagctgagaagtcaataatatccgcttttatggtctccccgtagggcccacctgagagaaataaaccgcagtcgcgtctcttctcggcgtaggcttgagcataggcagtcagtgtctggctccacatcaagggactcacgcctacagaaactcgagcacggttgtgggcattgaagtagtcttgcggctggtcttgggctttcagaggaacagaaaaagatagtgcaagagcaatagccaagactaaaaggttaggataggagttaaacattttaattttttctgtagtggtttgtagagttaagaaacgatgatttatatagaaagaaggtgtgatactttaataataaactttcagaactttaattagaaatctattttttccactaaagatcacttgtagtattgtattgattatctcttttaccaagtcaactaggcgaagaggtcaaagagccgtcatattcacgatccattctaaaagaaaaattctataaagtatttttatgaaaatcgaaacatacttaatgaaacatctattgtattgtattttaatgaaattttatcttaagaaatatgtattaagagattggttcttccctggtcttttcaagtttttcttttttacttacaaataaaaccaactacaacaatgtgacaaatagaataaatctagagtatatatactaactagagtcaattagctggatagccaaattcgacacacaaattagcaaaatagccatgcggcagaaaactttaataaatagcctttttttggggtgtgaaataaccaaaataacctggaaagataggcgggaacacgtgagttccgacactaggtgtctatatgtagggaacataaacatacgtaggtaatgagtaacccgttttatttataaaacacacgccatttatatatgtttttgttcctgatgagccacataacttatagatttcaattaccgatgagaacataaacatgcgtagataatgagtaacccgctttatttataaaacacacgatatatatagatgtatttgttcatttttttttttaattctataaaccacataccttttagatttcatagatggaattgatatttaaacactaatttatatcactagatatgccaaaaacggaacgtatatatacagatgtttgctttgtatgcgattagttattcaatggagactaacaggtaaaagatcattggtaactgtaacatagaacgttatttaaaaacaacacatgtaattcctatatgcagacgcggtatgaaaacaatgggcgtgagttggaaattgtgtattgggcaatatactcgacaaagtatcaacttatagagatcatacattacatgcaatgtttcgctatatcagtaatcattagtatgcaacttgctacataatatggtcgccaaatcttatttgcgatttgacaatgtaaatctacccgtagaaaaatatttgatacgtatctattgcattaaatgcggcgaaagtgttataaacgggttccaatgttgcattgggggaaggggtgaaaacaattccaaaaacaacttgtttcgtataaatataacataagataaccactaagcatccaccagataaacgacacgtcgcgcatgacgtctacgataatgttaaaacacatgaattattgtggttatgcatgtaattcaaatacaattcagttatatgtttgatgcgacatttacacaagcgacggattccatagattagcagccattcgagagtatggagggaaatcataattattcaaaattatgtggcttaaaagcttgtaagcactgttgcggaaaaatatcttaaactactgtagccctaattggtagcgaaagtatcaacttgtagagatcatacattacatgaaatgtttggttataacagtaatcattagtatccaacttgctacataatcttatcggcacattttatttgcgatttgacaatataaagagtccgtaggaaaatatttgatacgtatccattgcattaaatacggcgagagtgttatatacgggtcccaatgttgcattgggggaaggggtggaacaaaggccagaaacaacatgtttcgtataaatataacaaaggagaaccactaaccatccaccagattgacgacatgtcgcacatgacgtatgtgctagtgttaaaaaacatgaattattgttgttatgcatgcaattttaatacaattcagttataagtttgatgacgactgcttccgtcgattagcagccttgcgagagtttagagggaaatcataattattcaaaattatgtggcttaaaagcttgtcagtatgttgcccaaaaatatcttagtatattgtagccctacttgttatcaagacattccctatataacaggagagatgaatagcatttaacgatcacaccacttcctctttgaaaaaatcaaaaggaacaagtatacaacaaaggagaaagacaagttacagcagtactaggtatgccattaatgatagatttgttttacagagtaccctgtaaaatagaacgttatataagaacaactcatgtaatttcttaatgtaaacgcagttatactgacgaatttgaaaacaataggcttgagttggaaattttgtattgggcttgatgttattcattcggttataagctcggcaaagtatcaatttataggtatcatacattacatgaaatgtttggttatatcagtaatcatcattatgcaacttgctacataattgggtcgacacattttatttgcgatttgacaaaatgaatagtccgttggaaaatattagatacgtatttactacattaaatgcggcaacaatgttatatactggttccaatgttgcatttggggaaggggtgaaagaaagtgtagaaacaacatgtttcttataagtataacaaaggaggacaacatgatgcgctctccagcgggtcaccattaacttctccactgagaatagagacagcattggtctacaaaaacaacaagtgaaacaacaacgttaaaaatgatatactggaaaaagcatgtctccattatattagtttttcactctatagaaagtagttcacatctggaaatttgaaagaaaaacatgaatttaagaagaaactagagagggattattgtcaatatgaaaatagaggacgcaagcaaccaatttaaaatcgttttcaattacataatactaaaccctaagataatatatagggaacccaatcaaccaattttatagatttttttgagaaaaatccaaaacatacaacagataaaaaacactgaaatttgaaagaaaaacatgaatttaagaggaaactagatagagattattgtcaatatgagaataaagaacacaagcaaccaatttaaaatcgttttcaattacataatactaaaccctaagataatatatagggaacccaagcaaccaattttatagatttttttgagaaaaatccagttttaattttgtatatatatgcatatatataaatgtgtatttgtgtagttatatcactggatccgaaaaccaactcaaacacatctcgatccctttttaaaggtataaaagtatggaatctaaaatgaaaatatagtatacagataaatcaatgactcaaaataacaagcatcattatataagaacattttatagaataaacatagcatgttatctatataaaacacatgagcaagctttaaataacatgcagaatatgaacaaacctcttcttctttttttaacctctaaacggacaaaaaagaatccacaaaatttgaagaaatttccagatctcgtcttatctaacttcatgtagagagattaagaaaaaattgagggttagtagagaataaatcaaaaagaaccaaaacttagatctggacacaatcggtaagaaccatatgcatgatacttatggaagtatacatgggaagaaatagaagaagacaacgataaataatcgaaaacccaggactgaacttacaagattcgttggcgaataccagattggagaggaggagaacgaattaaaacttctctcgcaaacggcgacgagaggaaaaaaaagattagcagctatataaaacacatacaaaaaagtataaaacaaatgcaaacaaatgaaataacagagtacttaatggcagaccaaaaggtataaaagcatgaaatttaaaatgaaaacatagtataaagagaaaccaatgagtcaaaataacaaacatcattatacaagaacacattatagagtagacataacatgttatctatataaaatacatgaaccaactataaataacatgcaaaatatgaacaaacctcttgtttttaaacaaaaaccctagacggacgaagcagaatccacatagtttgagaaaattcccagatctcgccttatctaacttcatgtagagagattaagaaaaaattgatggttagtagagaataaataaaaaagaatcaaaacttagatctggacacaaccggtaaaaaccctatgcaagatacttatggaagtatatatgggaagaaatagaagaagatagagataaaggggaaaaagaaccaaactttagatctggccacaatcgttaatttttatgcaattgaagtataaaggggaagaaatagaagaagatcggcgataaataaacgaaaatcaatggcttaccttactaaattcgccggcgaaaggagaatcataaattaatacttggattgctaacggtgacgagaacgagaagaaggtttgaaagagacaatcaagttctgggcttgattgaagaagatgagaaacgcaatcgccaacgacggcactaggttttgggaggatattttgcagtgtgaagaaaaaacacgatttttattttcacatagattactcttgatatgagagaatgaatataatgatagcttccgaatatttcaaatttcaaacccagaatcatacgctccccaaacagtgtcttgtcgctttgatgtctaaggttatacatgtaagaatacatgggtttccgacataactctgtagctcatggctatttccttaattctttttgaatccatggctatttagtgtatatactctactaactaacctttgacaacaaaagaataaagagaatagcctttaacgaatagtatgagagaaaaaaaaaacatttgcactttatttatgacacttttaccctaaataaaagtcaaaccttcgtttttccttcttccatctctttctctttctatttcttatttcgacaaattacatctctattttctaccattgtgccttattctttgatttctcaaaccatcatcaccttctccataaccacctccattacaacaaccaccacaagctctagtagatcatttgactatagccgttaacggtgttgtttttcatcaatttgggattcagtggttcaaccattgagctcttctgtttatttggtctatataggatttagctatttccgatatcgtttctttttagaatctgagatttgccttcaccctcaagagttcaaggtttcctttcaatgttatgttatcatttcatatatcatgttatttttatattaggcatgtaatttttctaaaaacattgtatttatttaaaatgatctgcaccttttaaataattcatgtcatctattgtaatcacgtatcttatctatacccatccgaacaataagatatgtttcttttgaataatgcatgttcattttaaattagacatgcattttctacaaatactttgtattattttaatagatctataccttttaaatatttcatgttctctactgtaatcttattcatacctatccaaacaataagatgtatttcttctgaataatgcatgttccttttataattgtcatgtatttttttaatagaacattaattcatttagatactgtgttttctgtaaataattcatgtcctttattcagattacataaattttctttcttccaaaactatcgataccaatgaactctgatttatcatcaccggcattattgtaaaaacaagaaaatagaaggatattttagtatttactcccctccaaaaagagttatttacctaagttttctaacacaaggctattctctcaattcttttcaatttcatggttactttgtaatattacccataaatctccgtcaaaaattattttcaattctcaattctctcaattcttttcaatttacaaattttccgtcaaaaattatttttccacccaaaagtttgttccgccaaaaaaaacaattcctcgccaaattttttatcccgtaacaaattgtttctcagcaaaaaaatacatttaaaaatctttgtaaaatttctaagaaccttttaagaactcttgaaccttttaaaaactcttaaaaacattataaagttttttaaaagctttgtaaagttgttaaaaacccttgtaaattattttaaaacctcttaaaatctttataaagtctttaaataaatatgtaaatactttaaaactccttgatatacctcaattttcactgcttttagctatgatttagttacagtttttagcaatgtttttaaacccgacccagacagtgaaccggattaccttatgggttactgggtcatcgggtcaagcaggttagaccacgtgtcaattgattaaaatttctttaataatttaatattaatagagttcaactctcaatgaaagcagattattatgtattttgaaaatcggtctactaccccccccctttcaaaaccactcgctcaaaaattcctctcaaacactataatcgagacaattactttcaccatgttttctgacgccggtagagtttttgctcgccggcgtcgagatattgtttgcttttctcaatcctttcgcaacctttctcgattcttacttcatttgtttataatcttttaccatccttcactcctttcaccttgcttccatggtgttcctttgtaccgcgataacattaatagaggttttccggcgaaccctgtatccctcataaggcccgtgaactcagtgaaggaggaaccgatgtccagtcactctccaaatgctaaatttgagagttgtctcccgaaaatctctagatctctgaaatctagaactttcgcaatcctcgtcgctcattacctctaccggatcccctcgaagacaaatctgtcatctccttcttccttgatggaatggagagctgatttgacgctgaaaccagtgatgatgattttaacggcggaagtattaatcttaaacctaaccaagccgtgttgctctttcattgcctcatatccgtacacatgcggcggcatcaacaacatctccccaactgaagcaaccctaggtttcagcttgttgggcctttcgaattgttgcagcccatcttccctgtctcggcccacttccacaaatctcagcctatctcataatcacagcagcccaggttgatttattttatttcctcaccaaatccatctataagattatgtcgtttttacggtttgagcagccatggactcttctctctccctgaagcgactctctgtatttggctctgcgagtattccttacaaaccatgttgttgaactcccttctggctaaaggcaatgaaaccgaatcaatccagcggccacactctaattcaaaccagcggccacacctaagagatgtgtttcttcttgttttgcttccaccctctcgaaccatagctaagctttctcaacaaactttcaaaatcttatttagaactgcactcttacttgacctcgagggtctttggcgtccaagcatctccgtcatggaaagaacctcggctccgccttcctcctatatggtgagaacctcggttccaccttcttcctttacggagaagaaccgaacaatatccttagttgttccactgatgtccgtgtcggtgttcggtaaggctaagtatccttttccaaagtcacaagatctgatgataatgactatttctaaaattcccgaacaattcgcggaagtgttctcgacacaccatgatctcgtttgtggtttgttgctagctagcttctgtctccgagtttctacggatatatccttaaagccctttgtttatgttatctttcttatcaatgttgtaaatctttgctcaaaaactttgtatctttttcccctttggaggttgaatgtgaaacatcccgacccattttttttaaacataattaaatattcccataaatatctaattaaaccaaccaataaagcaacaattaaactgcaagtcaaaaatactattttatgaataaacaaataattcaaccaacaaaaccaagaatgactaaaaatcctaacacaaccctaaccggttccaataaccaaaacataaaagtaaaccaaacgagttcctagatcatcctctcttccttgccatgattttacgatcacactttatctttacctgcatcaacaatacaatgagatgcgtaagtattatcataaatacttagtgaggcgattctcccatctacgagctatacacacaagcaaataaaagggtataatcacaaatacaacacaaacaaaccagtcatcgaataattcactcaaaacacatttaccacacctacatatcatcacacaaaacaaaacatacaacccaatcgctcagataagctcatggtcacgcactcaccttaacaaaattattctaacaacaattaaacccaggagagactctccttgcgtctgaaacagtccagaaacgtcctacaacatgtcacaaccaaaagcaacctttgaagcaaactgtacatgaaaaacagaaacaaacagtcttaaagacgaaacccttatgaccaactcccggtcatctcgtaaacacacctctttcttaggttgtttactcaaactttccaaaaatagacaagtcctttctgggaaactttccatttttgagaaccgcacaacacattcttaaataagacaactcaagtcaaatctaagaaaaaaaaatattcatcttataaatcatcagatgtcatgatcgttacaacttcaaacgaaaatacaaatgaaagagaaataagaacaacaactcaaaagatcaaaaactcaacatcactataactggaaaccaaggataggcaaactcatgcagcaaccttcttctcgaaccacttcttgaaccttgccttcaacctcgcctctggctcccaagtctcctctgtcacaccatcgcagttccgcaggactttgatcaaaggaatcttcttccgccgaagttccttgatcctcctctcgagaaccctcactggtctcgcctccaaagtcatgttgggctgaagatcctctggaatcttagccaacacctcatcatccttgtgaagacacttcctcagcatcgacacatgaaagaccttgtgaaacgcacgcataacatctgacaactctaacctgaatgccactggtcccaccctctcaacaatcctgaatggacccatgtacctcagactcaacttagtctctgagatagacctgttcggacctcgcaacatggccatcttgagatacactgtccccaacctcaaactcaagctctttcctcctcttgtcagcataactccgttgtcggttctgagcttccttcatgttcagcttcagaacccggatcctctccgtgatctcctgaacataatctgcaccatatatgctcctctcccccacttgggtccagcataatgtcctgcatggcctcccgtacaacacctcgaaaggagccatcccaatactcgcctgatagctgttgttataagcaaactctaccaaactcaagtgatccgcccaatgacctctccaatccaagacacacatccgcaacatatcctcaagcgtctgaatagtcctctcagattgcccatctgtctgaggatgataagccgtgctcatctgcaccttagtgcccatctctgcctgaaaggctctccaaaaagcagaagtaaacttggaatccctgtctgacacaatactcacaggtactccatgcaacttcacaatctcgctcacatatttcttagccaacaccgccgctccatcggtttttctgatggccaaaaaatgtgctgacttagtcagacggtccacgatcacccaaatagcatctttggtccgcgacacaggcaacccaaccacgaaatccatcgtgataaaatcccacttccactcaggaatgggtaaactctgcaacaggctacccgacacctgatgctcaatcttaactaactggcaaacatcgcactcttcgacccaattacctacatccctcttcatcccgacccactgatagtaccgcttgaggtctcggtacatcttagtcgctcctggatgaatggaaaacatgctcgcatgagcctcactcaagatctcctgtcgcaactccttatccttaggcacacaaactcgcccatgcacaaggatagttccattagctgcgaactgatactcaaagccctctgccttagaagccgcaatcaacccctcatccttctcttgagctaactgaactctactcagaagatctgtttgatccacagcttccaatcccaatggctcccgtgccacagcacacaaccgcaaagcaccaatctcaatcaccaaggtctcaacactctgccctggagccgcacccacgcgcttacgactcaaagcgtctgtaaccacattagccttaccaggatggtaggctatctccagatcataatcagccaccagcttcatccatcgcctcagcctcaggttcagctctagctgagtgaagatatacttcaaactcttatgatctgtgaacacctacacattcccgccataaagataagacctccaaatattcgaggcaaagatcactgcagccatctccaaatcgtgagtgggatagttgccctcatgtttcttcaactgccgcgatccataggcaataaccttcccacgctgcatcagaacacaacccaaaccaactctcgagtcattaaacccagaagagactctccttaacaaaattattctaacaacgattaaagccaggagagactctccttgcgtctgaaacagtccagaaacgtcctacaacatgtcacaaccaaaagtaacctttgaagcaaactgtacataaaaaacaaaaacaaacagtctcaaagatgaaaccctaaaatacacactaactgttaattattaaatccctccgatgaaacgctagccttagacgtcgcaaagcttcccacaaaaattcgtgccgatcggaagccagatgagactacgatcgcagttacaatccccgctggtcctaattcgcgtctgagaaaacgtgtctcacaaaactgcgaataactcaaccaattgtaatccaaaatcacttctgtaaactggagagtaacaataaaagacttggaaataaccctaccaaatttcgttacctttgacagtgattttatatgtcgaaaacgtttcctcccaaaccctaacgattctggttcttctccttctctgactttttctcctttataaaacgaaaagtggataactaaagccctaatttcgagtttatttcttttataggcacactatagagttttcaattaacccaaccgattaaaccggatgatttaaatacaaaccctaaccaattttccggttcacgggcgttatagaatgaatgaaaacatgttttgcacacaaaaaaaaaagagttcttataatttaaaaacaaaaataatcataacatgtttataaaatataaaatcagattatgtttaataaatataaaatcctttataccaaacaataataataaagtgattaaattttgtaaatctaactaaatgtctaataccgtaacaaatatattagaagatcaccaatgacggaaataaattaataaaacatcgtgaattcacacaactaatatcgggtgtctcactcaccattcgattcattttttaaggcggcattgtgaagtcttcatcaaaatctaaaacatcaaatgagtttaagaactgaaaacatttctacaaatgattgaataaagtcttaaatctcatattttattccaaaatcaagagaatttttaaaacccacacccgtccggtttaaccgagtcacgggttaatggtgagtttttgtgggtttttacggttttgaacttgtcaggttttagcactaaacccaaaccaaaaaaatgttcgggtcacggttcaaccggtcggaccgggcataaaaatactggtttttagagtttttttgttatttctagactcttttatagtctttttcaggtctttacatgtttgggatgcattttgagattatggaacattctggatcaaaacagagaacttatgatgcaaaagcaatttggagacgtaaatttgcgtaggtgtcaatcgacaccacccctagtgtcaagggacaccaaaatactggattttagagattctcaatagagaattagtagatcgaaaactttattaggataatgacttcatttatgaaattattattatcttctattttttagattttttgtaaaatggaaaaaacaatatatgaaaattaaagaagatttgaaaatatagaaagttttctaaatattttgtcactaaataatataaaaagtatctacatataaatttctattttattaaatttgtaaaaaaataaaataattgattattaatctctccaaatttattagtacttcatctttaagtacgatagccatttaatcacaatacctatctcattgaatgatatttttaaaatttacgattcttatattaatttttttttataaaaatgtaaaataagaaaatatattgaagaaagatgtatttaaatttagttatccatatatacatttttagtaagtattctgggttgaaaaatccttagtcaacttcctaattatatgtttagtccttacaaatttaatgaaacaagatatccctttattattaaaagggaagtacaaattgaaattttgtctaatttggcctcaattttgatttcaaatttggattttattctttgctattcaaaatcattaagggtaatttggtcttaacaatctcctaaactttatatgatccgattcaatctaaaccattcaataaaattaattcccttcaatctaaaccgttcaacaaaaataaggaatctatgtcgtttttgaaatcaaaatataatcacattccatccctaaaaacactatattcaatcacaaaatcaataattaataatatctaaatcatatattacgattcttcactaatcactagaaatttatatttataagtttaggatatcaaatttattcaaatatttagtataagaaccaaataaaccgattgcccgcggtaaaccgcgtgttaaaacctagttctcattaggacaatgaacaaatttttcatcaacaattcaaatattgcattaatttcttactaaaatggatattattaagtagtactaaaaactattgcataatcacttccttaaatcttgacaaaattcattaatgattaattcctaattagttaaagtaccaataaatttcccttggccatcaagatatgattgacctaatcgtgtagaacctatatatactctttaaatttacatctcattatatcatcaaaaacacagatcaattgatttctaaacccaccaaacatactttcttcctcagctggccgaatcatttgcaagattatttgaaaggaactcgtaccgttttataacgatttataaatactaacaacgaatttaattgccaggaactatgtaaacaaagaattaaatctagatcataaagtttgtatatacctgaatatggtacaacagaaatatgaaccatgttaattcgaggttattttagcaccccaagtgttgtgcctctactggtatccacatgcatacaaactggatcaaacctggaatgctagttcctttgaaatctaatctcaaaacttagaaaaacaatttgcctctttgtttttagggttttatcaaaacggctgatctcaaaagtcataatgcatcacttttataatagcttcacgtaacgtaacgcatataaagtcaatgggcgaagcccaatccatgcaacgtgactttgtctacgagaataaacaacatattagtattagtgcacatatgtatatcttatatatatataacattatttatttaagtgctcaaatacaaatataagtatatctatatatcatatatatattatatacttttactttaatttatatatcatatatatatatataataaatcttttaacccaatattagttaatcaaaattaaactcaattttatatttgattcaatttgtttaggtgtgtgatcctgtaggttcgtataatattagcaatgaattataaactcatagattataagcgctctctagcaaaacattataaccacctaatattatgtgattgtcaaacctcgacattacaactttacctagaataaagtacaaacgatttcaggactttcccaacaatctcccacttgtactggaatcatttattcccataatccctttgtctctatatctcgatctcagcataaggaaaaaaattgtcatccttattcggctagatcatgtttatcgaacttcgatttatactgataaaacaaacgactgacattcacctcgtttgagtgcagccacgcatttttcagtatcaaatttttgataggcccaaagatatttatctcccgttatatgggaggaacaaatcccatcttgttccatccatgttccttaaacaattcataacgcgcccaatcactgtctttataatcaccttttacggctgacgtttgacagagtcaaagcgaactaatccatgaataagaaatcatgacgaactcaggtcaaaggactatactctatagttgtaatgagaaactcttatgacattcatataacaatcttgtagagttctcataacgggtcagtccaatattgtgttctctaacacatatctatgttattgactttaataccacatattaatgactccatgaaacttagtcatcagtcacctcacatactagtcattcttagttattaatgtcccattttaataaccttgactagggacttcaacaattcatgtcattttccacttacagggtttcatgatcaagtcacgtacttgatgacctataagaatgatatatattatttgggactattatttaattatcaaataaataaataatactcaaacaaatttcattaatttgaaaacaaatccaaatgtattttaatatgaacatcatatcataaaagaaaaacctcccactagaaataagatcacatctttataaatctaatgccaatcacagtcgtatgactctcatgcttcggctgcggaagaggttttgtaaaaggatcagtaacatttgcatccgttgaaactctgctaatcttcacatcacctctatcaataatctcacgaatgaggtgatatcgcctttgtatgtgtttggatttctggtgtgatctacgttcttttgtttgcgcgatggcaccattgttatcacagtaaagatcaatgaggccaggaatattaggaaccacactaagttcagtaatgaacttcctaatccaaacagcctccttaactgcttttgaagcagcaacttcagttatagagtctgccacagtgctctgtttggaactcttccaactcacgactcctccgttgagacaaaagacaaatcctaattgagataaaaaaatcatctttgtctgtctgaaagctggcatcactataaccactcacaacaagttcctcacttcctccatagaccaaacacttatccttagttcttctcaagtacttatggatgttcttgactactatccaataactttcacctggatcagattgtatctgctcgtcatgctccaagcacatgcaacatctgggagagtgcaaagcatagcatacatgatagatcctatagtagaagcatatggaatcttactcatccgctctcgctcatcatgcgtcgaaggacgctgagtcttgctaagagttatgccatgagacattggtataaagtctttcttagaatcatgcatattgaacgtgtgcaagaccttatctatataagtatcctgacttagtccaattactttgtttaatctatctttatagattcttattccaagaatataggcagcttcacccatgtcttctcaatacttaccaagtcttaacagactgaagcaaaggaatgtcatttccgaggagcagtatgtcatctacatacaatactagaaatgcgactgcgctcccactagtcttcttgtaaacacaaggttcttcttcgtttctaatgaaatcaaactctttgattgcctcattaaaacgaacattccaactctgagatgtttgcttcaatccataaatggaacgatgaagcttgcataccttcctagcagcctcaagaatagtgaaaccttcaggttgtgtcatgtacacatcctcttcaagatttccattaaggaaagctgttttcacatccacttgtcaaatctcataatcataatgagcagcagttgctaggagaatccgaatggacataagcattgcgactagagaataggtttcatcataatcaataccatgaatttgcttataacctttcgcaaccagtctagctttgtatatctgtatattaaaatccatgtcaattttcttcttaaaaatctatttacactctatggcttttacaccatcagataaagcaactaaagtccatactttgttttgtgacatggattccattttggattttgcggcctctaaccacttatcggaatcggggtccatcagtgcttcttcgtatgacgtaggctcatcactctctataataaatagagtatgatcatccgtcacccaatcttcgaatctatcgggttcgtgacggctcctttcggacctacgtacctcaggttccacatgtataggttctacgactctttgtagatccaacgtatgttcttcctgagaagttggaacatcaccatgtggttctcaaacttcttcgagtaatacttgactctcactagttccttttgaaagaaactctctttccaaaaggcaccatttcgagcaacaaacactttgttatcagtagggtggtaaaagtaataacctttggtctctttcggataacctacgaaataacacttatcagatttgggtccaagcttatcagtaatcaatcgtttgacataagcttcacagcccaaaattttcagaaaagataaattaggaacctttccagtccatatctcatatggtgtcttctcaactgattttgatggacatctgttgagcataaacacatacgtttctagtgcatatccccaaaaagatgatggaagatctgtgtgactcatcattgatcgaaccatatccaataaagtttgatttctcctttcagacacaccattcccttgtggtgttcccggaggagtgagctgtgaaacaattccacactctctgagatgatcactaaaaacttggctcaaatattctcctccacgatctgatcgtagagctttgattgatttgccaagtttattttttacttcattttggaactccttggacttttcaaaggattccaatttatgtttcattagataaacataaccatatctattgaagtcatcagtaaatgtaatgaagtactgatagtttcctctagcacttgttctcattggcccacatcatctgtatgtataaggcccaataagtcactagtcctttcactgtgtccagtaaacggtgctttagtcatttttcccaacaaacaagattcacatgtctcataagattcataatcaaatgagttcaaaagtccatcactatgaagcttttgaatgtgtttctcatttatatggccaaaacgacaatgctagagaaaagttggattcaagtgatttaacttaaatctcttggtgcgaatgttatagattggcatgctttggtttagaacatagagctcattctctaatggagcgctaccataaaacatatcatttcgatcaaatgaacaacatttgttcttgatcaaaaagtgaaaaccttccatgtccaaacatgaaacggagatgatattcttgtttatagcatgaacatagtagcagttcttaagctccaaaaccatgcctgaaggaaaagacaaggaatatgttcccacgaccaatgtagagactcttgctccattagccatacgtaggtccacttgtccttcctccatagttatactgttgtttatgccatgcatatttacacaaatgtgagcaccacagccggtatccaattcccaaggagtaaaaccagaagtagtaacatttacttctataacatagatacccgaagaagaaatcttgaacgttttattcttctccagattttccaagtgttcaagagggtttgatccattcaatttgtccttctcaaagacatctcgaactgaatataaactttgagggtttgacataactgtcgaaaaagaaaagcataaattaatatgatgttcataaattttagaattctcaacaattaaaaaaactaacactatactcaaaacaaatttcctctaatgagtacaatgatccaagatccatatttcactagaatccaagtgagttttggctccaccctcaaaatatctagttatttaggtaagcaactccttgctaattatatctaatataattcttggttgtggatgatatcttatgtattatccaactctatgtctcttagcccaaaaccgttttgatagcttagtcaagtaaaccagttttatttcatatggtaaccgttaccatctgtctcactcttaaacaattacagagcgctgctttggcagatccaccatacaacaatccaagttttaacaattaataaaattggaggggggacatcaacttacttgatattagatgagtattaattttataaatccattttatatttaaatttatatccaatagaaataaagtataaataatacatatccaatatatatttaattaaattataaaccatctaattaattttaatcaaattaaaattattaattatttaaaatttaatcttgattaaactttagtaactctaatcaaattagaatatattataactaaacttatcctaatcaaattaggatctatctaatattgactttttctttttaaaagaccataaatcataagtcaatatattataatcataattatgctaacaaaatgtttcataaggaactattccaaatcaaaatcgtatatttactataattctacatatacatcccatctacgagattttatatgtatatgtgaatataatataattaagtagatatcatatatcaattgattaataccgaaacatgttgacctgaataaattaatcaaatacacagcaaaacaactatggttaaaaaatacccattatcatcaatgaaggcgtgaacgtgtaacgaaacaaaagtcatcgatttcgtttgtggataaccatatcaattatttatttgtactcgtactcaaataaccattaacaaaagcgaatagagacatatatgttctctatcatatcaatttaattagtatttatttgtatctaatgtacagaaacgagttctagttatcaattaagaaattcactaaatcttaacatcgtaatctaattatgataaacgaacaagttcaagtgaattgtataattttgttcttctatgctttactaattaaatttcataaatttaaacaagttaaaaacaaattacaattattcatctatatcaaaatatggattaaactagattcaaattcaatattaaaaacataggctttgataccattgaaaggaatttgtaccgttttataacgatttataaatactaacaacaaattcaattgcaaggaactgtgtaaacaaagaattaaatgtagatcatatgatttgaatatacatggatattatgcagcggaaatatgaatcatattaattcgaggttggtttagcactccaagtattgtgcctctactggtatccacacgcatacaaactggatcaaacccagaatggtagttcctttgagatctaatctcaaaacttaaaaaaacaatttttctctttgtttttaagagaatgttacactctaaggcacttttttaaaaacatttccgtgattaggcactttctaaagagaaggcactttgaatgaataatttgactcatttaccctttaatcagatatcgctctatctctctttatcctatcctttctctctctttctcttactttctccaaaaataaacaaaaatcaagccaaaaaaatagatttctttcctttttctttcttccctcttcaacaaatcatcagcttttatgagaaagagagattgagattcagctttttaaattttccgcgtctgttttgatctgatttgaaggagaattttttcagaccatcaatttgagaatctgtcctatctggctgatttggttacatgactcgttgaatgcttgaattggatttggggtttggttttcgttttatgtttttgctgtttgttgcaaaattaatctgattacttgctctttgatttctttgtcttgcttctccaatttcatattcgagattattctcttgaattggagattaaagcctcgtagtggacttcgaatcgtttgatagcaatggttgaatcactaattgatggaactcgttgcttagttcatgttctgtgaatttgattcatgattatatttgggttgtatcttttcagaaagtctggttttcttatgtgttcatcataaaaggtttataagttttttgatggttgattcacttattgaagaacattgttgctagtgaaattgatggaggttttagcttagatctgagactaattttcattcacagatgttagattgatttctacgtttgtgtttaagatataaatgttaaaaaattggtgcaaaatcgagaagatcatcttaactgagttaaatgaacagacctttgtggacaacgatttttggacacgttcttctttacctttttcatctcaaaatccaatcgagaagatcatcttaacagagttaaatgaacagacctatgtggacaacgacttctggacacgttcttcccttgaatttttgatcatctatgttatattttgagatgttttgtatataaaatcaaacttggacttgtattttaaaacttcaaaatccaattgagaagatcatcttaacagagttaaatgaacagacctctgtggacaacgatttatggacacgttcttctttacctttttatctcaaaattcaatcgagaagatcatcttaacagagttaaatgaacatacctatgtggacaacgatttctggacacattcttcccttgaatttatgatcatttatataatattttgagatgttttgtatataaaatcaaacttggacttgtattttaaaactttaaaatccaatcgagaagatcgtcttaacaaagttaaatgaacaaacctctgtggacacttctgtggacagcgatttctggacacgttcttctttacctttttatctcagtttacttgaacttgtctctaagttttttgctgtcaaattctatggctattgaaaaggaatggccctgttttttttgtaatcactacatcagcgatcgacaactgaaattttttaacttacttgcatgtaatgtatgtggagactaacatcatcattctcgtgaaaagagtcgcagcgactataaaagtggtcgccgtttagtctagtgatgccgacgacaactacatctcttgtaaaagtggtacaccattactatttcttcttcgtttcttttgctgtaaaagtggattgacgatgtgagctttgtttgtatctactatttctaatcgaaagagagggaacgaccataattgatgattttgaaagagggaatgaaaatgatgaaaaacaaaagaacatggaagagagacgataaactaagaatagtttctcaatcacacgttcttatccggagtaagcgaggagtgtttcattataaattattttaaataattaagataataaatgtttttgatcgttcagttaaggggtaaaaaagtctaatttttgtttaaatagaaggaaaagtgcctcatctctgaaaagtgcctcaaaaggaataaaattctttaaaagtgcctaaatgtatcacattcccttgtttttatgggttgaagataatttatcaaatttttagagaacataaccttaataaccgtaactgtggtcatgcctacatttaaaacatattaattatgccaaaatagacataccatcatcagtcgttaaaacaatttgataaattatcttcgactttctttctcttctctcttaatccttcagagagagaaagtctccgatggttgtttttggtggcaacgacatgtttcttcacttgcgttggctctcatatgcccagcacagttggttacctcaacgacggtgactggttttctcgtccgatttcggtggattcatctccgccgttggtcggctcccgtccggaattgtctggctcacatagtagagatgcccggctttcgtccagcaccgtcgcgtttccatggtggcatgtggctggctttctcctacgcatcctctttcctttgtttatctgtgtttttacttttgtttgcttttaataatctcacatacatgggttggtaatgacagtgtaagtaatctagctttctagtgttatgttccgatctatttcatgttgagacttgattgcagaaatcaaatcagagatctgagaattatgatgaagataagaagtggaatccgtcgcttattaatcattgccaatttgctgatgtatctttaattggagcctctttactatctaccagtgagaaacccttaagaatccatgttagatagtcctatcgacagtgattctgtccctggaactgaagctccgacggtggaggttgaagtcggttcgcttaagattgctcatctgacacgtggttatgtcgacgtgtgtttcaggattgagtcaaatccagttttcttcttctgtgagcaagatgaaatcttctgatgggcctatttgggcaaaaaaacattctgtaatcttaaggattcaaaaacggctgcatctcaaaagttataatgcaccacttttataataggttcacacaacctaatgcatataaagtcaatgggccaagcccaatccatgcaacatgactttctctacaagaataaaccacatattcgtattagtgcacatatgtatattttatatacatatataacattatttatttaagtgctcaaatacaaatataagtatatctatatatcatatatatattataaacttttattttaatttatatatcatatatatataatagaaatcttttaacctaatattagtttaatcaaaattaaacttaattttatatttgatccaatttgtttaggtgtctgccatgtaggttcgtataatattaacaatgaattataaactcatagattataagcggtctctagcaaactattataaccatctaatattatgcgaatgtcaaacctcgacattacaactttaactagagtaaagtacaaacgattttaagatattcccaacattatttaggtttgatgatgtgtacaatgtcttgagttgtgtgtgtgtggattggtagattccttgatagtttttcccttttcctcttggcttatttgttttataggtgtcttctttgtatcgcacatgtacgtgctgatgggcggtagaatctatcttggcactgaagaaaaaatacgattaggaagttttacggtaagactaagaagcccttttgatgccattgtgttttttttattagtgggttaatcttacaacatggctttggctaagtgcaagtgttatattaccgttacttgagagacttcatatcaactttgttgacttattggatgaaagcttgtggtatctgaatccaaaagccatcacctaaaatcagtgtgacattgaaggtagcagatttatgaatcgcattgacttggaaagagaagacgaatgcgcgatttgcttagagccttgcaccaaaatggtgttgccaaacttttgagaagacaaagaagatgaagaacacaccaacatcactttgcgctggtgagtgagagagtgagacatagagaaagagatcgagattgttctgttcaaaaagcagtggccgaccagagagaaaaggaccggtttggtctggtttagttcctatgaataattccttacgaaggtcaatttgttaaatgactaggatatgacccgcagtataccgcgggttaaatattttatttatttttctttatcataaaatataatttattatttgttgttgtttgtgttgattaataattatcgataaagttgtgtatgctttttattgagtcataattatgatattagtaagtctaatatgtattattttatcttctacgatttgacttgtgatatatcataccaagggataatattttattttttaattataatttgttttagaaaaaattatataatttaaacttttggtgttttcagattttaccagtggaacatatgtaatttagtaacatacaaataaaattatacatttaaatgtatcaaagaagaataacatttagaggtgtcaaagaagattaacacttatactataatgttgaattttaatgtattttttataactaaaaatttaaatacgaattgtatttgttatgttattattgttggttttgtttagtattgtacagttgcaatttgatttaattctaggaatacacccgtggtatccaaatctgtcccatctaaactcatagcaccatataaactcgtctcatccaaactcgcctactatgtaaacccgtctcatctaaattcattccgccatataaatctgtcccgtgataattaaaaatcaaattgttctttttctttttaataatatttttatttaagatatttcgagtcaatttacaatttcaatataataagaaaattatatactatttatatctagattttatatcgaattctttgaacaaaagaaacaaaatttcttgttaaatattttgtatcttttaaattaatatatttcttacttgtatttgttttatcttcaatatatttggttttgatatattttagaaaacctgttcaaataattgttaaaatttgaagcccataaatatttatgtgatattttataatttaaagatatatatatatatatatatatattgtttagatttgttgttgagatatttttagtgtctatttttgtttaaagatatatatatatatatatatatattatatatatatttttattttgttcagaaaagagcaaatatgtatttcaaaaatgttaagtagataaaataagattgttaagtagataaacaaaataaaattatttttgtaagttggtattataattttttcaattataaattttgaaagtattattagattgacaaatagtgtaaatatgtgtaatgtatatgtgacgcttagggttctaatgaggattaaagtattacatgaccatcaaggccaagttagctaaatagtccaacaccatacaacataagaatccaatttgaataaagaaaacccacctaaagattaattaaaagaagtgaagtcgtacccaaaaccgtcccacaatataacctcgtcctgtgaaattaaacataattttgtcattttcttgtaaatttcaaatatttataaaatttgaaacttcaaaagaaatttaatattgacccaaactttaccattgaattttgattgttatatctagacttctcccgtaatatatcgtcccgtattaatatatatttttatatatttataatgtttaaatttcttgtaaaattcaatttataatttagaaaacttcataagttttaaaattataaatatttaaagctaaactttataaaaagtttgtaaaattagaaaatataacttttgataaagttaaaatatttataatttttgaaactttgtaaagtttctattctttaaaatcaagaacccgagtaaaccggataaccactttaattttggacgcctgataaatcaagcttcctgcttattcttaaccggaataatttatagtatagctctgaaccaatgtccaattttttaagcaatgtgggacattgtacacatattattttttcatgaattgaataatatatgttcgtttaaaaaaatttgaattacatcatatacagaaaaaaatatactattttattaactatttttattttatataaattcaaaataaattaaatataagatcaaataaatttgaaagaagaatcatatatttatgtttaaattaggtaaagatgttttaggaaattagttaaggtaaataacaaatatggttagtttagagatattatatatattaaatttggtaattaaattaatttcgtttataattatttttttggtagaaattggtaataaaaaccaattttggaagatccgattaaagattttcggatcaatattgaataaaaaatcagacccaattggattccttaaaatgtgtttcaaaaatgttgagtagatttaactatgaaatcttattggataaataactttgagtaacataaaatattgttcaaacaacaaaaagggcaaatattttcagataaattgaaaataaaaacatgtgtaaccaaacgggcggtctatgacggaccttgcttatgttcattccgaggcggtccggtctgccaaagaccgcagacgaaaaaacgaagcccatacccgccccgcaatgcccattgggctaacaggccagcccgcggtcatgatcttcagcttcctctgttttgttttttttccttgtggcctgggcataatacccggaaccgaatatccgaaccgaaaaacccgaaaaataaccgaaccgaacccgaatccgatttttagaattacccaaatgggtcctcgacctcactacccgaaaaaacctgaaccgaatctaatacccgtgggtacccgaatacaaatgtaacctaaatatgttagttatatatatatttgtaatacctcaaacacccaaaattaaaattataaatccgattaaactagatgtttttagtaattcatatacatttggatatatttgggataaaagtaacaaatgttatagttttcttttaggtaatttaagtattttggttacatttggttatatttgtataaaaagtaaccaatatatttacgggtaatcgggtatttcagatagatttgggtatatatgagtaaaaaacccgaatccaacccgaacccaaaaatattttgggtatttttggttatttttatatttttactaaaataaccgaaccgaccctaacctgaaccgaaaccgaaccgaatttttagaatacccgaatggttctcaacctcctacccgaatagacccgatacccggaaaaaaagaaccgaacccgaacgggtacccgaatgcccacgcctagctgaaagactgaaacataaactaaagtattaaactgaaagctgaaagtctgaaacataaactaaagtattaaactgaaactgaaagtctgaaacataaactaaagtattaaactgaaactgaaagtgtgaaacataaactaaagtattaaactgaaactgaaagtctgaaacataaactaaagtattaaactgaaagctgaaagtctgaaacataaactaaagtattaaacagaaagctgaaagtctgaaacataaacttaagtattaaactgaaactgactgatacataaactaaatattaaactgaaagtctgaaacataaactaaagtattaaactaaaagctgaaagtctgaaacataaactaaagtattaaactgaaaatctgaaacataacctaaagtgttaaactgaatgctgaaaacatgaatctcaaactcaactcaagatgtgtcttcaatcttcatcaatatcaagaatcgtcggcatcgtggtcaacaattgactcaaaagtacgcactttctcatcttcaagttcaccatatacttcagcctcctctacatatgtcccataaaaataacaaaatcaatgcatgatttataattctgtaagtgcaaaaattatgaaaattttttgcttagcattttcatatgcttcaaaaccttttaaccaattgcggctgcatattagtgcttgaacatgtttcggtagaagagggcttctatacttgttcaaaactctagctccaatactaaaagaggattcagaggctactgttatgattggaatactaaggaggtcataagccatgaacgccaatgcaccatagcgttggtgttatctttccaatagttcaaaatatccaaactctcaaaatctattgtttccaatggcggtccaaaacatatccaaagaagactttacactactaacaatagtttctttgcggaaagcaaaaaaatcttgcgagattatttaccaatttcagccaaaaaaacaataaagaaacaattaactaaaaccacactaaaaattggaataaacgtttctttagacgatgatgtgaaaatggacttattctcatatgattcaaacaaagttgtcaacttagtatgtaaattttctatctttgtcttagcatcactcttacccagctttgcaaaacaatattatacaagtgaattagcttgaaccgtggatcaaacaccgtagtcattgcaaagacatcaccaacttcttcccaatacttatcaaatctatctctcattgggacaataatttttctaatgatttcatcttgattactcgtatttgataccaatcagtcattgatcttccaaacttgcatgaaatacaagttttaagttggatatgaagaaccagaaattcagattagtgatcacattaaaaggctctaaaaattcacaaacttgctttaatcagtgccattcttcttatgtagggagagaattgtagttcctcgcatcaatgactttgagattagtaaagccagctcgatacttgagagctctatcaagcatcttgtatgtcgaattccacctagttgtcacatccaaaatcaaacccgccttaaccttaatttataccaacaggttccacacattttgtaagcaatatctcacgtttttagaagctttcacaaatttgatactctctctgatcttatgcaacgtatgccctatgtctttcaaccctatctgaacaatgatattgagaatatgtgcagcacatctcacatgaacatattctcctttacataacaaatcattctgtaacataagctgagatttcagaatctcttgtattttgtcattgttagcagcattgtctaacatgatggagaacactttttctcaattccccaatcctgccacttctgtagaatcaccatggctatgctcatccatgtatgtggaggcttgaaagcaaaaaacgcaatcatcttattgtttaatttccagtttctgtcaatgtaatgagctgtcagacacatgtagccttcttgagtagttgcagtctacaaatcagaagtgaaactaatcctgccaggaagctgagctaattctctctataaattccctgtctcattctcatacaacttcaaaacgtcagctacagttgtgttccgagtaataaacttcacatctgcgttcaaatatttccacactgatctaactttctcatattcaacatacggaaacagaagatcatgctgaatgatacacctagctaccttctcacgaaaaaccatatgatctattttcctagcttgtaattttgcctctgcattgactatcattgtaccaatatcagcattcctaagccgaatcttacacttttccaagtggagattgtaagatttagtaccgtttttgtgtggatcatatgcataatcattcttgcagtgcttgcattgcgctctttctactactttcccagtcttatctttcttccagatcaaagtaaaatgttcccaacaatctgcatactactttctcttcttcggtttcggatcttctggtgttgatgtctttcctttgtcgttgtcgtctttgatatcattatcattgacatcatcatccgcaatatcaattctttgtcttatacgagatttagatgtttcagctccatcaaatcttctttgttcgttttcatcaaatctactacagtgaatctaagtcaattgatccaaactcagaaaaatcttcagaatcctataataattaataaagtacaaaacaatgaataaatgtcgataattttccaatcaaagtacaaaattgattcataatcaataaatcaacttaccattacgaatctatatctcagagactttgagattttggtttgaaattcttcagacttggagagtttgagaggctgagactttgagtcgttgatgtgatcagttttgtgtcaagcaaattatgctaaagtcgtctaggtttttttttccttaaatactaacttcaaagattctagatggtgcaaaaggttttttttttttttggtttagttaacgtcgttaactaaacaagttcagttaagttaagtgattaagtcaaaagcacttaacttgaactcaaacaagtttctaaagtaaaaaacattacaaagagttttatgacattaagcaattataagacaattcacaaacaaaaatttaattgtagaagatatagagagtttgctgacattacctggttcaaaaacacgtcgattcttctagcacttctaatgatactgccctccaatatatcagtcatttgtataatctctacaacgcatgcgccctttcaaagagaaacaatcaagattcaagaatacaaaatttatgttgagctcaagatccaggaattgacattcaattgcataatacaaaagttttacttaacaagtacgaaacttattactaaggtttttatttttaagcttataagacataaagaagagctcatagttttaatatctccatgttagcctaacttataagacaaaaagagcatgacctccaagtctaaccacttggtgaaattgagaaacaagtaaacaaattaggattataggcatggccaaagaaaagacaacaaggaaaatgttattgagattctttaacctcttcatgttcgattgtctgtgtgagaggaagaacacttgttcaatcacacactattcaacaaatctttctccttggttttcattgttcaatgcattaacgggtgaagtttcccatcagaagtattcactaaacctctcacttttgcagcttttgttttgcacttccttggcaaagtcttgtgatgcgtgttttattttgcctcaggcttttacctgaaagagcacacgactactgcaagtgcacactatatcagagtagtactttaggatcgaatccacaaggagaaaagtagctcagagagatccttaagaagagagtgaagctaggaccaaaataaagagagagggggttgttgtatgtagtgaataagcaaaataaaagacaaatacttaaagtaaacgataagcaataagagagaagcgttaggtcttcgagggtttctccggatgtcatggttcaacaataaggtatagatcccaattcatgtgataacatggttaggtttgtttacttccaaattctcagatatacgaaactcatccaagaccagatagccctaacggctagtaggtgaaagccggttattctcactaatacctcgcgtactcagttgccctaaaggctagtaggtgctaacatggtttcgagataaagatcaaagcattaagttcaagtttgattctagtccataagtccctatcactcggtgggcgtgtaacggttatagttctttatttagttaagttagttcaagcaattatacaagattctgccaagtataaaatacctaagatcatgtacaaggtggcgttccggacatacatgcattaagattaaactcaactagaaataatagtgtaagcgatcaaacaaaatcatagaacctgccaacctaaacttgatctaacgtccccatgaattccccattgaaaccccctcaaactcaactagagatctactcgctcatggcaaaggagctaatcaaaagttgggttaagtaaaccataacaaaaagataaataaaacttaaaaattgtttagagattacttctttgaatgtagaacacaagaggcaacactccaccataaagagtctgataaaaacgaaagagaaatagagagagatggtgatcttcgagctcaagaggtgtggcggcgagttggtagttctcggtgatggctagtgtttgcttgtgatgaacgcacacctagggttagggcttataataagtatttatacttgatggccaagaattaggtttaggagtaagaacgtcaatccgccggataagtaagtgatagggccgagtagtgggcttcagggaaggagcctaatgacggtggcacaaagagggaaggacttgggcgtgacctaatggtcagtgaaaagcttctcggatctgcccgggtgcaagtctccttggccggatgctttttggatttattatttccaaacggccggttcttgacatgtattcactcttcgggtcatatctcccaaacggcttcatgggttgcttcgattggatttcgacgttaatcttgactcttctagctttctatgcatatcgaaatatcttgttgtcgtgatggggaagacctcgaccggatgctaaacttctgaagtacaagaattgattgttttttgatacttttagcttcaaaactcttaaaaccgtcttggctcctagaatacgtgtttctcctcttcttggctctagaatgacaaaaaatgctctctgaaacataagaaaacaatagctaaaaagggctaaaaagttgtggtatcaactcccccagacttagactttgcttgtcctcaagagaaagtctaaacttatgccgcggatggatggaccttttaaagttctcaagaggatcaacgacaatgcctactctctggatttgcaaggtaagtataatgtgagtaatagttttaatgttgctgatcttgttccttttattgcagatgaaacagatttgaggtcaaatccttttcaactgggagaggatgatgtgataatgggaagcttggatcatggagctaaggagcagcttgaacccgaggagtttggagaaagaaagcagcttgaggatggagagcttggagctgaaaaggatgaagcattgcatgttcttgaaggtccaataacaagatcaaagacaaagctactaaatcaagctatcaccacacttctacaaaagattgagggcagccttaaacaagaagcttgtccaaccacgtctgttgtgattcaagccgtttaagcaacaacaatggaggtgtgtgacttgcactctttttccctcctcttggttttgtcccattgggttttccaagaggtttttaatgaggcaagcccacacactcttttcatggcccattgttgtttttgaagcccattagcaaaggagacatccaaatttcgtttttgtgtttttatttctctagaatgactcttcctcttctctagggctcctctacttctctatatattctattctcttctcctttgtaagacttatcaaactttttattatcaaaacctctttctaattgtttgatctgaagggtgtgtaatatctcttcaacttgtgattgctttggtgtgtaatatcctagcacgatcgagcccgaaagttcaagagtctttccgcaactcttggaagtttcacttcatccattttcagtttgttttcagttcatcatcatcccatcttcaacccttcaacttcccacagatccattcattcaccatatcaccatcactctatcacaatccatacaaagagacttcaagggactggatcttgtcacccaagatcatatcacgtggtatcagagcaactttgtatcaagttgtgttttttctaaactcttggtattctctgttcgtcaaaattgtttcgtcgttgtaggcttgaatacttattggaatcgttcgaaacttgttaaatcgtttagatcacgttctgaactataggaaactgtattagatcgtgcgatttgaataagctaaacgttttgtattctagggtctatgattatgtgtttttggtactgatttggtttgttttaagaggaatttgatattgtgtgtcttctagttgcagaatcatgtcagataaagataaggaagagaatagcaatgcacaaaacaacaagttgttgatggaagctataacagctactcttaccgcaactctcactactaatatggctaagatgatggatgagagatttgaggctgcaaggtctaaccaagaaaggaagaacagaactatgaggaataattctgatcgggaggcaacacttagctactacagccaatcctctactcgcactagtcataggaggcaaagacgtgggcaagaagaaagacaccctccaagagacaacttagctaatcttaagcttcgcatccctccattccatggtactaataatcctgatgattatttgtagtgggagaagaagattgagttggtgtttgtttgtcaagagtatactgaagcaaacaaggttaaagtggcagccactgaattctatgattatgcactaagctggtgggatcaagttgttactactaaaaggcgtcttggagatgattcgattgaaacttggaatcagctaaagaatatcatgaagagaaggtttgtgcctagtcattaccatagagagctgcaccaaaggttgaggaatttggttcaaggaaatagaacggttgaggagtacttcaaagaaatggaaacattgatgctaagggctgatgttcaagaagagtgtgaagcaactatgtctagattcatgggaggcctcaatagagacattttagaccgtttcgaggtgatacattatgagaaccttgaagaattgtttcacaaggcagtcatgtttgagaaacagattaagagaaggagtgctaagcctagctacaattctagcaaacctagctaccaaagagaagagaaatctggttttcaaaaagagtacaagccgtttgtgaagcctaaggttgaagaaatcagttcaaaggggaaagaaaaagaagttacgagaactagagatctcaagtgtttcaaatgccacggacttgggcattatgctagtgagtgttccaacaaaagaattatgataattagggacagtggagaggttgagtccgaggatgagaaaccagaagaatccgatgttgaagaagcacctaaaggagagctacttgtgactatgagggtcttaagtgtgctaaacaaagctgaagaacaagcgcaaagagagaatctgttccatacaaggtgtttgattaagggaaaagtgtgtagtttgattatagatggtggaagctgtaccaatgttgcaagtgagactatggtccagaaacttggtttagaggagtttccgcatcctaaaccttataaactgcaatggctaaatgagagtggagaaatggctgttaccagacaagttcaagtgccgttagccattgggaagtatgaggatgagatcttatgtgatattctgcccttagaagccagtcacgttttgttaggaagaccttggcaatctgatcggaaagtgatacatgatgggtttaccaatagacatagctttgaatttaggggaagaaaaactgttttggcacctatggcacctcatgaagtctacttggatcagcttagcatgaaaaagaaaggatctcaagctgttcaatccaaaacttcctagagtaaaccaaaggggagtactaaacctaatcttttgtttgtctttaaagaaaacttattgaatataacagccttggaaccggctttgccgagtagtattaagtttcttttgcaggactatcaagatgtttttcccgaggaaaatccagaaggtttaccacccattagaggcattgagcaccaaattgacttcgttccaggagcttctttgccaaacagaccagcttataggaccaatcccgtggagaccaaggaactagaaaagcaagtgaatgagctaatggagagaggtcatatttgtgaaagtatgagtccatgtgctgttccagtgttgcttgtacctaagaaggatgggagttggcgttttgttgcgagtacagatggagttaaggttgatgaagagaaagtgaaagcaattcgggaatggccaagtccaaaatctgtaggaaaagtaaggagttttcatggacttgccggcttctataggaggttcgtgagagattttagcactctagcagccccactcaccgaagttatcaagaaaaacgtgggattcaagtgggaacaagctccagaagatgcattccaagccttaaaagagaagcttactcatgcccctgttttatctcttcctgattttcttaaaacttttgaaatcgaatgtgatgcccccggggtaggaattggtgctgtcttaatgcaggataagaagccaatagcttatttcagtgaaaagctaggaggagctactctcaactatcctacatatgacaaagagctttatgctttggtgagagccttacaaacgtggcaacactatctttggcctaaagagtttgtcattcacaccgaccatgagtccctaaagcatctcaaaggacagcaaaagcttaacaaaagacatgctaggtgggtcgaattcattgagacgtttccctatgttatcaaatacaagaaaggtaaggacaatgtagttgccgatgcattgtcaaggaggtatgttcttctctcatctcttgatgctaagttacttggatttgagcatataaaatttctttatgcaaatgattctgattttaataagatatactcatcatgtgaaaagtttgcatttggatagtattatagacatgaaggattcttgttttatgataaccgtttgtgtattcctaattcttctttgagagagttgtttataagggaagcacatggtggaggcttaatgggacactttggagtctcaaaaactcttaaggttatgcaagatcactttcattggccgcatatgaagagagatgtggagagaatgtgtgaaaggtgcacaacatgtaaacaagctaaggctaagtcacaaccccacggtttgtgtactcctcttcctattcctttgcatccttggaatgatatttctatggactttgtagtaggtttgccaaggactaggacaggtaaagattccatttttgtggttgtggatagattttctaaaatggcacacttcattccatgtcataaaactgatgatgccatgcatatagccaatctgttctttagggaagttgttcgcttacatggaatgcctaaaaccatagtatcagatagagacactaagttccttagttacttttggaaaacgctttggtctaagttaggaactaagttgttattctctactacttgtcacccgcaaactgatggacaaactgaggtagttaataggactttgtctacactcctgcgtgcattgataaaaaagaatttaaagacttgggaggattgtttacctcatgttgagtttgcatataatcattctgtgcattctgctactaaattttcaccttttcaaattgtttatgggtttaatcccattactcctttggatttgatgcctttacctttgagtgaaagagtgagcatggatggaaagaagaaagcagatttagtgcagcagattcatgagcaggcgcgaaagaacattgaagagaagaccaaacaatatgctaagcatgcaaataaaagcaggaaggagcttatcttcaactaaggagacttagtttcgattcatctccgaaaagaacgttttcctaacaagagaaagtctaaacttatgccgcggatggatggatcttttaaagttctcaagaggatcaacgacaatgcctactctctggatttgcaaggtaagtataatgtgagtaatagttttaatgttgctgatcttgttccttttattgcagatgaaacagatttgaggtcaaatccttttcaagtgggagaggatgatgtgataatgggaagcttggatcatggagctaaggagcagcttgaacccgaggagtttggagaaagaaagcagcttgaggatggagagcttggagctaaaaaggatgaagcattgcatgttcttgaaggtccaataacaagatcaaagacaaagctactaaatcaagctatcaccacacttctacaaaagattgagggcagccttaaacaagaagcttgtccaaccacgttggtagtgattcaagccgtttaagcaacaacaatggaggtgtgtgacttgcactctttttccctcctcttggttttgtcccattgggttttccaagagaggtttttaatgaggcaagcccacacactcttttcatggcccattgttgtttttgaagcccattagcaaaggagacatccaaatttcgtttttgtgtttttatttctctagaatgactcttcctcttctctagggctcctctacttctctatatattctattctcttctcctttgtaagacttatcaaactttttattatcaaaacctcttgtgattgtttgatgtgaagggtgtgtaatatctcttcaacttgtgattgctttggtgtgtaatatcctagcaagatcgagcccgaaagttcaagagtctttccgcaactcttggaagtttcacttcatccattttcagtttgttttcagttcatcatcatcccatcttcaacccttcaacttcccacagatccatttattcaccatatcaccatcacttcatcacaatccacacaaagagacttcaagggactggatcttgtcacccaagatcatatcagtagttccttgcaaccttgtaagtgttcctcaagaaacaattctcaacacataatggtcaataattatcatataacatgatcacagttccctactgtggaaaaaggagaagaggtttgttagaaaaaggagaaacattactcgataataaagaaaaattttttgctttgttagaacatattggtgtaaaaagtggaaaaaagtttcaagttaacaaaatagagagtagcattagtagtaacggattcattaaccaccccccccccaccccccccccccccccatacttacttcactccgtcctagtgtgaaaataagaatagggatgaatccgtgagaaagataggttaagaacaatgtcaccttggttgtggtaactaaccggatgatctctctccttgcttaacatcagccgtactcggcttagtatggtcaaattcaataatattaatctccatttgcatcttcttcgaaacaaaatcttaaaaccaccaataactttaacataacaaaaaaaaaaatacctaagatagaattgatcttgtttttgtcaatatggccacgaataaaatcaaattcgtggtgacggatggtgtgaatggatggctggacagttgttgtgcttggccgaaaggtggagtgggtgggcaataagcggctgggttttggatggggtcgccgaccattgggatgcacagaatggtcgcaggtcaaacgaatccattggtgggcctatcggccgagtttctacggatctatccttaaagccctttgtttatgttatctttcttatcaatgttgtaaacctttgctcaaaaactttgtatctttttctcctttggaggttgaatgtgaaacaacccgacccatttttttaaacatagttaaatattcccataaatatctaattaaatcaaccaataaagcaacaattaaaccgcaagtcaaaaatactattttatgaataaacaaataattcaaccaacaaaaccaagaatgactaacaatcctaacacaaccctaactggttccaataaccaaaacataagagttaaccaaacgagttcctagatcatcctctcttccttcccatgattccacgatcacactttatctttacctgcatcaacaatacaatgagatgcgtaagtattatcataaatacttagtgaggcgatcctcccatttacgagctatacacacaagcaaataaaagggtataatcacaaatacaacacaaacaaaccagtcatcgaacaattcactcaaaacacatttaccacacctacatatcatcacacaaaacaaaacatacaacccaatcgctcagataagctcatggtcacgcactcaccttaacaaaattattctaacaacaattaaacccaggagagactttccttgcgtctgaaacagtccagaaaggtcctacaacatgtcacaaccaaaagcaacctttgaagcaaactgtacatgaaaaacagaaacaaatagtcttaaagacgaaaccctaaaatacaaactaaccgttaattattaaatccctccggtgaaacgctagccttagacgtcacaaagtttcccacaaaacctcgtgcagatcggaaaccagatgagactatgatcgcagttacaatccccgctggtcctaattcgcgtctgagaaaacgtgtctcactaaactgcgaataaatcaatcaattttaatccaaaaccacttctgtaaactggagaataactacaaaagatttgggaataactctatcaaatttcgtaacttttgacaacgatttgatatgtcgaaaacgtttcctcccaaaccctaacgattctggttcttctccttctcttactttttctcctttataaaacgaaaagtggataactaaagccctaatttcgagtttctttcatttataggcacactatagggtttccaattaacccaaccgattaaaccggacgatttaaatacaaaccctaaccgattttccggttcacgggcgttacaattctcccccactaacatagattcgtcctcgaatctagcttcacccttccactccgaggaactccgtgcaaccatcactacggtccgcactccctccaaccagaccccttctacgtctctctatccagtcgatatactcacgatttactagtcattgttgctcacaactcactctccactctcagaccgcaatcttcgagcataaaccgtcactctcaggcctaggcctacggtatctcgggtatcacaggtattatcttccccactcaaagtcaaaccctgagttgtgtcggctcactctcggccacaaagtcatcgagttacgacatttggagaaaataatacctcaaaactcgctctcgggtcatcaccctaaagcgttctctcagatcgtcacccgaaagccaccgtaccccttgcactctaaagacaccaagtccctcgagttaccggtacctcaggagcataccccgctcctcacgagttgttgggaccctcatgtccctcgagcaaacaatactaaacgcttccgagcatatatccagactctctcatggattcgcgtaagacacctttatgcctcaccatccatcatatgccctcgggaatatccttatgtccaactcccggccatctcgtaaacacacctctttcttaggttgtttactcaaactttccaaaaatagacaagtcctttttgggaaactttccatttttgagaaccgcacaacacattcttaaataagacaactcaagtcaaatctaagaaaaaaaaatattcatcttataaatcatcagatgtcatgatcgttacaacttccactcaggaatgggtaaactctgcaacaggctactcggcacctgatgctcaatcttaactaactggcaaacatcgcactcttcgacccaattagctacatccctcttcatcccgacccactgatagtaccgcttgaggtctcggtacatcttagtcgctcctggatgaatggaaaacatgctcgcatgagcctcactcaagatctcctgtcgcaactccttatccttaggcacacaaactcgcccatgcacaaggatagttccattagctacgaactgatactcaaagccctctgccttagaagccgcaatcaacccctcatccttctcttgagctaaccgaactctactcagaagatctacttgatccacagcttccaatcccaatggctcccttgccacagcacacaaccgcaaagcatcaatctcactcaccaaggccttaacactctgccctggagccgcacccacgcgcttacgactcaaggcatctgtaaccacattagccttaccaggatggtaggctatctccagatcataatcagccaccagctccatccatcacccctgccttaggttcagctctggcttagtgaagatatacttcaaactcttatgatccgtgaacacctgcactttcccgccataaagataagacctccaaatcttcaaggcaaagatcaccgcaaccatctctaaatcgtgagtgggatagttgccctcatgtttcctcaactgccgcgatccataggcaataaccttcccacgctgcattagaacacaacccaaaccaactctcgaggcatcagtatacaccatgtaaggctctccatgctctagcaattaacactggtgtactcatcaacatctccttaagactcatgaaaccctcctcgcaatccagtgaccacacaaaaggaacattcttccctgttagcttactcatcggctgtgccatactcgcaaatcccttgacgaacctcctgtaataccctgccaacccaagaaaactcctgatctcagtggcattcgtcggtttaggccagtctctgatagcctcaatcttctctggatccactgaaactccctttgcagaaaaaatgtgacccagaaaacccatctctctctgccagaaactgcacttgctcaacttagcgaacaacttctgctcccacagcttctccatcactctcatcagatgtacctcatgctcctcaggactcttagaatacaccaagatgtcatcaataaagatgatcacaaactcatccagaaactcctggaacacgctgttcatcaacctcatgaacgctgcaggtgcattagtcaaaccgaaaggcatcaccacaaactcaaaatgtccatatctcgtcttgaaagcagtcttgcgaacatatgcctccgctatcgggatctggtgataacccgacgtgaaatcaattttggagaaacaagtagcacccctcaactgatccaacaactcattgatccttggcaaagggtacttcttcttcatagtgacctggttcaaccctcggtagtcaatacataagcggaaactccaatccttcttcttcacaaataacaccggctctccccaaggtgaagtactaggacgaatgaatcccttacccaacaaatcatctagctgcttctttacctttgccatctctgctggagccatcctgtagggtgccttagacaacgacgctgtccctggttccaactcaatcatgaaaggatcagaccgtgatggaggtaatccctgcaacaattgaaacacatcctcgaactcgtgaacaacccgaatgtcgctcactgctacctgccccacagactctggcgtagatatcgtcaccaggtaagcctcgcagcccttctcgatcattttctctacctacattgcgaagattacgagactccctgaggtaggtctcactccctgataaaccaacctcccctctggccgctcaaaagaaactctcccacagtggcagtcaagatgtactctgtaaagatccaaccaatccattcgcagaataacatcatacaactctacagggctgataatcaaatctgctggcatcgactccccttcaatctgaatatccacacccttcgctctccccagaaccgctagaaactgtcctccatcaaccttgacggctccaaactgctcaccaggatccccacggatgttgccgcgcgaggcactctcaaaggtaatgaagcaatgcgatgctccagagtcaaacaacacatgggcctctacaccgcccactaataaggtccctacacaaacttcatatgctaagaaccctaacattcatcacaacacaatgatatcaaaaaacaacggaaataattcacaaagtctgagaaatcatgccagtgatcgctctgtgactggtactgcctatctcactcgtagtgtagccctgtggtgccgctgcaatatgtgctaactgctgcacattctgctgcactccctgctgcacctgcgctccctgctgcaccgccggctgtactactgccactgtcatccgctgcagcttaggacagtttggtctgaggtgtcctctctccctgcagtggtagcactccctcgtctcagctcgctgcgtgcaatccgctaccttgtggtcaaggctcccacaagaaaaacatcccgcacgaccaccctgtccagctctagaagaatgatctcacttcctcttctgcccctgcgtaggcttgccgcccttgctaggtgccacctgctgctgagtcttcttcgattgtaccggtggactcactgccaccacctacctctgaaggtcctcgtctacctcagcagctgtctccaccagtgccgccttcgtggcgtactgcgacactctacaccgcaccctcaaatccggtcgaagtcccctcaagaacctcctcatctaggcctggtcatcctccatgccccgacccgcatacaccaaaagtcggttaaaatcccggtcatacacccgaactgaccgctcaccctgtcttagctcaagaaaacgagcttccataaggtcgaacgcctcctgcggaaagtacttcgcattaaactcggccatgaaatctgcccaagacatatccgcctgcctcctcctggcagtcacactccgccacaacaaatgtgcatctccctctagaaaatgcactgccagatccacccgattctccaccgggcatctgctcaaaccgaagttctactcaacccgcgacctccaactgtcggcctcctcaggactagtaccaccagaaaaatacccgatgccaatcctctgcaactgctctatcatccttaaataagatggaaccgcctcagcaactgcagccctctgctgcacctccaccactcgtggcgcatctggcgtctgcactggtaccacacctggtaaccgctccaacaactgccttagcaggcctgccaaaccaacctctgcaacctgggttcctccgacggaactccggttgcattagctatatcagcaccaagaccgtccccaaccccgtgctccacaaactcaggctgcgaacccacactctgctcaactgttgcactgtggccatcactctcgccggtaccctcgaggacttgtcctctaccgcgaccacgaccacgaactccagctcctctaaccatctgcgctactcaggtacaaaaggttaagaaactagaacaaacgaatatatcacaaagaacttatcgtggaatttcatttaaggttcggagaagatgatggtaggcctccaacaacacacaattgactaaacactccataatcaaaccttagtatgctaacatcctagctcatcccacatcaatcatcaagaaaataattcatcaattaatttttctacacatcctagaattgtgatcgctcttataccaaattgaaacaacccgacccattttttttaaacataattaaatattcccataaatatctaattaaaccaaccaataaagcaacaattaaaccgcaagtcacaaaaactattttatgaataaacaaataattcaaccaacaaaaccaagaatgactaacaatcctaacacaaccctaacctgttccaataaccaaaacataaaagtaaaccaaacgagttcctagatcatcctctcttccttgccatgataccacgatcacactttatctttacctgcatcaacaatacaatgagatgcgtaagtattatcataaatatttagtgaggcgatcctcccatctacgagctatacacacaagcaaataaaacggtataatcacaaatacaacacaaacaaaccaatcatcgaacaattcactcaaaacacatttaccacaccgacatatcatcacacaaaacaaaacatacaacctattcgctcagataagctcatgctcacgcactcaccttaacaaaattattccaataacaattaaacccaggagagactctccttgcgtctgaaacagttcagaaacgtcctacaacatgtcacaactaaaagcaacctttgaagcaaactgtacatgaaaaacaaaaacaaacagtctcaaagatgaaaccctaaaatacaaactaaccgttaattattaaatccctccggtgaaacgctagccttacacatcacaacgcttcccacaaaaactcgtgccgatcggaaaccatatgagactacgatcgcagttacaatccccgctggtcctaattcgcgtctgaaaaaacgtgtctcacgaaactgcgaataactcaaccaattttaatccaaaacaacttctataaactggataataactataaaagacttgggaataaccctaccaaatttcgttaccttttacaaagatttgatatgtcgaaaacgtttcctcccaaaccctaacgattctggttcttctctttctctgactttttctcctttataaaacgaaaagtggataactaaagcactaatttcgagtttttttcttttataggcacactatagggtttctaattaatccaaccgattaaaccggatgttttatatacaaaccctaaccgattttccggttcacgggcgttacagaatgaatgaaaatacaaaatcctttataccaaacaataataataaagtgattaaattttgtaaatccaactaaatgtctaataccgtaacaaatatactagaagatcaccaatgacggaaataaattaataaaacatcgtgaattcacacaactaatatcgcgtgtctcactcaccattcgattcattttttaaagcggcattgtgaagtcttcatcaaaatctagaacatcaaatgagtttaagaactgaaaaaatttctacaaatgattgaataaagtctaaaatcccatattttattccaaaatcaagagaatttttaaaacccacacccgtcaggttttagcactaaacccaaaccaaaaaaatgttcgggtcacggttcaaccggtcggaccgggcgtgaaaatactggtttttagagtttttttgttatttctagactcttttatagtctttttcaggtctttacatgtttgggatgcattttgagattatggaacattctggatcaaaacagagaacttatgatgcaaaagcaatctggagacgtaaatttgcgtaggtgtcaatcgacaccacccctagtgtcaagggacaccaatatctgacggcaattcaatttcgcaacttattgaagttttaaatatatccaaattggccccaaaacttctccttatttttgaagaagtccttgcacggttttagaaacttatatatagattttaaagttcattgtttagacctaacttttgataattttctttaccctttatgcttacttgttcatggaagctaaacccctagggagctccctcttaagaagaacattctaaactctattctcttcttgtttcctacattgatttctactttaaacatgttttgctcttttatgagcatatttgagtagttttcttgttggcttttagagattctcaatagggaattagtagatcgaaaaccttattaggataatgacttcatttatgaaattattattatcttctattttttagattttttgtaaaatggaaaaaacaatatatgaaaattaaagaaaatttgaaaatatagaaagttttctaaatattttgtcactaaataatataaaaagtataaaaatataaatttctattttattaaatttgtaaaaaaataaaataattgattattaatctttccaaatttattattacttcatctttaagtacaatagccatttaatcacaatacctatctcattgactgatatttttaaaatttacgagtcttatattaattttttttataaaaatgtaaaataagaaaatatattgaagaaagatgtatttaaatttagttatccatatatacatttttagtaaggattctgggttgaaaaatccttagtcaacttcctaattatatgtttagtccttacaaatttaatgaaacaagatatccctttattattaaaagggaagtacaaattgaaattttgtctaatttggcctcaattttgatttcaaatttggattttattctttgctattcaaaattattaagggtaatttggtcttaacaatctcctaaactttataggatccgattcaatctaaaccattcaataaaattaattctcttcaatctaaaccgttcaacaaaaagaaggaatctatatcgtttttgaaatcaaaatatgatcacattccatccctaaaaacactatattcaatcacaaaatcaataatcaataatatccaaatcatatattacgattcttcactaatcactagaaatttttatttataagtttaggatatcaaagttattcaaatatttagtataagaaccaaataaaccgattgcccgcggtaaaccgcgtgttaaaacctagttctcattaggacaatgaacaaattttttatcaacaattcaaatcttgcattaatttcttactaaaaatggatattattaagtagtactaaaaattattgcataatcacttccttaaatctcgacgaaattcattaatgattaattcctaattagtaaaatttaatacacaatcgtaactaaccatatccataattactttattcgaatatttcctaagatttgaaaaataattgctttaaattcttaagatttgcaaaattttataaagatattggtatacattttgttcctagaatattttccaaaaatctcgactaaatcgttccaaaagtctcgaaataagcttttaaatatttttgaccaaatattcatacattctattttatagaaactaataaatactattaataaccatatttgtagcactaaataaaattcgattagagatttgattccaattagttaaaagtctcgaaataatcttttaaatattattgacaaaatattcatacattcgattttatagaaactaaaaaataatattaataaccatatttgtagcatattcctaataaaatccaattacagagatttgattccaattagttaaagtaccaataaatttcccttggccattaagatatgattgacctaatcatgtagaacctatatatactctttaaatttacatctcatcacatcatcaaaaacacagagcaattgatttctaaactcaccaaacatactttcttcctcagctggccgaatcatttgcaagattatttgaaaggaactcgtaccgttttataacgatttataaatactaacaacgaatttaattgccaagaactgtgtaaacaaagaattaaatctagatcataaagtttgtatatacctgaatatggtacaacagaaatatgaaccatgttattcgaggttattttagcaccccaagtgttgtgcctctaccggtatccacatgcatacaaactgtatcaagcctggaatgctagttcctttgagatctaatctcaaaacttagaaaaacaatttgtctctttgtttttagggttttatcaaaaacggctgatctcaaaagtcataatgcatcacttttatagtagcttcacgtaacttaacgcatataaagtcaatgggcgaagcccaatccatgcaacgtgactttctctacgagaataaacaacatattcgtattagtgcacatatgtatatcttatatatatatatattacattatttatttaagtgctcaaatacaaatataagtatatctatatatcatatatatattatatacttttactttaatttatatatcatatatatatatatataataaatcttttaatccaatattagttaatcaaaattaaactcaattttatatttgatccaatttgtttaggtgtgtgaccctgtaggttcgtataatattagaaatgaattataaactcatagattataagctctatctagcaaaacattataaccacctaatattatgtgattgtcaaacctcgacattacaactttaactagaataaagtacaaacgatttcaggactttcccaacaacctcccacttgtactggaatcatttattcccataatccctttgtctctatatctcgatctcagcataaggaaaaaaattgtcatccttattcggctagaccatatttatcgaactccgatttatactgataaaacaaacgactgacattcacctcgtttgagtgcagccacgcatttctcagtatcaaatttttgataggcccaaagatatttatctccgttatatgggagggacaaatcccatcttgttccatccatgttccttaaacaattcataacgggcccaatcactgtctttataatcaccttttacggttgatgtttgacagagtcaaagcgaactaatccatgaataagaactcatgatgaactcaggtcaaaggactatactctatagttgtgatgagaaactcttatgacattcatataacaaacaagatgcacatgtctcataagattcataatcaaatgagttcaaaagtccatcactatgaagcttttgaatgtgtttctcatttatatggcccaaacgacaatgcagagaaaagttggattcaagtgattaaacttaaatctcttggtgcaaatgttatagattggcatgctttggtttagaacatagagctcattctctaatggagcactaccataaaacatatcatttcgatcaaatgaacaacatttgttcttgatcaaaaagtgaaaactttccatgtccaaacatgaaacggagatgatattcttgtttatagcatgaacatagtagcagttcttaagctccaaaaccatgcatgaaggttaagacaaggaatatgtccacgaccaatgtagagactcttgctccattagccatacgtaggtccacttgtcgttcctccatagttatactgttgtttacgccatgcatatttacacaaatgtgagcaccacagccggtatccaattcccaaggagtaaaaccagaagtagtaacatttacttctataacatagatacccgaagaagaaatcttgaacgttttattcttctccagatcttccaagtgttcaagggggtttgatccattcaatttgtccttctcaaagacatctcgaactgaataggaactttgagggtttgacataactgtcgaaaaagaaaagcataaattaatatgatgttcataaattttagaattctcaacaattaaaaaaactaacactatactcaaaacaaatttcctctaatgagtacaatgatccaagatccatattttactagaatccaagtgagttttggctccaccctcaaatatatagttatttaggtaagcaacaccttgctaattggatatccgttgggataagtgtttaacattttgaaattcatgttcatacacaaaatggtttagtaacatcgatacgcatcaagccaatgaataattaatagttttccccattattattggttttgggtcagaaaccaaatagttttcatctaaaagctttgaatgtgaaaagtgctccaccacagcacgcagagatgaaccctcaaaggaggataagaatacatgttggatatgaatgataactaagccatcctagaaggatttatataccgctcgttttgaagactatcatattatatagtcagctattccaacataagggggagaatgtatacagctggtgaaaaagataaatataaatgaattatcaatgatcctcggagtaaagaatgtttattaagagtccaaaagataattcaattacagaatttagcgttgtaattgccagacacatttgctgacccaaataaagtgatgaagtcacttataccagttgtaaattaaatgctccagaatataatgaatgtcctgtaaggaccaatttcaaactgctattgagtcttaagatcgcatgaagcgtaatagaccttggttccaaatattaatatcctcgtaaaagtgaaggagcacaaaattaaaaatgaccaaattgaggaaataaatattttgatgatctcttgaagagagtgaatgatctctaaaagagacataaacatgacacatgaaacattcaagtacttgacaatgaagagatctatctagctatgtcatgtcaaaatataatggaatcaaaagcaaatcgacgtcataatatatttgcatgctatgagcagttgatattatagacaaaaaagaggatcatgaaagaaagtctattgaaaagtgtacacaaagtaatgattagccaaaaaaaaaatggaaaagaagaaatagacatataattataatctctagtagagatatttggactagtactctatgcacatgatgtgtaaaaccagtggaaaataaatgagtctttatgtgaaagaatagtgaaattaatgagattttcacaaagataagaaatgtattatgaagagatatattctcttgtggtggatgtaatattttttaagtatctaaagtctggcaataagagacggaacactggatatgacatttatatgaaattcttgaaagatataatctctgaaggattaatgatatgagaattatgttctctagaactctactcgatcgaataaaaagaaatatgtaacatgacatataatcatataaatatatatttacgttgagtttgtcaaaatatattgatcaaactaatatttgttttgaaaatcattaaaactcctatagagttatcataagtaatacgatgacaataatctatgataaaatatcactagataatgatatttataagtctatatgaaaaccatataattttgatcattaagattatggttattcattccaacgagatattgtatttgattgaaaatcatctcctgaagaagatgtttccgagggggagattgaatgatatgcgtggatgtaccctttttccttatcatagtttttatcccacatgatttttctatgacaaggtttttaacgagacattaaagaacacgcaaataatacacttgatgaatattaggaaattctatcaatcatccaaatgaatattatacactaatgatatttagagaaataaataagatggtcaagatgaatcatctaaaagatgatatgtatatttttcataagaaactattccaaatcaaaatcgtatacttactataattctacatatacatcccatctacgagattttatatgtatatgtgaatataatataattaagtagatattatatatcaattgattaatactgaaacatgttgacctgaataaattaatcaaatacacagcaaaacaactatggttaaaaaatacccattatcatcaatgaaggcgtgaacgtgtaacgaaataaaagtcatcgatttcgtttgtggataaccatatcaattatttatttgtactcgtactcaaataaccattaacaaaagcgaatagagacatatatgttctctatcatatcaatttaattagtatttatttgtatctaatgtacagaaacgagttctagtcatcaattaagaaattcactaaatcttaacatcgtaatctaattatgataaacgaacaagttcaagtgaattgtataattttgtttttctatgctttactaattagatttcataaatttaaacaagttaaaaacaaattacaattattcatctatatcaaaatatggatttaactagagtcaaattcagtattaaaaacatagactttgatactattgaaaggaatttgtactgttttataacgatttataaatactaacaacaaattcaattgcaaggaactgtgtaaataaagaattaaatctagatcataggatttgaatatacctggatattatgcagcggaaatatgaatcatgttaattcgagattggtttagcactccaagaattgtgcctctactggtatccacacgcatacaaactggatcaaacccagaatgctagttcctttgagatctaatctcaaaacttagaaaaacaatatttctctttgtttttatgagttgaagataatttatcaaattttcagagaacataaccgtaataacggtaaccgtggtcatgcctacatttaaaacatattaatcatgccaaaatagacataccatcatcagtcgttaaaacaatttgataaattatcttcgactttctttctcttctctctcttaatccttcagagagagaatgtctccgatggttgtttttggtggcaacgacatgtttcttcacttgcgttggctctcatatgcccaacacagttggttacctcaacgacggtgactggttttctcgtccgatttcggtggattcatctccgccgttggtcggctcccgtccggaattgtctggctcacatagtagaggtgtccggctttcgtccagcaccgtcgcgtttccacggtggcatgtggctagctttctcctatgcatcctctttcctttgtttatctgtgtttttacttttgtttgcttttaataatctcacatacatgggttggtaatgacagtgtaagtaatctagctttctactgttatgttccgatctatttcatgttgagacttaattgcagaaatcaaataagagatctgagaatgatgatgaagataagaagtggaatccgtcgcttattaatcattgccaatctgctgatgtatctttaattggagcctctttactatctaccggtgagaaacccttaagaatccatgttagatagtcctatcatcagtgattctgtcaccggaactgaagctccaacggtggaggttgaagtcggtttgcttaagattgctcatctgacacgtggttatgtcgacgtgtgtttcaggattgagtcaaatccagttttcttcttctgtgagcaagatgaaatcttctgatgggcctatttgggcaaaaaaacattttgtaatcttaagggttcaaaaacggctgcatctcaaaagtcataatgcatcacttttataataggttcacacaacctaatgcatataaagtcaatgggccaagcccaatccatgcaacgtgactttctctacaagaataaaccacatattcgtattagtgcacatatgtatattttatatacatatataacattatttatttaagtgctcaaatacaaatataagtatatctatatatcacatatatattatatacttttactttaatttatatatcatatatatataatagaaatcttttaacctaatattagtttaatcaaaattaaacttaattttatatttgatccaatttgcttaggtgtgtgaccatgtaggttcgtataatattaacaatgaattataaactcatagattataagcggtctctagcaaaacattataaccatctaatattatgtgaatgtcaaacctcgacattacaactttaactagagtaaagtacaaacgatttcaagatattcccaacattatttaggtttgatgatgtgtacaatgtcttgagttgtgtgtgtgtggattggtagattccttgatagttttttccctgatagtttttcccctttcctcttggcttatttgttttataggtgtcttctttgtatcgcacatgtacgtgctgatgggcggtagaatctatcttggcacggaagaaaaaatacgattaggaagttttacggtaagactaagaagcccttttgatgccattgttttttttttattagtgggttaatcttacaacatggctttggctaagtgcaagtgttatattaccgttacttgagagacttcatatcaactttgttgacttattggatgaaagcttgtggtatccgaatccaaaagccatcacctaaaagcagtgtgacattgaaggtagcagatttatgaatagcattgacttggaaagagaagacgaatgcgcgatttgcttagagccttgcaccaaaatggtgttgccaaacttttgagaagacaaagaagatgaagaacacaccaacatcactttgcgctggtgagtgagagagtgagacatagagagagagatcgagattgttctgttcaaaaagcagtgtccgaccagagagaaaaggaccggtttggtctggtttagttcctatgaataattccttacgaaggtcaatttgttaaataactaggatatgataccgcgggttaaatattttatatatttttctttattataaaatagaatttgttgtttgttgttgtttgtgttgattaataattatcgataaagttgtgtatgctttttattcagtcataattatgatattataataattatcgataaagttgtgtatgctttttattgagtcataattatgatattagtaagtctaatatgtattattttatcttctaggacttgacttgtgatatatcataccacgggataatattttattttttatttataatttgttttagaaaaaattatataatttaaacttttggtgttttcagattttaccagtggaacatatgtaatttagtaacatacaaataaaattatacacttaaatgtatcaaagaagaataacatttagaggtgtcatagaagattaacacttatactataatgttgaattttaatatattttttataactaaaaatttaaatatgaattgtatttgttatgttattgttgttggttttgtttagtattgtatagttgcaatttgatttaattctaggaatacacccgtgatatccaaatctgtcccatctaaactcatagcaccatataaactcgtctcatccaaactcgcctactatgtaaacccgtctcatctaaattcattctgccatataaatctgtcccgtgataaccaaaaatcaaattgttctttttctttttaataatatttttatttaagatacttcgagtcaatttacaatttcaatataataagaaaaattgtatgctatttatatctagattttatatcgaattctttgaacaaaagaaacaaaatttcttgttaaatattttgtatcttttaaattaatatatttcctacttgtatttgttttatgttcaatatatttggttttgatatattttagaaaacctgttcaaataattgttaaaatttgaatcccatatatatttatgtgatattttataatttaaagatatatatatatatatatatatatatatatatattgtttagatttgttgttgagatatttttagtgtctatttttgtttaaagatatatatatatatatatatatattatatatttttttttattttgttcaaaaaagagaaaatatgtatttcaaaaatgttaagtagataaaataaaattgttaagtagataaacaaaataaaattatttttgtaacatggtattataattttttcaattataaattttgaaagtattattagattgacaaatagtgtaaataagtgtaatgtatatgtgacgcttagggttctaatgaggattaaagtattacatgaccatcaaggcctagttagctaaatagtcaaccaccatacaacataagaatccaatttgaataaagaaaacccacctaaagattaattaaaagaagtgaagtcgtagccaaaaccgtcccacaatataacctcgtcctgtgaaattaaacataattttgttattttcttgtaaatttcaaatatttataaaatttgaaacttcaaaataaatttaatatccacccaaactttaccattgaattttgattgttatatctagatttttcccgtaatatatcgtcccgtattaatatttttttttaatatatttataatgtttaaatttcttgtaaaattcaatttataattttgaaaacttcataagttttaaaattataaatatttaaagctaaactttataaaaaagtttgtaaaattagaatatataacttttgataaaaagttaaaatatttataatttttgaaactttgtaaagtttctattctttaaaatcaagaacccgagtaaaccggataaccactttaattttggacgcctgataaatcaagctttctgcttattcttaaccggagtaattttggttctttttatagtatggctctcaaccaatgtccaattttttaagcaatgtgggacattgtaaacatattatttttttatgaattgaataatatatgttcgtttaaaacaatttgaattacatcatatacagaaaaaatataatattttattaactatttttattttatataaattcaaaataaattaaatataagatcaaataaatttgaaagaagaatcatatatttatgtttaaattaggtaaagatgttttaggaaattagttaaggtaaataacaaatatggttaatttagagatattatatatattaaatttggtaattaaattaatttcgtttataattatttttttggtagaaattggtaataaaaaccaattatggaagatccgattagagattttggggtcaaaattgaataaaaaatccagactcaattggattccttaaaatttacttcaaaaatgttgagtagatttaactatgaaatcttattggataaataactttgagtaacatagaatattgttcaaacaacaaaaagggcaaatattttcagataaattgaaaataaaaacatgtgtaaccaaacgggcggtctgtgacggaccttgcttctgttcattccgaggcggtccggtccgccaaagaccgcagacgaaaaaacgaagcccatacccgccccgcaatgcccattggtctaacgggccagcccgcggtcattctcttcagcttcctctgttttgttttttttccttgtggttcatgaatcagcttcctctgttctgttgatgttaacacaatgctatggtggtaaagagaaatctatttcgtagtttcagaatttagcgttcgagtcaggctttcttcgatgtgaaatcatgtgtcttgcttattcatatttgttatcgaattccacatattccacttaaagcgtctttccaagacccatttcatctgcaagtcacctcttcgtaaaccaaatcttagaccatcaagttggaaagacgcttcaagtgatatatcacataaattaaagtatcaaactgaaagctgaaagactgaaacataaactaaagtattaaactgaaagctgaaagtctgaaacataaactaaagtattaaactgaaactgaaagtctgaaacataaactaaagtattaaactgaaattgaaagtctgaaacataaactaaagtattaaactgaaagctgaaagtctgaaacataaactaaagtattaaactgaaactgaaagtctgaaacataaactaaagtattaaactgaaattgaaagtctgaaacataaactaaagtattaaactgaaagctgaaagtctgaaacataaactagtattaaacagaaagctgaaagtctgaaacataaactaaagtattaaacggaaactgaaactgactgatacataaactaaatattaaactgaaagtctgaaacataaactaaagtattaaactaaaagctgaaagtctaaaacataaacttaagtattaaactgaaaatctgaaacataacctaaagtgttaaactgaatgctgaaaacatgaatctcaaactcaactcaagatgtgtcttcaatcttcatcaatatcaagaatcgtcggcatcgtggtcaacaattgactccaaagtacgcactttctcatcttcaagttcaccatatacttcagcctcctctacatatgtcccataaacataacaaaatcaatgcatgatttataattttgtaagcgcaaatattatgaaaattatttgcttagcattttcatatgcttcaaaaccttttaaccaattgcggctgcatattagtgcttgaacatgtttcggtagaagacggcttctatacttgttcaaaactctagctccaatactaaaagaggattcagaggctactgttatgattggaatactaaggaggtcacaagccatgaacgccaatgcaccatagcattggtgttatctttccaatagttcaaaatatccaaactctcaaaatttattgtgtccaatggcggtccaaaacatatccaaagaagactttccactactaacaatagtttctttgcggaaagcaaaaaaatcttgcgagattatttaccaatttcagccaaaaaacaataaagaaacaattaactaaaaccacactaaaaattggaataaacgtttgattacttacttcataattgcataaacaccttttttgtcctccattcttctcactttgctgattagtttcacgtgtttctttagacgatgacgtgaaaatggacttattctcatatgattcaaacaaagttgtcaacttagtatgtaaattttctatctttgtcttagcatcactcttacccagctttgcaaatcaaaattatacaagtgaattagcttgaaccatggatcaaacaccgtagtcattgcaaagacatcaccaacttcttcccaatacttatcaaatctatctctcattgggacaataatttttctaatgatttcatcttgattactcgtatttgataccaatcagtcattgatcttccaaacttgcatgaaatacaagttttaagttggatatgaagaaccagaaattcagattagtgatcacatcaaaaggctctaaaaattcacaaacttgctttaatcagtgccattcttcttatgtagggagagaattgtagttcctcgcatcaatgactttaagattagtaaagccagctcgatacttgagagctctatcaagcatcttgtatgtcgaattccacctagttgtcacatccaaaatcaaacccgccttaaccttaatttataccaacaacttccacacattttgtaaacaatatctcacgtttttcagaagcttgcacaaatttgatactctctctgatcttatgcaacgtatgccctatgtctttcaaccctatctgaacaatgatattgagaatatgtgcagcacatctcacatgaacatattctcctttacataacaaatcattatgtaacataagctgagatttcagaatctcttgtattttgtcattgttagtagcattgtctaacgtgatggagaacactttttctcaattccccaatcctgccacttctgtagaatcaccatggctatgtgcatccatgtatgtggaggcttgaaagcaaaaaacgcaatcatcttattgtttaatttcaagtttctgtcaatgtagtgagttgtcagacacatgtagccttcttgagtagttgcagtctacaaatcagaagtgaaactaatcctgccaggaagctgagctaattctctctttaaattccctgtctcattctcatacaacttcaaaacgtcagctacagttgtgttccgagtaataaacttcacatatgcgttcaaatatttccacactgatctaactttctcatattcaacatacgcaaacagaagatcatgctgaatgatacacttagctaccttctcacgaaaaactatatgatctattttcctagcttgtaattttgcctctgcattgactatcattgtaccaatatcagaattcctaagccgaatcttacacttttccaagtggcgattgtaagatttagtaccgtttttgtgtggatcatatgcataatcattcttgcagtgcttgcattgcgctctttctactgctttcccagtcttatctttcttccagatcaaagtaaaatgttcccaacaatctgcatactgctttctcttcttcggtttcggatcttctggtgttgatgtctttcctttgtcgttgtcgtctttgatatcattatcattgacatcatcatccgcaatatcaattctttgtcttatacgagatttagatgtttcagctccatcaaatcttctttcttcgttttcatcaaatctactacggtggatttcagcctcgatgtctctttgagaatctaagtcaattgatccaaactcagaaaaatcttcagaatcctataataattaataaagtacaaaacaatgaataactgtcgataattttccaatcaaagtacaaaattgattcataaacaataaatcaacttaccattacgaatctatatctcatagactttgtgattttggtttgaaattcttcagacttggagagtttgagaggctgagactttgagtcgttgatgtgatcagttttgcgtcaagcaaattatgctaaagtcgtctttttttttttttccttaaatactaacttcaaagattctagatggtgcaaaaggtttgtttttttttggtttagttaacgtcgttaactaaacaagttcagttaagttaagtgattaagtcaaaagcacttaacttgaactcaaacaagtttctaaagtaaaaaacattacaaagagttttatgacattaagcaattataagacaattcacaaacagaaatttaagtgtagatgatatagagagtttgctgacattacctggttcaaaaacacgtcgattcttctagcacttctaatgatactaccctccaatatatcagtcatttgtataatctctacaaagcatgcgccctttcataaagaaacaatcaagattcaagaatacaaaatttatgttgagctcaagatccaggaattgacattcaatatgcataatacaaaagttttacttaacaagtacgaaacttattactaaggtttttatttttaagcttataagacataaagaagagctcatagttttaatatctccatgttagcctaacttataagacataaagagcatgacctccaagtctaaccacttggagaaattgagaaacaagtaaacaaattaggattataggcatggccaaagaaaagacaacaaggaaaatgttattgagattctttaacctcttcatgttcgattgtctatgcgagaggaagaacacttgttcaatcacacactattcagcaaatctttctccttggttttcattgttcaatgcattaacgggtgaagtttcccatcagaagtattcactaaacctcggcttttgttttgcacttccttggcaaagtcttgtgatgcgtgttttattttgcctcaggcttttacctgaaagaccacacaactactgcaagtgcacagtatatcagagtagtactttaggatcgaatccacaaggagaaaagtaactcagagagatccttaagaagagagtaaagctaggaccaaaataaagagagagggggttgttgtatgtagtgaataagcaaaataaaagacaagtacttaaaataaacgataagcaataagagagaagcgttaggtcttcgaggtttctccggatgtcatggttcaacaataaggtatagatcccaattcatgtgataacatggttaggtttgtttacttccaaattctcagacatacgaaactcatccaagactagatagccctaacggctagtaggtgaaagccggctattctcactaatacctcgcgtactcagttgccctaaaggctagtaggtgctaacatagtttcgagataaagatcaaagcattaagttcaattttgattctagtccataagtccctatcactcggtgggcgtgtaacggttatagttctttatttagttaagttagttcaaacaattatacaagattctgccaagtataaaatacataagatcatgtacaatgtggcgttccggacatacatgcattaagattaaactcaactagaaagaatagtgtaagcgatcaaacaaaatcatagaacctgccaacctaaacttgatctaacgtccccatgaattccccattgaaaccccctcaaacccaactagagatctactcgctcattgcaaaggagctaatcaaaagttgggttaagtaaaccataacaaaaagataaataaaacttaaaaattgtttagagattacttctttgaatgtagaacacaagaggcaaagctccaccttaaagagtcttataaaaaacgaaagagaaatagagagagatggtgatcttcgagctcaagaggtgcggcggcgagttggtagttctcggcaatggctagtgtttgcttgtgatgaaggcacacctagggttagggcttataataagtaattatacttgatggccaagaattaggtttaggagtaagaacgtcaatccgccggataagtaagtgatcgggccaagtagtgggcttcagggaaggagcctaatgacggtggcacaaagagggaaggacttgggcgtgacctaatggtcattggaaagcttctcggatctgcccgggtgcaagtctccttggccggatgctttttggatttattatttccaaacggccggttcttgacatgtattcactcttcgggtcatatctcccaaacggcttcatgggtttgcttcgattggatttcgacgttaattttgactcttctagctttctatgcatatcgaaatatcttgttgtcgtgatggggaagacctcgaccggatgctaaacttctgaagtacaagaattgattgttttttgatacttttagcttcaaaactcttaaaaccgtcttggctcctaaaatacgtgtttctcctcttcttggctctagaatggcaccaaatgctctctgaaacataagaaaacaatagctaaaaaggtctaaaaagttgtggtatcaactcccccagacttagactttgcttgtcctcaagcaaacaaaagaacaaatccggtggagaatttgaaaattgcgggaactctcttgttaatagtcaccgtatctcgaatatatcctacaaaccacattaaacaaaagttgtgttggagcggcctctcaatagtcctacacctttctcgtccttgtccatccgctttgatcctacagaattttgaattc

SEQ ID NO: 544 - DNA, 105420 bp, Arabidopsis thaliana
  modified_base (6164)..(6164): a, c, t, g, unknown or other
  modified_base (6178)..(6178): a, c, t, g, unknown or other
aagcttaacaaaagacatgctaggtgggtcgaattcattgagacgtttccctatgttatcaaatacaagaaaggtaaggacaatgtagttgccgatgcattgtcaaggaggtatgttcttctctcatctcttgatgctaagttacttggatttgagcatataaaatttctttatgcaaatgattctgattttaataagatatactcatcatgtgaaaagtttgcatttggatagtattatagacatgaaggattcttgttttatgataaccgtttgtgtattcctaattcttctttgagagagttgtttataagggaagcacatggtggaggcttaatgggacactttggagtctcaaaaactcttaaggttatgcaagatcactttcattggccgcatatgaagagagatgtggagagaatgtgtgaaaggtgcacaacatgtaaacaagctaaggctaagtcacaaccccacggtttgtgtactcctcttcctattcctttgcatccttggaatgatatttctatggactttgtagtaggtttgccaaggactaggacaggtaaagattccatttttgtggttgtggatagattttctaaaatggcacacttcattccatgtcataaaactgatgatgccatgcatatagccaatctgttctttagggaagttgttcgcttacatggaatgcctaaaaccatagtatcagatagagacactaagttccttagttacttttggaaaacgctttggtctaagttaggaactaagttgttattctctactacttgtcacccgcaaactgatggacaaactgaggtagttaataggactttgtctacactcctgcgtgcattgataaaaaagaatttaaagacttgggaggattgtttacctcatgttgagtttgcatataatcattctgtgcattctgctactaaattttcaccttttcaaattgtttatgggtttaatcccattactcctttggatttgatgcctttacctttgagtgaaagagtgagcatggatggaaagaagaaagcagatttagtgcagcagattcatgagcaggcgcgaaagaacattgaagagaagaccaaacaatatgctaagcatgcaaataaaagcaggaaggagcttatcttcaactaaggagacttagtttcgattcatctccgaaaagaacgttttcctaacaagagaaagtctaaacttatgccgcggatggatggatcttttaaagttctcaagaggatcaacgacaatgcctactctctggatttgcaaggtaagtataatgtgagtaatagttttaatgttgctgatcttgttccttttattgcagatgaaacagatttgaggtcaaatccttttcaagtgggagaggatgatgtgataatgggaagcttggatcatggagctaaggagcagcttgaacccgaggagtttggagaaagaaagcagcttgaggatggagagcttggagctaaaaaggatgaagcattgcatgttcttgaaggtccaataacaagatcaaagacaaagctactaaatcaagctatcaccacacttctacaaaagattgagggcagccttaaacaagaagcttgtccaaccacgttggtagtgattcaagccgtttaagcaacaacaatggaggtgtgtgacttgcactctttttccctcctcttggttttgtcccattgggttttccaagagaggtttttaatgaggcaagcccacacactcttttcatggcccattgttgtttttgaagcccattagcaaaggagacatccaaatttcgtttttgtgtttttatttctctagaatgactcttcctcttctctagggctcctctacttctctatatattctattctcttctcctttgtaagacttatcaaactttttattatcaaaacctcttgtgattgtttgatgtgaagggtgtgtaatatctcttcaacttgtgattgctttggtgtgtaatatcctagcaagatcgagcccgaaagttcaagagtctttccgcaactcttggaagtttcacttcatccattttcagtttgttttcagttcatcatcatcccatcttcaacccttcaacttcccacagatccatttattcaccatatcaccatcacttcatcacaatccacacaaagagacttcaagggactggatcttgtcacccaagatcatatcagtagttccttgcaaccttgtaagtgttcctcaagaaacaattctcaacacataatggtcaataattatcatataacatgatcacagttccctactgtggaaaaaggagaagaggtttgttagaaaaaggagaaacattactcgataataaagaaaaattttttgctttgttagaacatattggtgtaaaaagtggaaaaaagtttcaagttaacaaaatagagagtagcattagtagtaacggattcattaaccaccccccccccacccccccccccccccatacttacttcactccgtcctagtgtgaaaataagaatagggatgaatccgtgagaaagataggttaagaacaatgtcaccttggttgtggtaactaaccggatgatctctctccttgcttaacatcagccgtactcggcttagtatggtcaaattcaataatattaatctccatttgcatcttcttcgaaacaaaatcttaaaaccaccaataactttaacataacaaaaaaaaaaatacctaagatagaattgatcttgtttttgtcaatatggccacgaataaaatcaaattcgtggtgacggatggtgtgaatggatggctggacagttgttgtgcttggccgaaaggtggagtgggtgggcaataagcggctgggttttggatggggtcgccgaccattgggatgcacagaatggtcgcaggtcaaacgaatccattggtgggcctatcggccgagtttctacggatctatccttaaagccctttgtttatgttatctttcttatcaatgttgtaaacctttgctcaaaaactttgtatctttttctcctttggaggttgaatgtgaaacaacccgacccatttttttaaacatagttaaatattcccataaatatctaattaaatcaaccaataaagcaacaattaaaccgcaagtcaaaaatactattttatgaataaacaaataattcaaccaacaaaaccaagaatgactaacaatcctaacacaaccctaactggttccaataaccaaaacataagagttaaccaaacgagttcctagatcatcctctcttccttcccatgattccacgatcacactttatctttacctgcatcaacaatacaatgagatgcgtaagtattatcataaatacttagtgaggcgatcctcccatttacgagctatacacacaagcaaataaaagggtataatcacaaatacaacacaaacaaaccagtcatcgaacaattcactcaaaacacatttaccacacctacatatcatcacacaaaacaaaacatacaacccaatcgctcagataagctcatggtcacgcactcaccttaacaaaattattctaacaacaattaaacccaggagagactttccttgcgtctgaaacagtccagaaaggtcctacaacatgtcacaaccaaaagcaacctttgaagcaaactgtacatgaaaaacagaaacaaatagtcttaaagacgaaaccctaaaatacaaactaaccgttaattattaaatccctccggtgaaacgctagccttagacgtcacaaagtttcccacaaaacctcgtgcagatcggaaaccagatgagactatgatcgcagttacaatccccgctggtcctaattcgcgtctgagaaaacgtgtctcactaaactgcgaataaatcaatcaattttaatccaaaaccacttctgtaaactggagaataactacaaaagatttgggaataactctatcaaatttcgtaacttttgacaacgatttgatatgtcgaaaacgtttcctcccaaaccctaacgattctggttcttctccttctcttactttttctcctttataaaacgaaaagtggataactaaagccctaatttcgagtttctttcatttataggcacactatagggtttccaattaacccaaccgattaaaccggacgatttaaatacaaaccctaaccgattttccggttcacgggcgttacaattctcccccactaacatagattcgtcctcgaatctagcttcacccttccactccgaggaactccgtgcaaccatcactacggtccgcactccctccaaccagaccccttctacgtctctctatccagtcgatatactcacgatttactagtcattgttgctcacaactcactctccactctcagaccgcaatcttcgagcataaaccgtcactctcaggcctaggcctacggtatctcgggtatcacaggtattatcttccccactcaaagtcaaaccctgagttgtgtcggctcactctcggccacaaagtcatcgagttacgacatttggagaaaataatacctcaaaactcgctctcgggtcatcaccctaaagcgttctctcagatcgtcacccgaaagccaccgtaccccttgcactctaaagacaccaagtccctcgagttaccggtacctcaggagcataccccgctcctcacgagttgttgggaccctcatgtccctcgagcaaacaatactaaacgcttccgagcatatatccagactctctcatggattcgcgtaagacacctttatgcctcaccatccatcatatgccctcgggaatatccttatgtccaactcccggccatctcgtaaacacacctctttcttaggttgtttactcaaactttccaaaaatagacaagtcctttttgggaaactttccatttttgagaaccgcacaacacattcttaaataagacaactcaagtcaaatctaagaaaaaaaaatattcatcttataaatcatcagatgtcatgatcgttacaacttccactcaggaatgggtaaactctgcaacaggctactcggcacctgatgctcaatcttaactaactggcaaacatcgcactcttcgacccaattagctacatccctcttcatcccgacccactgatagtaccgcttgaggtctcggtacatcttagtcgctcctggatgaatggaaaacatgctcgcatgagcctcactcaagatctcctgtcgcaactccttatccttaggcacacaaactcgcccatgcacaaggatagttccattagctacgaactgatactcaaagccctctgccttagaagccgcaatcaacccctcatccttctcttgagctaaccgaactctactcagaagatctacttgatccacagcttccaatcccaatggctcccttgccacagcacacaaccgcaaagcatcaatctcactcaccaaggccttaacactctgccctggagccgcacccacgcgcttacgactcaaggcatctgtaaccacattagccttaccaggatggtaggctatctccagatcataatcagccaccagctccatccatcacccctgccttaggttcagctctggcttagtgaagatatacttcaaactcttatgatccgtgaacacctgcactttcccgccataaagataagacctccaaatcttcaaggcaaagatcaccgcaaccatctctaaatcgtgagtgggatagttgccctcatgtttcctcaactgccgcgatccataggcaataaccttcccacgctgcattagaacacaacccaaaccaactctcgaggcatcagtatacaccatgtaaggctctccatgctctagcaattaacactggtgtactcatcaacatctccttaagactcatgaaaccctcctcgcaatccagtgaccacacaaaaggaacattcttccctgttagcttactcatcggctgtgccatactcgcaaatcccttgacgaacctcctgtaataccctgccaacccaagaaaactcctgatctcagtggcattcgtcggtttaggccagtctctgatagcctcaatcttctctggatccactgaaactccctttgcagaaaaaatgtgacccagaaaacccatnctctctctgccagnaaactgcacttgctcaacttagcgaacaacttctgctcccacagcttctccatcactctcatcagatgtacctcatgctcctcaggactcttagaatacaccaagatgtcatcaataaagatgatcacaaactcatccagaaactcctggaacacgctgttcatcaacctcatgaacgctgcaggtgcattagtcaaaccgaaaggcatcaccacaaactcaaaatgtccatatctcgtcttgaaagcagtcttgcgaacatatgcctccgctatcgggatctggtgataacccgacgtgaaatcaattttggagaaacaagtagcacccctcaactgatccaacaactcattgatccttggcaaagggtacttcttcttcatagtgacctggttcaaccctcggtagtcaatacataagcggaaactccaatccttcttcttcacaaataacaccggctctccccaaggtgaagtactaggacgaatgaatcccttacccaacaaatcatctagctgcttctttacctttgccatctctgctggagccatcctgtagggtgccttagacaacgacgctgtccctggttccaactcaatcatgaaaggatcagaccgtgatggaggtaatccctgcaacaattgaaacacatcctcgaactcgtgaacaacccgaatgtcgctcactgctacctgccccacagactctggcgtagatatcgtcaccaggtaagcctcgcagcccttctcgatcattttctctacctacattgcgaagattacgagactccctgaggtaggtctcactccctgataaaccaacctcccctctggccgctcaaaagaaactctcccacagtggcagtcaagatgtactctgtaaagatccaaccaatccattcgcagaataacatcatacaactctacagggctgataatcaaatctgctggcatcgactccccttcaatctgaatatccacacccttcgctctccccagaaccgctagaaactgtcctccatcaaccttgacggctccaaactgctcaccaggatccccacggatgttgccgcgcgaggcactctcaaaggtaatgaagcaatgcgatgctccagagtcaaacaacacatgggcctctacaccgcccactaataaggtccctacacaaacttcatatgctaagaaccctaacattcatcacaacacaatgatatcaaaaaacaacggaaataattcacaaagtctgagaaatcatgccagtgatcgctctgtgactggtactgcctatctcactcgtagtgtagccctgtggtgccgctgcaatatgtgctaactgctgcacattctgctgcactccctgctgcacctgcgctccctgctgcaccgccggctgtactactgccactgtcatccgctgcagcttaggacagtttggtctgaggtgtcctctctccctgcagtggtagcactccctcgtctcagctcgctgcgtgcaatccgctaccttgtggtcaaggctcccacaagaaaaacatcccgcacgaccaccctgtccagctctagaagaatgatctcacttcctcttctgcccctgcgtaggcttgccgcccttgctaggtgccacctgctgctgagtcttcttcgattgtaccggtggactcactgccaccacctacctctgaaggtcctcgtctacctcagcagctgtctccaccagtgccgccttcgtggcgtactgcgacactctacaccgcaccctcaaatccggtcgaagtcccctcaagaacctcctcatctaggcctggtcatcctccatgccccgacccgcatacaccaaaagtcggttaaaatcccggtcatacacccgaactgaccgctcaccctgtcttagctcaagaaaacgagcttccataaggtcgaacgcctcctgcggaaagtacttcgcattaaactcggccatgaaatctgcccaagacatatccgcctgcctcctcctggcagtcacactccgccacaacaaatgtgcatctccctctagaaaatgcactgccagatccacccgattctccaccgggcatctgctcaaaccgaagttctactcaacccgcgacctccaactgtcggcctcctcaggactagtaccaccagaaaaatacccgatgccaatcctctgcaactgctctatcatccttaaataagatggaaccgcctcagcaactgcagccctctgctgcacctccaccactcgtggcgcatctggcgtctgcactggtaccacacctggtaaccgctccaacaactgccttagcaggcctgccaaaccaacctctgcaacctgggttcctccgacggaactccggttgcattagctatatcagcaccaagaccgtccccaaccccgtgctccacaaactcaggctgcgaacccacactctgctcaactgttgcactgtggccatcactctcgccggtaccctcgaggacttgtcctctaccgcgaccacgaccacgaactccagctcctctaaccatctgcgctactcaggtacaaaaggttaagaaactagaacaaacgaatatatcacaaagaacttatcgtggaatttcatttaaggttcggagaagatgatggtaggcctccaacaacacacaattgactaaacactccataatcaaaccttagtatgctaacatcctagctcatcccacatcaatcatcaagaaaataattcatcaattaatttttctacacatcctagaattgtgatcgctcttataccaaattgaaacaacccgacccattttttttaaacataattaaatattcccataaatatctaattaaaccaaccaataaagcaacaattaaaccgcaagtcacaaaaactattttatgaataaacaaataattcaaccaacaaaaccaagaatgactaacaatcctaacacaaccctaacctgttccaataaccaaaacataaaagtaaaccaaacgagttcctagatcatcctctcttccttgccatgataccacgatcacactttatctttacctgcatcaacaatacaatgagatgcgtaagtattatcataaatatttagtgaggcgatcctcccatctacgagctatacacacaagcaaataaaacggtataatcacaaatacaacacaaacaaaccaatcatcgaacaattcactcaaaacacatttaccacaccgacatatcatcacacaaaacaaaacatacaacctattcgctcagataagctcatgctcacgcactcaccttaacaaaattattccaataacaattaaacccaggagagactctccttgcgtctgaaacagttcagaaacgtcctacaacatgtcacaactaaaagcaacctttgaagcaaactgtacatgaaaaacaaaaacaaacagtctcaaagatgaaaccctaaaatacaaactaaccgttaattattaaatccctccggtgaaacgctagccttacacatcacaacgcttcccacaaaaactcgtgccgatcggaaaccatatgagactacgatcgcagttacaatccccgctggtcctaattcgcgtctgaaaaaacgtgtctcacgaaactgcgaataactcaaccaattttaatccaaaacaacttctataaactggataataactataaaagacttgggaataaccctaccaaatttcgttaccttttacaaagatttgatatgtcgaaaacgtttcctcccaaaccctaacgattctggttcttctctttctctgactttttctcctttataaaacgaaaagtggataactaaagcactaatttcgagtttttttcttttataggcacactatagggtttctaattaatccaaccgattaaaccggatgttttatatacaaaccctaaccgattttccggttcacgggcgttacagaatgaatgaaaatacaaaatcctttataccaaacaataataataaagtgattaaattttgtaaatccaactaaatgtctaataccgtaacaaatatactagaagatcaccaatgacggaaataaattaataaaacatcgtgaattcacacaactaatatcgcgtgtctcactcaccattcgattcattttttaaagcggcattgtgaagtcttcatcaaaatctagaacatcaaatgagtttaagaactgaaaaaatttctacaaatgattgaataaagtctaaaatcccatattttattccaaaatcaagagaatttttaaaacccacacccgtcaggttttagcactaaacccaaaccaaaaaaatgttcgggtcacggttcaaccggtcggaccgggcgtgaaaatactggtttttagagtttttttgttatttctagactcttttatagtctttttcaggtctttacatgtttgggatgcattttgagattatggaacattctggatcaaaacagagaacttatgatgcaaaagcaatctggagacgtaaatttgcgtaggtgtcaatcgacaccacccctagtgtcaagggacaccaatatctgacggcaattcaatttcgcaacttattgaagttttaaatatatccaaattggccccaaaacttctccttatttttgaagaagtccttgcacggttttagaaacttatatatagattttaaagttcattgtttagacctaacttttgataattttctttaccctttatgcttacttgttcatggaagctaaacccctagggagctccctcttaagaagaacattctaaactctattctcttcttgtttcctacattgatttctactttaaacatgttttgctcttttatgagcatatttgagtagttttcttgttggcttttagagattctcaatagggaattagtagatcgaaaaccttattaggataatgacttcatttatgaaattattattatcttctattttttagattttttgtaaaatggaaaaaaacaatatatgaaaattaaagaaaatttgaaaatatagaaagttttctaaatattttgtcactaaataatataaaaagtataaaaatataaatttctattttattaaatttgtaaaaaaataaaataattgattattaatctttccaaatttattattacttcatctttaagtacaatagccatttaatcacaatacctatctcattgactgatatttttaaaatttacgagtcttatattaattttttttataaaaatgtaaaataagaaaatatattgaagaaagatgtatttaaatttagttatccatatatacatttttagtaaggattctgggttgaaaaatccttagtcaacttcctaattatatgtttagtccttacaaatttaatgaaacaagatatccctttattattaaaagggaagtacaaattgaaattttgtctaatttggcctcaattttgatttcaaatttggattttattctttgctattcaaaattattaagggtaatttggtcttaacaatctcctaaactttataggatccgattcaatctaaaccattcaataaaattaattctcttcaatctaaaccgttcaacaaaaagaaggaatctatatcgtttttgaaatcaaaatatgatcacattccatccctaaaaacactatattcaatcacaaaatcaataatcaataatatccaaatcatatattacgattcttcactaatcactagaaatttttatttataagtttaggatatcaaagttattcaaatatttagtataagaaccaaataaaccgattgcccgcggtaaaccgcgtgttaaaacctagttctcattaggacaatgaacaaattttttatcaacaattcaaatcttgcattaatttcttactaaaaatggatattattaagtagtactaaaaattattgcataatcacttccttaaatctcgacgaaattcattaatgattaattcctaattagtaaaatttaatacacaatcgtaactaaccatatccataattactttattcgaatatttcctaagatttgaaaaataattgctttaaattcttaagatttgcaaaattttataaagatattggtatacattttgttcctagaatattttccaaaaatctcgactaaatcgttccaaaagtctcgaaataagcttttaaatatttttgaccaaatattcatacattctattttatagaaactaataaatactattaataaccatatttgtagcactaaataaaattcgattagagatttgattccaattagttaaaagtctcgaaataatcttttaaatattattgacaaaatattcatacattcgattttatagaaactaaaaaataatattaataaccatatttgtagcatattcctaataaaatccaattacagagatttgattccaattagttaaagtaccaataaatttcccttggccattaagatatgattgacctaatcatgtagaacctatatatactctttaaatttacatctcatcacatcatcaaaaacacagagcaattgatttctaaactcaccaaacatactttcttcctcagctggccgaatcatttgcaagattatttgaaaggaactcgtaccgttttataacgatttataaatactaacaacgaatttaattgccaagaactgtgtaaacaaagaattaaatctagatcataaagtttgtatatacctgaatatggtacaacagaaatatgaaccatgttattcgaggttattttagcaccccaagtgttgtgcctctaccggtatccacatgcatacaaactgtatcaagcctggaatgctagttcctttgagatctaatctcaaaacttagaaaaacaatttgtctctttgtttttagggttttatcaaaaacggctgatctcaaaagtcataatgcatcacttttatagtagcttcacgtaacttaacgcatataaagtcaatgggcgaagcccaatccatgcaacgtgactttctctacgagaataaacaacatattcgtattagtgcacatatgtatatcttatatatatatatattacattatttatttaagtgctcaaatacaaatataagtatatctatatatcatatatatattatatacttttactttaatttatatatcatatatatatatatataataaatcttttaatccaatattagttaatcaaaattaaactcaattttatatttgatccaatttgtttaggtgtgtgaccctgtaggttcgtataatattagaaatgaattataaactcatagattataagctctatctagcaaaacattataaccacctaatattatgtgattgtcaaacctcgacattacaactttaactagaataaagtacaaacgatttcaggactttcccaacaacctcccacttgtactggaatcatttattcccataatccctttgtctctatatctcgatctcagcataaggaaaaaaattgtcatccttattcggctagaccatatttatcgaactccgatttatactgataaaacaaacgactgacattcacctcgtttgagtgcagccacgcatttctcagtatcaaatttttgataggcccaaagatatttatctccgttatatgggagggacaaatcccatcttgttccatccatgttccttaaacaattcataacgggcccaatcactgtctttataatcaccttttacggttgatgtttgacagagtcaaagcgaactaatccatgaataagaactcatgatgaactcaggtcaaaggactatactctatagttgtgatgagaaactcttatgacattcatataacaaacaagatgcacatgtctcataagattcataatcaaatgagttcaaaagtccatcactatgaagcttttgaatgtgtttctcatttatatggcccaaacgacaatgcagagaaaagttggattcaagtgattaaacttaaatctcttggtgcaaatgttatagattggcatgctttggtttagaacatagagctcattctctaatggagcactaccataaaacatatcatttcgatcaaatgaacaacatttgttcttgatcaaaaagtgaaaactttccatgtccaaacatgaaacggagatgatattcttgtttatagcatgaacatagtagcagttcttaagctccaaaaccatgcatgaaggttaagacaaggaatatgtccacgaccaatgtagagactcttgctccattagccatacgtaggtccacttgtcgttcctccatagttatactgttgtttacgccatgcatatttacacaaatgtgagcaccacagccggtatccaattcccaaggagtaaaaccagaagtagtaacatttacttctataacatagatacccgaagaagaaatcttgaacgttttattcttctccagatcttccaagtgttcaagggggtttgatccattcaatttgtccttctcaaagacatctcgaactgaataggaactttgagggtttgacataactgtcgaaaaagaaaagcataaattaatatgatgttcataaattttagaattctcaacaattaaaaaaactaacactatactcaaaacaaatttcctctaatgagtacaatgatccaagatccatattttactagaatccaagtgagttttggctccaccctcaaatatatagttatttaggtaagcaacaccttgctaattggatatccgttgggataagtgtttaacattttgaaattcatgttcatacacaaaatggtttagtaacatcgatacgcatcaagccaatgaataattaatagttttccccattattattggttttgggtcagaaaccaaatagttttcatctaaaagctttgaatgtgaaaagtgctccaccacagcacgcagagatgaaccctcaaaggaggataagaatacatgttggatatgaatgataactaagccatcctagaaggatttatataccgctcgttttgaagactatcatattatatagtcagctattccaacataagggggagaatgtatacagctggtgaaaaagataaatataaatgaattatcaatgatcctcggagtaaagaatgtttattaagagtccaaaagataattcaattacagaatttagcgttgtaattgccagacacatttgctgacccaaataaagtgatgaagtcacttataccagttgtaaattaaatgctccagaatataatgaatgtcctgtaaggaccaatttcaaactgctattgagtcttaagatcgcatgaagcgtaatagaccttggttccaaatattaatatcctcgtaaaagtgaaggagcacaaaattaaaaatgaccaaattgaggaaataaatattttgatgatctcttgaagagagtgaatgatctctaaaagagacataaacatgacacatgaaacattcaagtacttgacaatgaagagatctatctagctatgtcatgtcaaaatataatggaatcaaaagcaaatcgacgtcataatatatttgcatgctatgagcagttgatattatagacaaaaaagaggatcatgaaagaaagtctattgaaaagtgtacacaaagtaatgattagccaaaaaaaaaatggaaaagaagaaatagacatataattataatctctagtagagatatttggactagtactctatgcacatgatgtgtaaaaccagtggaaaataaatgagtctttatgtgaaagaatagtgaaattaatgagattttcacaaagataagaaatgtattatgaagagatatattctcttgtggtggatgtaatattttttaagtatctaaagtctggcaataagagacggaacactggatatgacatttatatgaaattcttgaaagatataatctctgaaggattaatgatatgagaattatgttctctagaactctactcgatcgaataaaaagaaatatgtaacatgacatataatcatataaatatatatttacgttgagtttgtcaaaatatattgatcaaactaatatttgttttgaaaatcattaaaactcctatagagttatcataagtaatacgatgacaataatctatgataaaatatcactagataatgatatttataagtctatatgaaaaccatataattttgatcattaagattatggttattcattccaacgagatattgtatttgattgaaaatcatctcctgaagaagatgtttccgagggggagattgaatgatatgcgtggatgtaccctttttccttatcatagtttttatcccacatgatttttctatgacaaggtttttaacgagacattaaagaacacgcaaataatacacttgatgaatattaggaaattctatcaatcatccaaatgaatattatacactaatgatatttagagaaataaataagatggtcaagatgaatcatctaaaagatgatatgtatatttttcataagaaactattccaaatcaaaatcgtatacttactataattctacatatacatcccatctacgagattttatatgtatatgtgaatataatataattaagtagatattatatatcaattgattaatactgaaacatgttgacctgaataaattaatcaaatacacagcaaaacaactatggttaaaaaatacccattatcatcaatgaaggcgtgaacgtgtaacgaaataaaagtcatcgatttcgtttgtggataaccatatcaattatttatttgtactcgtactcaaataaccattaacaaaagcgaatagagacatatatgttctctatcatatcaatttaattagtatttatttgtatctaatgtacagaaacgagttctagtcatcaattaagaaattcactaaatcttaacatcgtaatctaattatgataaacgaacaagttcaagtgaattgtataattttgtttttctatgctttactaattagatttcataaatttaaacaagttaaaaacaaattacaattattcatctatatcaaaatatggatttaactagagtcaaattcagtattaaaaacatagactttgatactattgaaaggaatttgtactgttttataacgatttataaatactaacaacaaattcaattgcaaggaactgtgtaaataaagaattaaatctagatcataggatttgaatatacctggatattatgcagcggaaatatgaatcatgttaattcgagattggtttagcactccaagaattgtgcctctactggtatccacacgcatacaaactggatcaaacccagaatgctagttcctttgagatctaatctcaaaacttagaaaaacaatatttctctttgtttttatgagttgaagataatttatcaaattttcagagaacataaccgtaataacggtaaccgtggtcatgcctacatttaaaacatattaatcatgccaaaatagacataccatcatcagtcgttaaaacaatttgataaattatcttcgactttctttctcttctctctcttaatccttcagagagagaatgtctccgatggttgtttttggtggcaacgacatgtttcttcacttgcgttggctctcatatgcccaacacagttggttacctcaacgacggtgactggttttctcgtccgatttcggtggattcatctccgccgttggtcggctcccgtccggaattgtctggctcacatagtagaggtgtccggctttcgtccagcaccgtcgcgtttccacggtggcatgtggctagctttctcctatgcatcctctttcctttgtttatctgtgtttttacttttgtttgcttttaataatctcacatacatgggttggtaatgacagtgtaagtaatctagctttctactgttatgttccgatctatttcatgttgagacttaattgcagaaatcaaataagagatctgagaatgatgatgaagataagaagtggaatccgtcgcttattaatcattgccaatctgctgatgtatctttaattggagcctctttactatctaccggtgagaaacccttaagaatccatgttagatagtcctatcatcagtgattctgtcaccggaactgaagctccaacggtggaggttgaagtcggtttgcttaagattgctcatctgacacgtggttatgtcgacgtgtgtttcaggattgagtcaaatccagttttcttcttctgtgagcaagatgaaatcttctgatgggcctatttgggcaaaaaaacattttgtaatcttaagggttcaaaaacggctgcatctcaaaagtcataatgcatcacttttataataggttcacacaacctaatgcatataaagtcaatgggccaagcccaatccatgcaacgtgactttctctacaagaataaaccacatattcgtattagtgcacatatgtatattttatatacatatataacattatttatttaagtgctcaaatacaaatataagtatatctatatatcacatatatattatatacttttactttaatttatatatcatatatatataatagaaatcttttaacctaatattagtttaatcaaaattaaacttaattttatatttgatccaatttgcttaggtgtgtgaccatgtaggttcgtataatattaacaatgaattataaactcatagattataagcggtctctagcaaaacattataaccatctaatattatgtgaatgtcaaacctcgacattacaactttaactagagtaaagtacaaacgatttcaagatattcccaacattatttaggtttgatgatgtgtacaatgtcttgagttgtgtgtgtgtggattggtagattccttgatagttttttccctgatagtttttcccctttcctcttggcttatttgttttataggtgtcttctttgtatcgcacatgtacgtgctgatgggcggtagaatctatcttggcacggaagaaaaaatacgattaggaagttttacggtaagactaagaagcccttttgatgccattgttttttttttattagtgggttaatcttacaacatggctttggctaagtgcaagtgttatattaccgttacttgagagacttcatatcaactttgttgacttattggatgaaagcttgtggtatccgaatccaaaagccatcacctaaaagcagtgtgacattgaaggtagcagatttatgaatagcattgacttggaaagagaagacgaatgcgcgatttgcttagagccttgcaccaaaatggtgttgccaaacttttgagaagacaaagaagatgaagaacacaccaacatcactttgcgctggtgagtgagagagtgagacatagagagagagatcgagattgttctgttcaaaaagcagtgtccgaccagagagaaaaggaccggtttggtctggtttagttcctatgaataattccttacgaaggtcaatttgttaaataactaggatatgataccgcgggttaaatattttatatatttttctttattataaaatagaatttgttgtttgttgttgtttgtgttgattaataattatcgataaagttgtgtatgctttttattcagtcataattatgatattataataattatcgataaagttgtgtatgctttttattgagtcataattatgatattagtaagtctaatatgtattattttatcttctaggacttgacttgtgatatatcataccacgggataatattttattttttatttataatttgttttagaaaaaattatataatttaaacttttggtgttttcagattttaccagtggaacatatgtaatttagtaacatacaaataaaattatacacttaaatgtatcaaagaagaataacatttagaggtgtcatagaagattaacacttatactataatgttgaattttaatatattttttataactaaaaatttaaatatgaattgtatttgttatgttattgttgttggttttgtttagtattgtatagttgcaatttgatttaattctaggaatacacccgtgatatccaaatctgtcccatctaaactcatagcaccatataaactcgtctcatccaaactcgcctactatgtaaacccgtctcatctaaattcattctgccatataaatctgtcccgtgataaccaaaaatcaaattgttctttttctttttaataatatttttatttaagatacttcgagtcaatttacaatttcaatataataagaaaaattgtatgctatttatatctagattttatatcgaattctttgaacaaaagaaacaaaatttcttgttaaatattttgtatcttttaaattaatatatttcctacttgtatttgttttatgttcaatatatttggttttgatatattttagaaaacctgttcaaataattgttaaaatttgaatcccatatatatttatgtgatattttataatttaaagatatatatatatatatatatatatatatattgtttagatttgttgttgagatatttttagtgtctatttttgtttaaagatatatatatatatatatatatattatatatttttttttattttgttcaaaaaagagaaaatatgtatttcaaaaatgttaagtagataaaataaaattgttaagtagataaacaaaataaaattatttttgtaacatggtattataattttttcaattataaattttgaaagtattattagattgacaaatagtgtaaataagtgtaatgtatatgtgacgcttagggttctaatgaggattaaagtattacatgaccatcaaggcctagttagctaaatagtcaaccaccatacaacataagaatccaatttgaataaagaaaacccacctaaagattaattaaaagaagtgaagtcgtagccaaaaccgtcccacaatataacctcgtcctgtgaaattaaacataattttgttattttcttgtaaatttcaaatatttataaaatttgaaacttcaaaataaatttaatatccacccaaactttaccattgaattttgattgttatatctagatttttcccgtaatatatcgtcccgtattaatatttttttttaatatatttataatgtttaaatttcttgtaaaattcaatttataattttgaaaacttcataagttttaaaattataaatatttaaagctaaactttataaaaaagtttgtaaaattagaatatataacttttgataaaaagttaaaatatttataatttttgaaactttgtaaagtttctattctttaaaatcaagaacccgagtaaaccggataaccactttaattttggacgcctgataaatcaagctttctgcttattcttaaccggagtaattttggttctttttatagtatggctctcaaccaatgtccaattttttaagcaatgtgggacattgtaaacatattatttttttatgaattgaataatatatgttcgtttaaaacaatttgaattacatcatatacagaaaaaatataatattttattaactatttttattttatataaattcaaaataaattaaatataagatcaaataaatttgaaagaagaatcatatatttatgtttaaattaggtaaagatgttttaggaaattagttaaggtaaataacaaatatggttaatttagagatattatatatattaaatttggtaattaaattaatttcgtttataattatttttttggtagaaattggtaataaaaaccaattatggaagatccgattagagattttggggtcaaaattgaataaaaaatccagactcaattggattccttaaaatttacttcaaaaatgttgagtagatttaactatgaaatcttattggataaataactttgagtaacatagaatattgttcaaacaacaaaaagggcaaatattttcagataaattgaaaataaaaacatgtgtaaccaaacgggcggtctgtgacggaccttgcttctgttcattccgaggcggtccggtccgccaaagaccgcagacgaaaaaacgaagcccatacccgccccgcaatgcccattggtctaacgggccagcccgcggtcattctcttcagcttcctctgttttgttttttttccttgtggttcatgaatcagcttcctctgttctgttgatgttaacacaatgctatggtggtaaagagaaatctatttcgtagtttcagaatttagcgttcgagtcaggctttcttcgatgtgaaatcatgtgtcttgcttattcatatttgttatcgaattccacatattccacttaaagcgtctttccaagacccatttcatctgcaagtcacctcttcgtaaaccaaatcttagaccatcaagttggaaagacgcttcaagtgatatatcacataaattaaagtatcaaactgaaagctgaaagactgaaacataaactaaagtattaaactgaaagctgaaagtctgaaacataaactaaagtattaaactgaaactgaaagtctgaaacataaactaaagtattaaactgaaattgaaagtctgaaacataaactaaagtattaaactgaaagctgaaagtctgaaacataaactaaagtattaaactgaaactgaaagtctgaaacataaactaaagtattaaactgaaattgaaagtctgaaacataaactaaagtattaaactgaaagctgaaagtctgaaacataaactagtattaaacagaaagctgaaagtctgaaacataaactaaagtattaaacggaaactgaaactgactgatacataaactaaatattaaactgaaagtctgaaacataaactaaagtattaaactaaaagctgaaagtctaaaacataaacttaagtattaaactgaaaatctgaaacataacctaaagtgttaaactgaatgctgaaaacatgaatctcaaactcaactcaagatgtgtcttcaatcttcatcaatatcaagaatcgtcggcatcgtggtcaacaattgactccaaagtacgcactttctcatcttcaagttcaccatatacttcagcctcctctacatatgtcccataaacataacaaaatcaatgcatgatttataattttgtaagcgcaaatattatgaaaattatttgcttagcattttcatatgcttcaaaaccttttaaccaattgcggctgcatattagtgcttgaacatgtttcggtagaagacggcttctatacttgttcaaaactctagctccaatactaaaagaggattcagaggctactgttatgattggaatactaaggaggtcacaagccatgaacgccaatgcaccatagcattggtgttatctttccaatagttcaaaatatccaaactctcaaaatttattgtgtccaatggcggtccaaaacatatccaaagaagactttccactactaacaatagtttctttgcggaaagcaaaaaaatcttgcgagattatttaccaatttcagccaaaaaacaataaagaaacaattaactaaaaccacactaaaaattggaataaacgtttgattacttacttcataattgcataaacaccttttttgtcctccattcttctcactttgctgattagtttcacgtgtttctttagacgatgacgtgaaaatggacttattctcatatgattcaaacaaagttgtcaacttagtatgtaaattttctatctttgtcttagcatcactcttacccagctttgcaaatcaaaattatacaagtgaattagcttgaaccatggatcaaacaccgtagtcattgcaaagacatcaccaacttcttcccaatacttatcaaatctatctctcattgggacaataatttttctaatgatttcatcttgattactcgtatttgataccaatcagtcattgatcttccaaacttgcatgaaatacaagttttaagttggatatgaagaaccagaaattcagattagtgatcacatcaaaaggctctaaaaattcacaaacttgctttaatcagtgccattcttcttatgtagggagagaattgtagttcctcgcatcaatgactttaagattagtaaagccagctcgatacttgagagctctatcaagcatcttgtatgtcgaattccacctagttgtcacatccaaaatcaaacccgccttaaccttaatttataccaacaacttccacacattttgtaaacaatatctcacgtttttcagaagcttgcacaaatttgatactctctctgatcttatgcaacgtatgccctatgtctttcaaccctatctgaacaatgatattgagaatatgtgcagcacatctcacatgaacatattctcctttacataacaaatcattatgtaacataagctgagatttcagaatctcttgtattttgtcattgttagtagcattgtctaacgtgatggagaacactttttctcaattccccaatcctgccacttctgtagaatcaccatggctatgtgcatccatgtatgtggaggcttgaaagcaaaaaacgcaatcatcttattgtttaatttcaagtttctgtcaatgtagtgagttgtcagacacatgtagccttcttgagtagttgcagtctacaaatcagaagtgaaactaatcctgccaggaagctgagctaattctctctttaaattccctgtctcattctcatacaacttcaaaacgtcagctacagttgtgttccgagtaataaacttcacatatgcgttcaaatatttccacactgatctaactttctcatattcaacatacgcaaacagaagatcatgctgaatgatacacttagctaccttctcacgaaaaactatatgatctattttcctagcttgtaattttgcctctgcattgactatcattgtaccaatatcagaattcctaagccgaatcttacacttttccaagtggcgattgtaagatttagtaccgtttttgtgtggatcatatgcataatcattcttgcagtgcttgcattgcgctctttctactgctttcccagtcttatctttcttccagatcaaagtaaaatgttcccaacaatctgcatactgctttctcttcttcggtttcggatcttctggtgttgatgtctttcctttgtcgttgtcgtctttgatatcattatcattgacatcatcatccgcaatatcaattctttgtcttatacgagatttagatgtttcagctccatcaaatcttctttcttcgttttcatcaaatctactacggtggatttcagcctcgatgtctctttgagaatctaagtcaattgatccaaactcagaaaaatcttcagaatcctataataattaataaagtacaaaacaatgaataactgtcgataattttccaatcaaagtacaaaattgattcataaacaataaatcaacttaccattacgaatctatatctcatagactttgtgattttggtttgaaattcttcagacttggagagtttgagaggctgagactttgagtcgttgatgtgatcagttttgcgtcaagcaaattatgctaaagtcgtctttttttttttttccttaaatactaacttcaaagattctagatggtgcaaaaggtttgtttttttttggtttagttaacgtcgttaactaaacaagttcagttaagttaagtgattaagtcaaaagcacttaacttgaactcaaacaagtttctaaagtaaaaaacattacaaagagttttatgacattaagcaattataagacaattcacaaacagaaatttaagtgtagatgatatagagagtttgctgacattacctggttcaaaaacacgtcgattcttctagcacttctaatgatactaccctccaatatatcagtcatttgtataatctctacaaagcatgcgccctttcataaagaaacaatcaagattcaagaatacaaaatttatgttgagctcaagatccaggaattgacattcaatatgcataatacaaaagttttacttaacaagtacgaaacttattactaaggtttttatttttaagcttataagacataaagaagagctcatagttttaatatctccatgttagcctaacttataagacataaagagcatgacctccaagtctaaccacttggagaaattgagaaacaagtaaacaaattaggattataggcatggccaaagaaaagacaacaaggaaaatgttattgagattctttaacctcttcatgttcgattgtctatgcgagaggaagaacacttgttcaatcacacactattcagcaaatctttctccttggttttcattgttcaatgcattaacgggtgaagtttcccatcagaagtattcactaaacctcggcttttgttttgcacttccttggcaaagtcttgtgatgcgtgttttattttgcctcaggcttttacctgaaagaccacacaactactgcaagtgcacagtatatcagagtagtactttaggatcgaatccacaaggagaaaagtaactcagagagatccttaagaagagagtaaagctaggaccaaaataaagagagagggggttgttgtatgtagtgaataagcaaaataaaagacaagtacttaaaataaacgataagcaataagagagaagcgttaggtcttcgaggtttctccggatgtcatggttcaacaataaggtatagatcccaattcatgtgataacatggttaggtttgtttacttccaaattctcagacatacgaaactcatccaagactagatagccctaacggctagtaggtgaaagccggctattctcactaatacctcgcgtactcagttgccctaaaggctagtaggtgctaacatagtttcgagataaagatcaaagcattaagttcaattttgattctagtccataagtccctatcactcggtgggcgtgtaacggttatagttctttatttagttaagttagttcaaacaattatacaagattctgccaagtataaaatacataagatcatgtacaatgtggcgttccggacatacatgcattaagattaaactcaactagaaagaatagtgtaagcgatcaaacaaaatcatagaacctgccaacctaaacttgatctaacgtccccatgaattccccattgaaaccccctcaaacccaactagagatctactcgctcattgcaaaggagctaatcaaaagttgggttaagtaaaccataacaaaaagataaataaaacttaaaaattgtttagagattacttctttgaatgtagaacacaagaggcaaagctccaccttaaagagtcttataaaaaacgaaagagaaatagagagagatggtgatcttcgagctcaagaggtgcggcggcgagttggtagttctcggcaatggctagtgtttgcttgtgatgaaggcacacctagggttagggcttataataagtaattatacttgatggccaagaattaggtttaggagtaagaacgtcaatccgccggataagtaagtgatcgggccaagtagtgggcttcagggaaggagcctaatgacggtggcacaaagagggaaggacttgggcgtgacctaatggtcattggaaagcttctcggatctgcccgggtgcaagtctccttggccggatgctttttggatttattatttccaaacggccggttcttgacatgtattcactcttcgggtcatatctcccaaacggcttcatgggtttgcttcgattggatttcgacgttaattttgactcttctagctttctatgcatatcgaaatatcttgttgtcgtgatggggaagacctcgaccggatgctaaacttctgaagtacaagaattgattgttttttgatacttttagcttcaaaactcttaaaaccgtcttggctcctaaaatacgtgtttctcctcttcttggctctagaatggcaccaaatgctctctgaaacataagaaaacaatagctaaaaaggtctaaaaagttgtggtatcaactcccccagacttagactttgcttgtcctcaagcaaacaaaagaacaaatccggtggagaatttgaaaattgcgggaactctcttgttaatagtcaccgtatctcgaatatatcctacaaaccacattaaacaaaagttgtgttggagcggcctctcaatagtcctacacctttctcgtccttgtccatccgctttgatcctacagaattttgaattcacgtcagtcaactctttacattctttaaaatgtttggcgtggtctttctcatttgaaggtgtcattcagggtagacggagttttgtatgaaaggggaatttggcttttatgtggtggagttaaagtgtttagggttaccgaatagtctcgaatgcaggatatgttacaaaatcgcaagagagaacagatcggttgaggtccatagtttccaaccacttcttctttaaaatacctcctcctcctttacttctttcatactttcggttcccccaaacttagatttttccgagggggctctcttctgtaatcggctcatctctcctttaggtggccatgtctttccttggaactatgctactagactctcttggttgtaatgtttcctttccttcatttttcatttcttttctctttttttttttgttagattattttttatggaaggggaaacaaaacttctaatcaccgagtctaataagcatacctttttgaattggtttcaaggaagaataacctcttaggccgcattgttgcaatctctctattacttccttcttctgtctttgtggcgggaaactgtgttgttcctttctctccgacgtttttgcacatatctgctaaatgaaaaaggaaaagagaatgcatgaggcttaaaaagaggatagagtttacgggtaggaatcactgaaagtgagtggccattcaggatcaacagagagtggtaaaaagggatacgaagtcctgaatgtacatgctcgtttctccgatctaacacctctacatgagaaagaattaagttccggttaatcgtccaatatagggtagagttgacgttggatctaacagaaatttccacggggttaaactttcaggggacagtctgagtgtagtgttcaagattggttgttccttgcaaccctataagtgttcctcaagaaacaattctcaacacataatggtcaataatcatcatataacatgatcacagttccctactggttttgactcaagaaaacattactcgataataaagaaaaactttttgctttgttagaacatattggtgtaaaaagtggaaaaaggtttcaagttaacaaaatagagagtagcattagtagtaacggattcattaacccccccccccccatacttacttcactccgtcccagtgtgaaaataagaatagggatgaattcatgagaaagataggttaaaaacattgtcaccttggttgtggtaactaaccggatgatctctctccttgcttaacatcagccgtactcggcttagtatggtcaaattcaatttaatctccatttgcatcttcttcgaaacaaaaacctaaaaccaccaatagctttaacataaaaaaaaaatacgtaagatagaattgatcttgtttttgtcaatatggccacgaataaaatcaaattcgtggtgacggatggtgtgaatggatggctgggcagttgttgtgcttggccgaaagggtggagtgggtgggcaataagcggctcggttttggatggggtcgccagccattgggatgcgcagaatggtcgtaggtcaaacgaatccattggcgggcctatcggtcgtggcggtgcaacttcccttatcaattgacgtgttggccatcattggtcgagtcttggttggctgagttttgggtcagctgaaccggcgggcgtgatagtatgttgcccgggccgtcgggcttgctcagctgccaggtagggcagctccggccaaagtgtggcacagccgggcggactttgaccaaaagttggcgcgcatgggcgggctccaaccaaagattgggacggccgggccggcttcttcaggctgcgccaattactcggatgagtagtcaggccgtgtgtcacggtgccaagtgacgggttcaggtgaccctctttctttcttttctttttggtttttttttttctcttttctctttttctatttttattgttgtgtttttataaaaacctgaaacaaatactgaaaagatcaaaagcttaaagtctaaatcctaaggaaaagtagctacctagtgggttacctcccactcagcgcgcttgtttaacgtcgttggttcgatatttgggtcttactagccatagtaagacgggttgttcctccctaagcgagttctcttggattggaactcttctgatggttctccagagttcttgccccttgacttcgttctcctttttgtagcgggataaatggtaccatctcgtgaaatactttgtcatcaatgttggggtaggataccttttgattaggccaatccattatggcgccgcctgtggctaggaacgctcctcctagtatgagctgggagggtcttcctttctcgacctttgtgacatggaaatcggtcggtacattgcaccttttgattcgaacataaacattgcggactattccttcaggaaccgtgaaagatgaatccgcaagcccgatccgtaaattcaaaggttatagctctttgattcgaagcttcttcgatgtctcctttgtcataatattgatgcttgatccgaaatcgcatagggcatctttgaattcaacacctcgtatagaacatgtcagaacgaatcttcccggactctatctttcaaagagtgttgaacggtttcaggtggtgtaggcttcctcatatagctccttaatttctcttcttgtttcacaactctcaagaaagaaacggtcaatatggtaagctgaacaagctttagaaaagggtgtacctcgtggtagcttagcaatagcttggttaaaatctctgagtcgtcttaagcttatcatgcgtgggtgccatcgttcttctagaaggttgagccggttgtaaacgcttgttcttcttggagggtcttcatcccttttgtcaatctctccttcttctaggtcatggggttcttgataggtcgtaaccatatcacaagaaacatgagggttggagtattcttcttcgctctccatgggttcattccctccaatgcgtgttgataagtcctcaactttcttatctaaatcaagaatcctatcaagtagctccacatacttccttgaggattccgtggtcacccttctaattgatgctcggatgtgtgatttatcttcaacgttcttgacttggctctcttcaacctcgccttgtctcctaatcacaccctttaaagctacattgataagtgtgtattttgcatgttttgagcatccatttgtcatcactttagcaccatatcatcactgttttatactatttctcatcatttgtcatcactttgcatgtttagtataggtttgcattcatgttgcatatttgtgttgatttcaggtgatttggagcagttgacgagctaactggaagaagcggacctgatcatgtcaaaccactcgaccccgacgtcgagtagaagcttcaagacctcaacagaccactcgaccccctggtcgagtaggggacttcacaatttcatctcatcactcaaccccctggccgagtaccaccacgagagatactcgatcacttcactcgaccccctggtcgagtgtattcaactccaccacctgaccagtcactcgatcacttcactcgaccccctggtcgagtgtattcacctccaccacctgaccagtcactcgatcagttcactcgaccccctggtcgagtgtcttcaccaccacccctcgactacatactcgatggcgagcttcagagtcttcttcattccgcactcaaccagacagtcgagcataaggaagaaaagaagactccagcatatcactcgacctctcactcgaccacatgggtcgagtacagttcttaatctgttccaatactgcgtcgttttgagtattagggtttcagaatattttgctataagtagcatgtgctttatattttcgagaacaagttttttatctagttttattccggagacactgtgttcttaacattttgtaatccggatttctctttatctattcagtattcaatatttgttcttgattttgtttactgttgttcatcatgttatcatcttgctattactctgttgttatcatgttttcattccattcaacgtttatgttttctacaatgatgtctgagtagtgaataggtttctaaggatgggttagagtagtttagaattctcagtatgctaggttgttgagtttgattgatagatcccttctggattagttgttcttaatgcctattgctttctgattaactggaatttgagcctagacatttccgcgcccaaaaggtgttcgatgaaatgactgaaccactaattctagagattcgtggccctgtaccaaggtattggttgcagggagcgttttggctttaacttgttgattcgtaatgcctgttaggttagctctcattaatggtgattgagtctgggactagcttaacttgagggtctctattgcggtggcacttagatttggttaatgaacttgttgtctagggataatttactgagcatgtcaatcacatgtaaactgaggaaacaaaactactcaattatcccatcctcgagaattctttatctgattaattttattgtttagtctactgttgtttactgcatcttgtcatttgttgcttagtttctgcaattctttccagttactcgacctgatactcgaccacccagttgcctggcaacagactgtgcagtcgatcccatgtctatctttgtacaaatctttatttttccttgatttttttgatgcatttggttagtaccttcaggagataagtataaaaagctgagtgaagtggattttggctttgagagtacatcactatactcgaccacagagcaatgaaaaatactcaaccatgttttagcttatccacgcgaggagatcactcaaccgcggtgctggccgcagcaaaagaagggaggtcgagtatccttagagcggtgctggccgcagcaaaagaagggaggtcgagtatccttagagcggtgctggccaccacagagctgatgaggtcgagtatccacctgctggagcttatacagaacagggcggcttgtctatggcctgggagcaatcacagcagccattgacgaccaactccattcattcttcgactgaggtaagcgcctcacttcaccattgtattatatcatctcttgtgatttgttctttattttgtttcggtgattgggtttgtcctgagtactctcttccaagtttattcacacagtggactgtgtgatttaagtttgggggagggctcaggaagtgtgtgttgcattgtatttactcttgagtctgcactcatttaaggcatagaaaaaccaaaaacatttgaaaaatttcagaaaatgatttcacaaaaacagagtgttcatgtagttgcattacatttaggattgagtctagagtgtttcatttaggattgttgcatatgcataggggataatgatgagatagccttgtaagcattttggttcaccggataaactcagtgccctcgtttctagttgtttgttgcgtagtcaatgaaattgaagtaaaactgaaccatgcctagattgctctactcgaccatactgtcatgatttgataccattccctatcagtttgaacctgaatctgatccttaattatcatgtctgcatcaaatttgaactcatggataccctaaaatacttggattttcttattcattttgatcactcttgttaatccaagtagctgactctccttattagagcagttaacccaaacccaaacctagactttctttcaagccctatatcactcgtgagtgtttgtgaggtcttattccgattaagcttggtagaaagtgttaggtttgtaacgacagagatagtgtctcatgtagttctagttcgcatttttcggactagataggactaggtgggtgcttatactttgggttgggatgtgtttaaaaggaaaaaaaaaaaaaaggggggtagattcattgatgagaaaaggtaaaagactctaggtgaagtaagctaaagaagcagaaaaagtctagtaaaggttttgggatttgtaaagaaaagaaagagttcttgttagctattgaagatgggcaaaagccctcagttttaaaatgttaaaaataggaaccttagttgttaaaaaaatccaaaatccgctagatgtatcaaagtgttgagaaagcttctccaagagttaagagaaaagaaaagaatgattagaaaagagcttaaaagattcatgaatgcaaagggtagagttaagttcttatattgggattggagatggaattaccattagagcttcatttgatatactctgggtagatgggatcttatctcaatatgcatagcttgggacttacctttagcattctactaaagcttattcattttttttagagatcccctgttattgaagcctattttgtaagggaccatctttatctcttgaccttttaccttagccaaatgagttcattgatgatgcattacttgattcacgttccagaactaatgaatgttaaagggattggtagatttgaaaacatgtgtaggtcgagcatatgagtagaattcgatcatatcgcagcttagaactatcaacttggacattgatttcatctggtttatttggtgctttggctctgagtcccagctttcaaacctcacctccagcttgttcttaattgtttgcttgagggcaagcaaagacaaattttgggggagttgataagtgtgtattttgcatgttttgagcatccatttgtcatcattttagcaccatatcatcaccgttttataccatttctcatcatttgtcatcactttgcatgtttagtataggtttgcatgcatgttgcatatatgtgttgatttcaggtgatttgaagctgttgacgagctaactggaagaagcggacctgatcatgtcaaaccactcgaccccgaggtcgagtagaagcttcaagacctcaacagaccactcgaccccctggtcgagtaggggacttcaccatttcatctcatcactcaaccccctggccgagtaccaccacgagagatactcgatcacttcactcgaccccttggtcgagtgtattcaactctaccacctgaccagtcactcgatcacttcactcgaccccttggttgagtgtattcacctccaccacctgaccagtcactcgatcacttcactcgaccccctggtcgagtgtcttcaccaccaccactcgactacatactcgatggcgagcttgagagtcttcttcattccgcactcaaccagacagtcgagcataaggaagaaaagaagactccagcatatcactcgacctctcactcgaccacatgggtcgagtacagttcttaatccgtcccaatactgcgtcgttttgagtattagggtttcagattattttgctataagtagcatgtgctttacattttcgagaacaagttttttatctagttttattctgcagacactgtgttcttaaccttttgtaatccagatttctctttatctattcagtattcagtatttgttcttgatttcgtttactgttgttcatcctgttatcatcttgctattactctgttgttatcatgttctcattccattcaacgtttatgttttttgcaatgatgtctgagtagtaaataggtttctgaggatgggttagagtagtttaaaattctcagtatgctaggtggttaagtttgattgatagatcccttctggattagttgtttttaatgcctattgcgttctgatcaactggaatttgagcctagacatttccgcgcccaaaaggtgttcgatgaaatgtctgaacctctaattccagagattcgtggccatgtaccaaggtattggtgcacggagcgttttggctttaacttgttgatttgtaatgcctgttaggttagctctcgtcaatggtgattgagtctgggactaggttaacttgagggtctctgttgcggtggcacttagatttggttaataaacttgttgtctagggataatttattgagcatgtcaatcacctgtaaactgaggaaacgaaactactcaattaccccatcctcgggaattctttatctgatttattttattgtttagtctactgttgtttactgcatcttgtcctttgttgcttagtttctgcaaattctttcctgttactcgacctgatactcgaccacccagttgtctggcaagagactgtgcagtcgagtgtctttgttttgttttctttctgttactcgaccacacccagtgctctacaacgagctgtgttggtcaagtgcttttactattctgcttgaatttctgttttctgcatgttcacttaggactgctagaacacaccaaacctgttattgcttggcttgacttagtgacttctgatcacattttgattgttagcatcacacccattttgattgacaaccttcagtactacaacgacatgatagtgctttaggattaattgatcttacaaacctattatcatacatcatctttcgcgttcttatcttctagttgattaactcgcgattggggtcttcatatgctttcatcaatcccttcggtcttagattggattctccttaggtcatcttggctaatcgatccaaaacctttaccggagcaaggcgaccatccatgtttgtctctagggtcgagttcgtcattgcccgctgctagaatgggcccttcagataaggtctcatgaaacatattttgttggtaacttagatcaccgacccttctttgttcctcatacaaccggtcctcaaacttatctatccggcttcccaagttcacattattgtcggataaggctacaatcttcgcatcatagtccttattcgaatttgttatttgtttcagcaatgccctagtgttgatggcgttatcttgggcgctcttaaggtgtctctcctgctcctcttcgatcttcttgaacctttcttcgttagcttcagcttctttaacccgtaggtcttccgatttcttgaattttacaaagaggtcgtcgactttactcaagagagtaacttcgatgttatcgatccttgcattgagctttcttgtatccaaagctagttgatcaaagaattggctcaccaagatctcaagtctttcttcatgagtcttgtgcctccaaggcatgttagaacggtctcaggttgatatcataggcaagtcgggcggtcggtagtgttgggccggatacctctctttggctcttctcggatagggggtcataaaacgacttggttgggctcttcgggctgtatcaaggtcttcaccaacatgaaaagggaggttagtttgtatagcacccaagcttaccctagggttagcttcttctagagacccaagttgcccgaagctagggtttgcgggaactcctccactggtagtcggattgccatgcaagagtggacattcgtgagctcttcgtcttctccttcttcactagaaaagtcggtgagttcatcactttcttctgaaagtttttcgaatcggtttccttgactctcaaggcaaactttttatttttcggtctcaaggctttcttctttagaattgtgttcggccatctagtcttcttttaatgagatggcttcttcttcttttaagtcctcttcttgctcgatttggtcttggggaggaacattagggatcaaaatccctagggtttttatagggtcaagatttcttttttcggaataagaatttagaacttttcctttttccactaggaatccgatttcttttttgtttcctcctcatatcgggcttgggacttaggaaactcatcttcttcttggcaagattggttgcttttacattccgataattcgtttgatttggtgagcttcttctctagctcttcaatcttccaatctagatgactctctaccgcatcaacggcgaatcccacattgacgattctcgtgttttggtcttgtagatcgtcttgatgattgaggagagtgttatcgatctcaacaagtgtcccctccatatgttcgagtcaattagtgaggtcatcgaacttctcctcaaatttggctttcatctccattagctttaagtcgattctcttcacatcttcttgatggttatcaacaaagtcttggagaagaccaatgcgtctattttctagttcagcagttcggtagggctcattagtttggtaagcataattattcggatgaacatctacactcatcacctcctacaagtatccttggtcatagccgtaacattcatggcgggcagctccataaggatgagaagagtaaggtcctcccacgcgttgatctcttggggatgggacgcaggtggaaggggcctaccgaacggttagcttgtggccgattctaaacgaaggtggcggattgaacacgagagtattgattgttcctgaaagctcctccattagacggttgcgattgccaagacccgccatgcatttgggatgcatcaggcgtgttgtggccaatagagaaatgtgattcgcggtttaagccgtgattcacattatggtagtagccattgggataattcctcgaattcatcctttaaacttcctgaaacaaagaaaaacaaaacaaaaattaaaagcaaagtgtcctagagttcactctaatccttggacttgtggaactaacaatctctccccggcaatggcgccaaaatacttgatgcgtgttttatttcgcttcaggcttttacttgaaagaccacacgactgcaagttcacaatatgtgggagtagtactataggattgaatccacaaggagagaagtagctcagagaaatccttaagaagagagtgaagctaggaccaaaataaaagggggttgttgtatgttgtgaataagcaaaataaaagacaagtacttaaataaacgataagcaataagagataagcgttaggtcttcgtgggtttctccggaagtcatggttcaacaataaggtatagatcccaattcaggtgataacattgttaggtttgtttacttccaaattctcagacatacgaaactcattcaagaccagctagcccagtaggtgaaagtcggctattctcactaatagcttgcgtacttagttgccctaacggctagtaggtgctaacgtggtttcgagatacagatccaatcatttaattcaagtttgattctagtccataagtccctatcacttggcgggcgtgtaacggttatagttctttattcagttgagttatttcaagcaattatacaagattctgccaaatataaaatatctaagatcatgtactaggtggcgtcccggacatacatgcattaagattaaactaaactagaaaaaatagtgttaacgatcaaacaaaacaatagaaaccgccaaacctaaacttgatctaaagtccccatgaattcccctttgaaaccccctcaaacccaactagagatctacttgctcatggaaaaggagctaatcaaaagttgggttgagtaaaccataacaaaaagataaataaaacttaaaaagggtttacagaataattctttgaatgtagaacacaagaggcaaagatccaccttaaacagtcttatacaaaatgaaagagaaagggagagagatggtcatcttcgagctgaagaggtgcggcggcgagttggcagctctcggcgatgactagggttttcttgtgatgaaggcacacctagggttagggcttagaacaagtatttatacttgagagccaagaattagggttaggggtaagaacgtcaatccgccggataagtaagtgatcaggccgagtagtgggcttcaggggaggagcctaatgacggtggcacaaagatagaaggacttgtggatgacttaatggtcggtggaaagcttctcggagcttcccgggttcaagtctctttggccggatgctttttggatttattatttccaaacagccgattcttgacatgtcttcactcttcgggtcatatcttccaaacggctacatggattgcttcgatttgacttcaaagctaatcttgaatcttctacctttccatgcataccataatacctcgttgccgtgatggggaagacctgggccggatgctaaacttctgaagtactggaattgatcgctttttgatacttttagctttaaaactcttaaaaccttcttggcacctagaatacgtgtttctcttcttcttggctcaagaatagcacataatgctctctgaaacataagaaaacaatagcttaaaagggctaaaaaggcgtgttatcatcttgcagttatgatcttccaagaactcatctgcaacatctccgtcttcatcaatctaaagccgcatcgagtaccaacgtagtccttgatccaaataagaggtttgctagtaaaattcttggctcatactttaaattgagtcaattccatcaagaagaactcaatgacccaaatacatataatcgcataaagataattgaataatcttggcaagataaatcgtcttgcttattatcatctttctctaccaatataaccaattaagattctttaaagtctttattttagcatgggtggcttatgattaatactcaaccatctactttcttctgccacaattaatcatacaacaagctaaaacatatatcactgacatggcagtatcttaaggactacaattacaaagacatctaattctataagatcattcagagaattgggaaaaaccataaagaaatgacgaatgtaaagttatctactaaagcatataaagtattgtttataaatcacaaacatatcgaagctacttatgaggccatattaaggtgaaaacaaagcatgaatgtaggctacaaagactactgagtttttcactaactcacaaaccaattcacactccaacttaaagtgattcaaccaaagacatatcatgactcgtcgacgaacaagcatgtctaatgcatcttaacagacgaacaagtgatatggttagaaatttggctggtgtttaatttcacgagacaaggttatatggtgggacaggtttgagttagtataaatacgaggcggcgatacaccgaatgaagcgctttgattagtatagatgaatctgaagcgagttgaagatgacgctgcccaagggatagccacggttcattccactgtagggtagtcttaccattcccaattacttttcccaattcagcttttaataagtctctgcctattccaatacctctccagccatgagaagcatatttgggcgtcttactgtccaagaattgacatgagtgactatacttcccaagcaatactctggcaaggaggcagtcaggattagagagtatatgccagcttacttttgcaagtactgcgtcgttaaacttttatatatcacggaaacccaacccgccatcttttaaggatttggtaagtttcttccatgatagccaacacatttttttcttctcagtattgccatcctaccaaaatcgtgtgagtgctgactggatacgtttgcagaggttgtttggcagcttgaaacatgtcatttatatgtaggcatagcaggaagaactaacttgaggaggagacgtttcccagcttgggagaggaagaggaaagacagacttaatgctctttgcttaattctatccacaattatgctgaaaagatctctcttcttacggccaaacaactctggtagacctagatatttcccctgccctccttctttttctatcttaaactccttttttgctttatcttttgtctgcatttgagttttggaggagaaagttatcgctgacttttgattattgattttttgcactgatgcagattcgtatcgatgtagaatggagaggagagctgcgcaactcttgtgatcatatcgacagaaaaacatagtatcatcggcaaagaggaggtaattaactctggggctacctttagcaactcgtattcctgtaagctctcctctctcttgcgccctaaggcataatcctgatatgacttcactacatagaatgaaaatgtacggagacaaagggtcgccctaccttaatttcctttgaggtttaactaactcatgtagtgatccattaagtagaaaggagtaggaaaatgttcatacacattgtgttaaccattgaatcatttgtgaatggaatcctaactctctagaaccgcttgtatgaagtcccattctagtatgtcatatgctttactcatatcagtcttcaccgccatataccatttctttatagctcccgaggtcttaaaatagtgaagtgtttcatgtgtgatcagcacattatcagtgatagctctttgcgggacaaaggcggattggttttcagtgatgatgttgttgagtgctgtaacgcccgtgaaccggaaaatcggttaggatttgtatttaaattgcctgatttaatcggttaggttaatggaaaccctcgtgtgtgcctatacaagaaggaaactggaaattagggctttaattagccacttttcgttcggtaaaggagacagagagagagaagaagaaggatcggaatcgttagggtttgggaggaaacagtttcggtatatcaaatcgttgtcaaaggtagtagagttatttccaagtcttttatcgtcattctcaattttacagaagtggatttggagttaaactcgttgagttattcgcagtttcgtgaaacacgttttctcagacgcgagttaggaccagcggagattacaactgagattgtggtattgtctggtttccgatcggcacgagattttgtgggaagcttcgtgacgtctaagtctagcgtttcaccggagggattggatagttaacggttagtttgtattttagggtttcgtctttgagactgtttgtttctgtttttatgtccagtttgcttcaaggttgcttttggttgtgtgacttgttgaaggacgtttctggactgttttagacgcaaggagagtctctcctggttataattgttgttagaatcagcttgttaaggtgagtgcgtgaccatgagcttatctgagcgattggtttgtatgacttgttttgtgtgatgatatgtaggtgttgtgaatgtatttttaggtgaaatgttcaatgactgattttttatgttttatttgtggttatacctttgcttgtgtgtatagctcgtacatgggaggatcgcctaactaagtatttatgataatacttacgcatctcatttgtattgttgatgcatgtaatgataaagtgtgatcgtggaatcatggcaagcaagagaggatgatttagtaactcgtttggtatatttttgtgttttggttattggaacccggttaggattgtgttaggattgttggtcattcttggttatgttggttgaattatttatttattcataaattgttatttttgacttgcggtttaaatgttgttttattggttggtttaattacgtatttatgggaatatttaattatgtttaaaaaaaaaaaaaaaacgggtcgggttattttaagtactggtcgaagccttttcgagattaacttagcaataatcttatagtagactgagcatagagctatcggcctgtaatatcccactactttagggctaatgatctttggaattaacctcacaagagtatggttgattctctgtggcaggataccaatgacaaaaagctttgtacttctgagattaatttttctcccactgtatcccaattggattggaaaaagctagctgagaatccatctggcctgggtgccttatctagatgaatggagaaacaggctctttgtatcttttggggcgttgggggtgagattagagtctcatttatctctggtgatatgcaaggccgaagagcttccataacaattgcttctctctcgccctcttgtgtcgtgaacaccgtttggtaatgttctgctatagtttttactatttgttcatcttcataaactgcttgtccttgatcatttgcaataatagagatattatttatggcctttcttccctttgttgcagcatggaaataccccgtattcttgtctccaagctttagctacaattggcaacttctttgctgccagaaagctttttcctcttgatatgctaagctaagttccttgtttattattactatttattctgcagtttgaaataagcttgtcattgcttcttctaattttacacaaagctcttcaatcttctttttgctgttattttgagttttcttgtgccacgagatgattgctcttcaacatgcgcttattcttctttccactgaagcattctcttcctcattccaagcttctaaaagcatttgtttcacctcttcattgtcctttaatctcctgtcatatcaaaatatccctttttgttttttcctaacaggttcaaaggaggtgacaattggtctattatcagagccttcgaaaacaaaaatactcacttcttggacggtaagcctcaacccaatctctattttccattgccctatagtgtctacaccggacaagatgagtgtatctctgacccctccaagaaagaaattaccagaaaacttaagatcatataagtcacattttgacatgaatgacctcaagtccgtaaaggatccttcaggtctgtcaggtccacctttcttttctgagctttcgattatatcattgaaatctcctcttaacagccatggttcacttctctctgttgtttgagctctaattgattccacacttgtaatctctttgttctgtctggttctctgtatacaaaagtagcaaagaagaacttgcattttgcttctatccttgtatcgataaagttttgacatgatgttagcacttcaacttctaactcttttttccacagcagagctaacccgccagcaccaggcgcttgtggagacactagaaagtttgattgatactccatctattgtaactctttgagaacaacatcatcactattttttgtctccatgaggaatagtaagtctcagaatatctttttcctgatatcccttattctgtgaactgttctgggattccccaacccacaacaattccagctcagtattcttaaggaagaggatttaatggattctgaaaatccactcctcctttctttaatgcaggcacaatctttgtccaaggtcccgcctgtgagttggccctggatgttcctgccctttttacggttttggtttcttgagtagcttgcttcagttggagactggtatgggtgttctctttggatctctctgttaccagaaccattttctccgctaggggtgatgcttttccccgaagtagttcgcttctttggtgagttttagactatcaccatatttcttttacttgattaggcccctgtaagctttgaaatattttttgcaatggccttatttagaggtggacgtcctcttttttcttttccaccaagggcacaataatgggagtttcatcgttgtgtaacatatttgttattccattaatctgacttgaaacaggcattataacagattgctctagaggtaagggatcttattgtttattacaggcagcagccgctataatttgagcagcagttttggcattaatcctcttgcttgcccttgagtaaccctttgttttctggcagcactctctgtcggtccgaacagctggtatactggaccgttacttcccttaattctcctattacttgttctgtggtaaatggtgacttgtcagtgagagctaaagccattttttcaaactccttttccagaggtggtctttttgttctagaagtttcagaggaatcttgcctaaaattgtctcttgtatgtgtcttttcacgccattggagctactggttttgggaacttcttacataacttgttgaattttgaatcctatcttagaggtccctagaaccaccacagaagttcgctctctatttgagtagccttctctgggacttgttgttctatactcacgtgatttccattcagcttgactcctttcaacttcctctcttgctgaatacgttctctttgcggaaaaagatgagttcctggaatcattaggtcttcctgagggagtatgataagttttggaatctccatgacacttttttaagaagagttgttagtgtagtttgaatttgcagcaggctcttttggcgagagtgttgtccaaagtgccacagttgagcaaagtgtgggttcacagtctgagtttgtggagcccggggctggggacggtctaggtgccgatatagctggtgcagccggagtgggggttgtggagctgatatcggtgcttgtgtgcacgccgttggtgctaagggcccaggagtgatgggtgtcgaagccggaggggcccaggttccagagattggcttggcgggcctgctgaggcagttgttggagcggttaccaagtgtggtaccagtgtagggttcagttgcgccacgagtggcaaaggtgcagcagacggatgcggttgccgaggaggttccatcttatttgaggatgatggagcaattgcaaaggattggcacctggtatttctttgttggtgctagtcctgaggaggccgacagttggcggtcgagagttgagctaaacttctgttcgagcagatgcctcgtggagtatcgggtggatctaacagtgcatttccaagagggggatacacatttgtggtggcgaagtgtgattgccaggaggaggcaggcggatatgtcttgggcagatttcgtggttgagattaatgccaagtattttccgcaggaggcgctagaccgtatggaggcgcattttcttgagctgacacagtgtgagcggtcggttcgggagtatgaccgggagtttaaccgactcttggtgtatgcatgtcggggctgaaggaatttgtaccggttcataacagatttataaactaatcacaaattcaattcgcagtattcatgtaaatattgaattaaatctatgtcatcagtttatgaatatacctggttagttcgcagcggaaagatgaactgaaataaaccaaggttgtaaagcactccaaatgttgtgcctctactggtatccacactcacacaaactggatcgaacgggatgctagtgccgtatagagatcaaatctcaaaactttggacaaactcttttgtctcttatgtgtttaggattttggcgaaaggaggcgtgacacgttaattaatcgtacaacataattatatacatgcacgagttaggtcaaagaatcattattgggccaagccgaattaccaaactctcaacaatgttcattgtttaataatcatcagtccttcctcttgacatctcacgtgcaccaattatataataaacttttttattttcaatacacaaatagaaatatatgtatatctcatataacatatatatattatattattagtaaaacccaacatatttgttgatccaatctgtttaggtgtgtgaccctgtaggatcgaataatattagtaatgaacttcacaagttatccattataagaggtttatagcaaaacattataatcatctgatattacccgattgtcaaacctcgacaatacaagttaaactagagtaagtacaaatgatttcaggatattcccaacaatgtcccacttgtattggaatcatctattccaataatcctttcatctctatatctcgatcttagcataaggtaagaaacagtgtcaaccttattaaactaaatcatatttatcaaactctgacttatactgataaacaaacgattgactgtcaatccattttagcacggtcatgcatttctcaatatcaaattgtcgataggcccaaagatatttatctcctattatataggagggaaaaatcccatcttgttccatccatgttccttatacaattcataatacgcccaattactgtctttataatcacctgttacagctgacgtttgacagagtcaaaacaaaccaatccatgtataagaaaacatgacgaactgaggtcaaaggactacactctatagttgtgatgagaaactgtgggttctgaaatccacactagagatttgtaattgagattatgagaaaggacggctagatcttcactggaactttgagagttatattgctaagaacgaatggacttttgtattgattgtgactaagcttttacaatgcgaaaggagattacaagtgtaaaagtataagtgtgaatgtaaggctaaattgaatgtgccttccaagtcgtctttgctcccttatataggtctaggcacgtggtagctccgtaagcgatctgtggagatttccttggatattcggcaggtcagttccgagatatcaggtccgctccgcgaaatctccctgttagttcctaggttgttattcgcttatcttccttcatcaggtgaccgggcttatcaggcccaagtacccattcgcgtaggtcctctagttggtggacttggtgggctttgtgggctggcttggtattttcgcaggtggattcctggaggggaatccaactccaacatttgccctccagcccattgagtgagtaggcgaactcgatgagcgaacatataggttaggtaagattgcgaaaatattctagatgagatgatagatatgataagatcagtcggttttgaggataaactcaataaaaacgatttaatttatggttcctcaactgaaagatattgagtagatacgcgagataagttgcggttgacgtggacggctgagatggagcgtctcttcagctcaccgcgtctgacgatccagatcaggcgctgggaagagatctctacaatctcgaaaagcgtggtgatgatggctactttaaataacttcccaccactctacttgatttcacgtcaactcacacgactctaaaggtaacttctctccatcttaactatttactgcgtttatttttcgtttttagagatagaaacttttatcttttctctgctatctccaacgttttcttttttctagtgctcccttctttctggatctgccctctctgttctttcctttatgtctcccgtctttttccttcgaaatcaaaagatgagcgacctagaggattctcagaacaagagcaaccacatttacggcgacaacgagagttcattagagatgatgtcggcggcgtcaccgcagcaaggacacgggcgcgttgtaactctaggtcgaatgggtccaatccgtcgaccgtcgaccagaggcgacaagccgaagaagaaaaaagctctcaagcaaaagggaggcgcgtcgatgacgaacaacgacctggtcaaccttcggagtagatgccaggttccggcggaggtgactatgatactcccaaggccgccgctgtcgcctaagaacgtgtagcccgggtgttgttgtgcttaagccaatttctttgagaaatgtgacctatttttcccgattccggcgtgcatcctcgagatgctctactgccttggcttcgcctttcctcatatgtgcccaaatttcgtctgccacgtactggcgttatttatgcgggcccaggaaataaacaaagaattcggctgccatgacctgcttcagctttgccaggtcaagaccaacgccaggagcgaccaggggacgtactacatcagcgctcgtcccggatctctgatcctaggcggtttgaaggcctaggtcactaacctgggtcagatgaagaccaaagttttgacctttattgtttttgtcgaatccttgattgcttctgttgaatactagtaccgctactaatattgcttgtcttttgatggttttgcagcaagaaccaaagaggttaccctgtcaaaaacggaactccagctgttaacccttctccgacgtggtcagaccgactgggccacattcagcagggatcgcatagtagctgctctcgccgtagctccagcagttccagcaattgcccctccagcagcgcagcgagatctgatcgaagaggtcccgcaggtcgaaccgaaccccgaggaagatctgccttaggtacgagtttcatcatcattttttttgtttttgtgcacgagtcattgtgctagctgcgcgatcgagctgctaaataacaaatgtcgtgctttatttgtccagttcctcccaactccagctttacttcagacctcccgctcatttccagaagaagaatgaggcgaccaagtcttcgtgttcaacgagccaacgctggggctcctgctcgtgctggtgatttatcggtcgcggtaaccgcggctcaaaacaatctagctgtctccagcacatctgcctcggcttctcatcctttgcttcctgagatcaataccgggacctcggctgcagcaggtcaggcagataacaatcaggtcgctcaggtctctgatggtgcaccttcttccccgaagagagctcggacctagccggaggtgcgcccgacgactgagctggtcgtgattgatcaggaggtcacccctcccaaggaagagagggtggaacctgcggctgctaacccggagggagctatgtccgcagacaggcggttatcaagtaggtcccaaggcgaaggccgaggatcaagagtgggggcaggtcttcctcccaaggtctgaaccggtctcaagaagtgagacagacgtccaactctggtgagggtctgcggaaagcaggcccttccactggtcttacactcacgatcgtgatcatccaatcgttgaggacgaggccggattggcgaatctgcttcgccacatcaaagggagcaactgccaggttcccggtgtgaagaatatggccgaggcggcggcttatgccgacatgatggcgaaggagggccaggtaataatcgataactgcctctttctacttccatttttatgctagttctaatctctgttttgcctttggtaggcgatagctgctacgaacaagctggttgctctctatgagcaacgtctgagcaaggttccctcggcaaacgagcttgaagaagagaagattctcattcaggagctgacagcgagtgtgaaggctggtcaggaacgtgaggtctcgttctaggtatgcctcgattatgatttgtttgtttatattttaccgatgatgtgatggttctgacctggttgtgatttcaggcggagaacgagaagttgaaaatggagctatccatttcgaaagatctcgaaaaaggttatgctgagaagattggagccatggaaattaagatcgggggattggaggcagataagcagacagcgaggaaccagatccatcgcttgaatgaaaagaaggacaagctctctaaaagagtgttggacctgacttccactgcgcagggagcgaagaaggcggttcacgatgctaaggttgaactggctgctgcgtattcgaagttgctggctgggatcaaggacaagtgggtcgccaagaaggagttcaccgtgctggaaggtcaagcagccgaggtggagtcaaacttggctttgatcgaccagatcatgaaggctgctatcgatcagaccatggagagacctcggttgcaagctgagctggatgacctggaggcgagatgcgcatcgaaggaggtatcagatttcactctgagcaagctggatatcccgcaggtttcagagatgtcagtggtacgtccgttggacgtcgatgagcaaggaacgccgatcggcttggatgagtttgggagcaacaaagatgcgtttccaggaggtctcacagaggattccggtacggtcttacccacgccaaccgaggaaccgaaggagtgatcacttacactccttgttttaagcttttgtgttttcgtttcagacttagtgtctaggaaggctttcatccttttgtttgtttctttttgaacgtggtgcctgagaaggcttttatcctttgttcggtttaagtactttgatgtttgggaaggcttttatcccttaacatgttctttttgtttcttattcgtgtgttgacactttgtcgattttagtgtgtaaacacctcgtttagttcatgttccagataatacttagactcgtttcaagtccaagttatttcggatgtgatatggtatgttcttcgtaggttcaaacttaagtcagtttgagttggtttatctcggggacctgttgaagtgggtcacacaagggacctgccagattttggaagctgggcttgtggtattgccagatcgcgaatgaaaccttcgtttcttccttgtttaatagatatggttgtcgtaggtgagctcctatgaagtcgaagtgatgtgcttttatgggcaaggttcactgtcgacttttcagaagcgagatcacaaagtggatccgccaacattcgggtgttgggctttaggtatcgtaagattacgaatgacttttaaatcgtagtggaaactattgttttgcaaagcatgatattgagtatctaaattttcttttattcttatctcggaattgttgagtacaaatgaggtaaagcgaacgacgatctgatttctggtcacctagaaaggacctgcttgatatcgagagatggttgaactgttaggtgagcagctaaccttctttgatggaggatgtgatgtccgttttccgtgttgatgaaaaatgtttcaaacggacgagttaagatggtggctgcattcgcggagggaactgcctgcataaccggttggaggattaagccttatcgtagttcgattgaagtggtggatgcgctcttgggtggagctgcctacgtaccctgccaagggatcaagctttatcgtagttcgattaaagtggtggttgcgctcttgggggaagctgcctacgtaccctaccaagggatcaagccttatcgtagtttgattgtttttgagtacctattcgtggtatttcttgagatgcatggcattccaaggccgtaactcaggtaccctgttgataactttctctagcttatagacgccgtcacgtaccacctcggtgattcgatagggaccttcccagttggttcccagctttgtggcgtttagctctctcgtgttgctgaacacttttcgtaaaacgagctctcccacttcgaatctatgaattttgatattggagttatagtagcgggcagcatcttgttgatagttttgaactcggatcattgcttgatctctgcgttcatcgatgaagtccatgttgtcctgtaacatttgcgtgttcaggtacgagttaacaggactggcggtccttctcacgcttggtactatggtttcgacagagattacagcttctagaccataggtgagagagaacagtgtttcttgcgttgattcgcaaggtgttgttcggtaggcccagagaactccgtggagtacgtcggaccatattgactttttggaatcgagtcttttcttgatgttgctaagtatagctttgttggcggcttctgcctgtccgttaccttgtgggtaacgcggagtggatgtggtaagacggatcttccacttgtcgcagaatgctttgatttttcccgaggtgaggttagtcccgttatcggtgacgatctcatatggtatgccatgtcgacgtacgatgttttcccacaataagtcctcaacttgtttctcggttacctgtgtgaaggctttagcctcaatccatttggtagagtagtcggtgaggacctgcagattttttagtctcttcttcccacaggaggcttccatgggtcctacgacgtccatggaccacttcatggacgggtaaggagaagagatcgaggacatttcttcggggggttgatgcagagtaggtgcatgtcgttggcacttatcgcacctgagtgagtgagctatgcaatcggctagcattgttggcctgaagtagccttgctttttgattctaagggcaagggtacgtccactgcaatggctaccacattgtccttcgtgcatgcttttcatgagttcttttgtttgttgcacaccatatagggacatgcgacgctgcaattcatatgtctcccttccatgatgcagtaccttgcactctgggctttgagttttttggcctcctacttgtcgagaggtgtgatccctcgttcaatgtagtcaatgattgggattctccagtcgttgtacaattcaggttcgtacggggcaggttgttcgggggtttcgagctctggctcctcctccgttgcacttgcctccgcagctgcagcgagagctctagctgcggcggtggtgcttcgggttactcgcgtgaagttgcaagttgtcgaggtttccatcccagcatgtttgaccgttaggtcgatgctcgcgtgttctatttcttcgaccgggataattcttttgacgaaaggatctgaagtagaagcgagagctgtcatggcgtctgtagaggtgttttctcctctggatatccttgttaattcaaacgattcgaactgttgggtcaaggttttgaccagttcgaggtacgcttccatgcgctcgtctttagctttgtatttcccgtggaactggcttgtgacgagttgggagttgctatgggcgtgtatttcgcggatccccattccttgagctaccttaatgccagcaatgagggcttcatactcagactcgttgtttgatgcgttgaatccaaatcggaacgattgttcgatgacttccccggtgggggaggtgatttgtattcctactctggatccttgtcggttggaggagccgtcgacgtggaggagccatttcttattagagttggttccatctaggtacgctaacgggagctcgattacaaagtcggctaggatctatgctttcaagctggttctggtgcaatattccatatcgtactcgcttaattctatggcccattttgcaagtcgtcttgattggatcagactatgcagaatggttctgattggttgggacgccatcagtacgatggggtgtgattggaaatatggtctcagtttttgagctgacatgactacggccagtgccagtttttccattgctggataacgggttttagcgtctatcaacaagtatgatttaataacctcctaagtttttataagtaaatcaaaataaacacctaaacatgtgctatatcacatgtccgaaacttactggtgatgcgtgcatccttgggaaacggccgtacctacccctcaaatccattggttccttctcctacttggttatctatcaaatgataatcttactcaattaaggactaatcggcggttactaacactaactaaggtcggaaaacttaccgacttccgaatcagaactttttgcgggttttctcatctatgctaacttagagcgaattttgggtggaggtttcctaatgaggtcgacagtatttatagggttttaggtcggtttatcaagctactacatcatcggtgcctcgcccctagtcgtgcccctcttggcgacacatggcctcgagtcaccgctagagacacccagcgcaatccatttgttgacagccgtcctggggatgctgaggtggcgacagccgtcctagggatgctgaggtggcgacagccggccctgagtcactacctacttgtcggccaaccagaaacagctatgtggccgatcggcatccgcatgattatggcggcccgacataaccgatcctcagccataaaacactgaagaagcttacccacctgcttgtcgcctaaagctggtcgatgatgtggccaacttctggccgcaccttcgccgcacacgcttgtaacgcccccgagcctggccatgaccgtcccgggtggcatcacaaattggaaagaaccagtcgcaactcgccaaagtcctagggttccaagccctcggccaaattgcatatggtcctctctccaccagattctccgcgtaggcttgccaaccattgcggcgaacctagtgttgtccggcttagacaaagccttgtatcatctcaaaccatccgcatttgtaaaacaattgtacttaaatgatattcgaataaaacctaccaaaaacaaacgattagtaaacagatccgcatataaaactcgtaaaaatacaaaatcaggttttactaaagcaactaagaaaaaataataacctaatccggaggccttgcgttcgtcttccctcttgacagccgagactacgggcgcctgaaagaaaagtagaatcatgagtaatctagcattactcagtgaggcgggaccatgcagcacacaacctatggcaactctaagccaactaatgcagttctatcctagagggctaacgaacaaaagcaagcaagaaagaaagaatgtaacagggatcagagaaacatgaggaagcaaagaaacacacaagacacacaaactggacaagactcgatctatcctagactcgacctagactcaacctatactcaacatgtgggccctgtgctccattcctcctcacacaaaacgtcagaagttaagttctcctacatggatccgtcaacctgaccaaccacttgttgaacccacacaggataccaacaagatcatactctatgaacccacacacgataccaataagtctgactcaacctacataggataccaataagtccgactctattaaacccacactggatacagataagtccacaatgcatcgtcatgcaccctcgacctaggttccgaggctaaccaacgagcgttccctttgggaccaaggctcgaaggctccacacacacaagcagaaaatggcaagcaccctaaactagactcaatctatgatccatggattccgcatccacgatcacctagacactcaaacaatgcacatctctcatccgccatggattcgagatggcgacagtcaagcaggacttacaagactcacatacaaagaaaagaaacaaaacatgcaacacaaccaaacaagcaagaaacacataaacaagcaagccctagaaatctacatgcaacacacaaccttgccggattatgaataacaaagacaagcatgaagggtgatgagttctatatgagattcatttaacttagtcggatttttgacatgcatggaaaagatgaacgatgaggtttctaagtgctctacatgcattaagggcatagcttatcaacatgcaaccaaattcgaaaatgatgaaaccctagcatgaaaatgcaacaagaaaaggtgggcgcaaactcacaaactcgactttctcctcaagatcttcctccgccatctccttgaaacgtctcttaatctcctctaaaacctctcgcgaaaactctcattagaactttcaaaaacgctcactaagactcactaaaaactctcgaaaacttctaagtcgttttttgattctcaagaggaatgttcggaagtgaggagggtggtttatatagagggtctggtcgtttggcaagagttagagtcctaagatacttagctcaagcccatcgacacttggcaatgcgcgttccaatcactcgcacatggaagtgaattcggccgtgtggcaatgacaaatggcaagcattttgcatggtgtccgaccaagggacttgggatcctagtctattctcttcagctccacgcgagccgacttggtcaccaagtttgctttatttgacttgcatgactcgcccgaatggattcggctccaagtttccttcacttctataaataacgcaacccttattcgcccactttaccactccaaatacttagacaaaattaatcatcttttcctcgaaaatcttcaagtccctagctctcgaccatagagtcttggtcgggtgattcaactcgatctcttgaccgatgaatcctccaaatccatccgattctttccttccaaatcggatttcttcttacttctgttagctgtggaaaccactctcgtggatcaagtcattttgatttggttcgggtcaagcattcttggatcacactcggactgggatatccgattaccattctcaagatttggccatggatcacaaaggtctcgacggttccttgaaaactcggcccatgagttccacttttgcgtttaacttggagggcttcattgacagctttgaagcgagggcaacataatcaccttccttttcttctttcacctccggagtttttcttcttccatggacttctccttagcccttccccttctccttccatggaagcttacttaactcacgcaaaagtttaaagcttagctcaactcctccggtcttcttacttccaggcaaggggtgctacaacgccggccatgggttgagcacacgtccatctcggccaaactcacggtgccgagggtcacttacactttgtactgcgttcgtactgcatgcatactacgggcgtactgcggacgtactgcgggcatactacaggcatactgcgggtgtactacagggatactacgggcatactgcgggcgtactgcgggttggttttctcatcctttagaaaattcaacgatccaacttagtcttactcaaggtgaggtatattatagttggagagcgatccctttcaatgggagtggaggaacttctatttcattgcaaagatcctaactatgctctacatgtaccttcgtgcccgaggtcaggttccggggcttgtgaatgccccggtcgaggaggtcctgtctgacagtgaagaagacgatgaagaggaagacagcaacccttggaagcgcgtcaagaatgagcccgaagaaatgcagaaccggcgatgaaggagcctgttcctgagcctctcccataaatgtccccgaaattgacttcacttcgcttttattttattttcaactcgttatgggcttcggcccatttttaatttatggaaactttcgctattttcctgatttcgaaatattctttttggagatacgctttaaatggagattatggtccccaagggatacaatgtccttataaattgacactttaacttttctttattcttcacctttctctctttctttcgcatgcatggaattcaaccttcgatgttcggaatccatgctagatttctccagggtcagaatgattgatggagatgtgccaaatgtgccaagaaggcgacgctctccacctcgtggcttcttcagatcccaaatccgagctccatgtgctttgatcaaggacctcccagaaagtgatcaataaatcgcgatggcattcataaaagcactcgtgataaaacacctgaagcttacgctagagaggaggaagctccaaaaaaagattcaccgaattcaacgagaagaatctcctaatccgaggttgggatctccgagtttgcatgcattccgaattgttcttctcatcgagaagaatctcctaatccgaagtgcatgtgtgacgacactttgccttattttcttattgctgaataaatgtatgttcgcatagtcgaactttatttgctttgttcgttcacggagtcgaactcttttttcaatgccaaaataatataaaatttattagtagctgaactcgtttcccagctgcctacatacccattgcgggatcaatccacaccgtagttcaagtacaacataaaaaagtgtgtcacttaaacataaaacttcttcacattgaccacgttccaaggacgctggattggcctatcttctaagtcctttaacctataaacaccattccaaaccacttctgtaataatgtaaggtccttcccaaataatgccgagctttcctactcctttttcctttatattgtcaaagactcgtttcaacacataatctcctacaaagaaggcctacttttgatcttggcctcatcatatcgagctgttgcctgctggtaattttgaatccgaattacagcttgatctcgcctttcattgatggcatctagcaatcatcaagcattgctgaattctcttcttcattcaaaggtgcttctgttcggcaaagtccgggcacgttgagtttggtcggaactactgcctccatctcatacactaaagaaaatggagtctccccagtagaacacctaggagtcgtgcggtaagcccacaagacaggttggagctcattgtaccatccccccttcaaatggttcaggtgatttttaagattgcttaggattgtcttatttgcagcttcagcttgaccatttccttgtggataccgcggggtggagtaactgactaaagaaaatggagtctccccagtagaacacctaggagtcgtgcggtaagcccacaagacaggttggagctcattgtaccatccccccttcaaatggttcatgtgatttttaagattgcttaggattgtcttatttgcagcttcagcttgaccatttccttgtggataccgcggggtggagtaactgactttgattctccaatccgaacaaaaagcttcgaattcgtgcgaaatgaactgtggtctgttgttagtgactatctcgtatcggacgccatgccgacatatgatattcttccaaatgaaagtttcaccgctgaatccttgatattcacatatgcctctgcctcgatccacttcgagaagtaatccgtcaaaaccaagagatattgtatgccacgagttgacatgtgcaatggtccaatgatatccatcgatcatctcatgaacgggtacggggcagagatggaagaaaataactctgaaggttgatggattaaaggtgagtggggttgacaatgcttgcatctctgggcaaacttaacacaatccataatcacagtgggccaatagtaccccattcttataatcttgaaagccatagcctttcccggcgaatgactcccgcacagcccttcatgcacttcgctcatgacaatttcgagaacgggtccaaaaatgcatagaacgtaagggtcgctgacaccttgattatataatgcattctttgaaagaccaaactttgcgctaacgattctcattttccttgcttgccacttgttttttgggagcttgcccgtcacaatgttgtgctttattggctccctccaatcagccccccccccaatctttagtcgtaattatcgatttcatgaaatatttgtggctctggttcaagatgctcgttcaagtatatcctcttcgacaagtggctcagcctttataaccgtttctggaattacgtcttctaccaggataacaggctcttccccgctgctttcatcgggtgcttcattagtgtttggactttttgctttccttcttttgacgggtggtaattgatatggttcaaattgccttaaacctactctctagaaaagagatcggttgcagtatttagggtcgaatttcctcaaagttcttttgttcacacaatgaatcaaatgtcaagattaagctagcatagaatgattgaaataaaaagtaaacaaagtaagaagacagcagattgaaggttgtgtaacgattaaataaagagataggagtagggtactctcaggaaactattggttagtagatctaatgatagctagggtgttattgaaccattcttaaactcaaactctaattatggaataaccggtgacgttccgcaaaactccctatgcctatagttaagaataaccggagaagtcgagagatctttaacttaaacatgcattctaagctataaaccagactcatcaaataataatccaactacatatacctatggcaggtatatctattgtttggcaaaatctagttaattattctaaatctagcattaagaacaattaaagatgaagaattctatagataatctagcaaggggggcaaatctattaaaccatatgaatccttaatgagaaaccctattcctaacaggaaaactactcagacatagtgattgaaacaagcaacataactgagtaagatagcataaacacagcaaattagattagagtatgaaaggatttgttcactctattgggaactgaatgaatctctgaaaatagggatgaagagcttatgtctctctggaatggtagaaaagaacttaggtctaaacaaggacctctaaaactatatatatgccctataaaacgttcagagaccaataatgcaaatagggaagtcttttggggcaaatttgcacttttataaacttgtaaacgtcatggactttgcttccaggagtgtgtctatccacactctctctgaatctggaactgaaatcgtccttagcttccttccccttagcttttgttccaaaatgtctcctcatttccattgttgtccctcctcacataatacctgaaaatactctaaaaagactcgagaaataacgaaaagattcaaaatcctaaatctaaaacatagataaaatcagtgaaaacagggttatatcaacttccctagacttagcttttgcttgccctcaagcaaaacacaaaagcagaacccgtggaagaggttttgagaacaaaggaactcccaacattctctagcatattgccatgatcatccaaactaaatccatatgcctaaaaagtctaatcaaatcctaaccaacatgtacttccctccaaccttacacaacattatcgattccataccgaagttccacaactatatccagcaggctttcatcgctgggtcacatcaaacaatctaacattcaagatccttctagactcattcatgtactataccatgataaatcgaccattctcttaaaaaaaaattattcggtgttctttttctcccagacttattctttttagataataaacaaaggggaacttgcatactggatcgacacctcaacatttttccaacctttataattgatcattccaaattatgaataataatggggtcataggaaacattcctacccctatacactatctgaaaaaccctgtcaatctctcatattttttataaggggagtggaacagtatctttatcacattcggtctctatatcaggtatgaacaaggagtcaagatttatgaatactaaccgtttgaaaaggtaaaaggaagagcagtgagagtagctccaaccttagtggttgtgttggaaactaggatatcctcaagtcaattggtttgccatatagattttctaatagtcggattgagtcgaacctgcagcattcatcaaccagacaataatcaagaaaaatatagatcatgattcgtaactaaacttaataaacgttttttcttttttaaatgaaaagaaatgactcaataaactgaaaaacaaaaaataataagaatcaaaaataaaagcataattagtaagaacatcccccagacttaaacgagactgtctccagtgatattcaaatccgaaaaagcagaaataataaataaaaagaaaaagaaaatagaagaaaggaaaagaaaaattaaactagtgggttgcctcccactaagcgcttgttttgagtcaatagtttgacttggcggagttcaggatgtgggtggagtggtggaggatttctgctgcatccttgccttccaagggggtgtgtaaattgatctagtctgggtagctgcaggtgttgatcgacaaagatggttgtgtcggtcgacactctcctcgtttcctgcaagaataacagaagaaacaagctatcgaggaactcgaggcttgttaactagtgaagcagacttcgaaaaatctagagaattaatcgaaggtgaaataggaaaagggatagaggagaacttatcacaaagatccgcaatgggtgtgagttgagagagttcgtagaatcctctatcactgaaacccgagggtatcgatcgagaagaggggtggtgtcgatggacactgttgctctacaactcccatttgcgagcttaggttaatggagcgttgtaggtggctttgttttgggactctaagcagtctaaggagatgtttcatggctggaggcaatgctactgataggcatagtgaactttgaactatccatgccaaattccatctccaaatcacaaatgttgagagagatcctacctttcttcacatcgatcctagcaccagctgtagctaggaaagctcttccaaggataagaggatccttgggctcgttattgtagtcccggaccataaattcagcagggattaaacaattaccaaccttaaaaggaactcctcaaggattcgttcagggatgcgtttggagcgatccgcaaaaaggagagtgattttagtcggcttgtagttagtcatgcctaatctcttagcaacagacttaggcatgcagttgatacttgatccccgatcacacaaggaatttatgaacctgctagtggagttagagcaatcaagaacaaatctacctagatatggagcttctcagtggtctaatctagagtgatggtgcagatgtactcagcaatgtccaccctctatgtgttttctttcttggctttaggtagcatcatggcactgatatcccttgtcagcagtttagcttcctcatagctaattccattgtcaacaaggcgcttgacatacctgttgagtggagcagaggatgtctcagaagtatccttaggaagtgaggtgaggatcttttccatgatggttgtgcacttagcagcatgaatctcctgcttagaacaacgcttctttggataaggaacaggaggagtgtaggcagattcgggctgcatcgggattctcacctcatatggtgcagtccggacccaatgtcgatcgacaccttcgtatggaatcgtcttagaaaatagtgttccatagggtgtcgatcgacactagtaggtgtcggtcgacaccagctctgcagctgtgagctccaactcgtcttcagtgtccaattcctcccactcatcatctccatatctgaccaagatgacattacagctcttcctagagttagcatcaaggtttcaaggaagaaaaacttcttgtcgcttgatggattgtgcagtttgagctacctatacatctagtttctttatgtgagagctcagattgtcgattttcccattaagatctgagtagacagcatgaaacttgccatcaaactcagcaacaagcatggattccattcagctctcttatgagggtggaggggggcctggtaagttgaattaccattagtcctcttgaagttgctctaaagaaatgtctactggaacgcaggctttgaagtgtagttcgaggaactctagttccctgtaaacctgttgccactaaagttgccctgtggctgcccaaactttctatagccttgtccatctaggtagaagactctctcttcagactcagtttcaggctcaatggtctcatcctcagctgcaaaggggacatgcttcttccctataagcaagttgtgaaccgaatccagcttagcatgtacctctgccatctgatttcctgaaacatcaccagcaatcttcttcctctcaaagtcagcattcttagtattgttgctgcaagcaagattctctatcatagcggtagcatcagccggatcacgtgtgttgaaattaccattgctccttacatctagagccatctggtatctccaaccaactcctctaaacaggtacccaaaagttgtacctcactaaaaccgtgatgcgggaagtcatgttgatattccttgaatctaacccatgctgctttgaaagcctcagctagatcttgggtgaaggtagacagcttgtttccgagctccttagacttagcatcatcattgaaattgttcaagaaagctatcttgatgcttctccaaatcttgagggaacctgcttttagttgttttagccaagaagcgatttccctagcaagtgaataagggaagagcttccacagtagatagttagttctcttagactccattagctctgatgctcaaaacgagttcctcaaaacgagttcctcaaaacgcttgatgtggtccattggctgctcatgagacaagccatggaaaggatgctggccaactaaagcaaagtagccaagctttagctcatagtcgttcttctggaaaggtggggatacaatcgctgatcgataatcatagaataagtccgacatgttgaaatccccaagagtacgatgtggatccgtaacaggaggaatagctataggaatctggggttggtgtcgatcgacacctctgttgtgttgttcgacaccaatcgcatctgcgttctggtcatgaaggtgtcgatcgacacccagttggtgtcgctcgacaccgagccctgcagcgtctctgacagctaattgcgcattgaggcgcggctgatcctcattggcgtcctcagggtcgatgagtccatgatcatccaatctttgaccagcctcattttaggcttgcccatcctcatctctcaaactccttcctcatcagctctgatgactctgttagccattgctaatctctgaattttgctgttggtacgttcgagttttcccaagttaagaactgacaagttgatcaactccttctattgtgtgctctttgtttgcctagacatacacctgaaacacagaaaagaagaaaacaagaaacgcgtgagtaacaaaataaaagtaaaaactagacgaaatctctaaactaaactcaatggtgattaccaagaactttggcaactgcgccaaatttgatatggttcaaattgccttaaacctactctttccaaaaagagatcgggttcagtatttaagggtcgaatttcctcaaagttcttttgttcatacaatgaatcaaatgtcaagattaagctagcatgaaatgattgaaataaaaagtaaacaaagtaagaagacagcagattgaaggttgtgtaacgattaaataaagagataggagtagggtattctcaggaaactattggttagtacatctaatgatagctaggttgttatcgaaccattcttaaactcaaactctaattatggaataaccagtgacattccgcaaaactccctatgcctatagttaagaataaccggagaagccgagagatcttcaacttaaacatgcattctaaacgagttcgattgttcaccttagtagataggccgattcttattacacaactataaaccaggctcatcaaataataatccatctacatatacctattgcaggtatatctattgtttagattcaagatctagttaattactctagatctagcattaagaacaattaaagatgaacaattctaaagataacctagcaaggggagcgaatatactaaaccatatgaatccctaatgagaaaccctattcctaacaggcaaactactcagacatattgattgaaacaagcaacataattaagtaagaaagcataaacacagaaaataagattagagtatgaaaggatctcttcactctattgggaattgaatgaatctctgaaaatagggatgaatagcttatgtctctttggaaatttggtagaaaataacttaggtctaaacaatgacctctaaatctatatatatgtcttataaaacattcagggactaataatgcaaatagggaagtcttttggggcaaatttgcacttttataaacttgtaaacgtcatggtctttactaggccgaaactggtgtcgatcgacaccaggagtgtgtagatggacactctctctgaatatggaactgaaatcatccttagcttccttctccttagcttttgctccaaaatgtctcctcatttccattgttgtccctcctcatagaatacctgaaaagactctaaaaagactcgagaaataactaaaagactcaaaatcctaaatctaaaacatagataaatcagtaaaaacagtgttatatcagtaattctaccatgggcacgtgtcgctgctcgagatctgtaatgacgagagtttcctttttgtctttaatgctccactccgagatgcattcgactggaatgattctttataactcaggatccaaagttgatgctaatatggcgagtgcattcgccggtgtattctcttttcgaggtattcgaaccagttcaaacttcttgaaacttttagaaagatctttaactacctcaagatatgcttcgattcttgagtctttggcctcatagtctacattgaactggttaactactaattgcgagtcacaataagcaaccacttcttcagctccaattccttgtgccagccgaagtcgggcaattaaggcttcatactctgcctcattattagaagcactaaatagtagacggaatgactgttcaagaatttccgatgtgggtgactccaacttgattcccactccgaatccttgtcttgatgaagatccgtctacatgcaatttccaagtctgactctccggttgttctggcgcaccaagtacttagttcggttaggaaatcagctaaaaccttggccttcatgctgacttggcttttgaactttatattatattcagtgagctccactgcccacttcaccaactgttcagactgacttgggctgtgaagtattgttcgaagtggctggttagttaactcttcgatagggtgggattgaaaatatagacgtagcttacgggctgaagtcaccaccgcaaatgtgagcttctccatcattgtgtatctagtttatggatctgtcattgacttgcttatgtagtaaatcggcttttgttcgttgtgatcctcccagattaggactccacttactgcatgattcgacattgaaacgtaaaaatagagcctctcatccagttcaggtttggacaatacaggtggagtggttaggtacgctttaagctacccaaaagcttcttcacatttctcatcccaaggaattctttgtttctttttagaatttgataaaacggtaaagacttatctgttgatcttgagataaaacgattcaaatttgcaatcctaccaatcaatagttgtgcttctttgaagtgttttggagatggcatgtttagaaatgcgttgatttggttcggattggcttcaattcccctttttgtcacaatataatcaaggaattctccggacgggaccccgaaagtacacttcgccgggttcagcttcatttgatattgattgagaatttcaaaacactcctctagatgcttaaaatagtcttcttttttcaacgacagaccaacatatcagctatgtagacttcatcatttttccaagatgcttgtggaacatcttattgaccaaccattgataagttgctcctgcattttttaaaccaaaaagcattaccttataacaataaatacctatgtccgtgatgaatgatgtttttttcttgatcctcaggattcatcattatttgattataacccgagaaggcatccatgaaagttaacaactcgattccaacagtaggctccacgagtcgatctatatgcgggagcgggaagctatcttttgggcatgctttattaaggtttgtgaagtcgatccacaccctatcttttccattcttttttttaccacaatgatatttgccacccactctgggtactgtacttctcttatagatcatatcattaaaagattgtccacttcgtcgtttacttccttcgctcgctctacgccgagttttctccttttttgttttacaggcttaaagctcggatccacgttcagctcacgacaaattatgctcggatctgctgctaaccacgcaaatgaggtcttgtttttcctcaaaagttctaccaaagcttcctttaatttgccggtcacagtagcccaacctcaaactttccgatctggttggtcttcctctaatatcactttgatcacgacatcatccactttttgcccactaggaaatcttggaattactccattcttcgcgagcttcgttaattgctattggatcttcaaaccgtggctacctagataacaagtctgcgaagcttcttgatctcctcgaattattttcactctgttcggggttggaaatttgatgcattgatgatatgtagaggggaccgccttcatttgataaatccaaggagtcccaaggatgatgttgtaagttgctggtttaacaaagacaacgaagtcgaggatttttgatatctttccggcaaaaactggtagcttgatggttctgagagacatggctgactaacttgtaaccgccaccaaaggagatggaggtcctaacacctcagcccgactaatccccatcctttccaaagtacttagaaaaattaaatccaccaaacttcccgtgtcgacgagaattcttggtacttcgtagttagcaacgtccaaagtaatgactaaggcatcatcatgaggtctttcgaggttccgggtttcttcctcatcgaatgatattaaagaaacttgaaagtgaacttcttcacttaagcttgctttaactaaaacatttcgcctatgcttattgatagcattgatcgaatctcgacaaagtttggaacctccaaggatcacattgatctttccctctgaactccttggttcttcttcgttggacgacctcggccttttcacgttagggttttgagcttcggagttgtcccttgcttcatgatattttttcacgaagtcttctatattgaatttagagagatccccgcttgcccataattctgcgagatatcttttaaggacactacagtatttagtcaaatgcccaatcactttgtgtatgtcgcagtacaaactttcatctcggacgcaagtgttcgactttcctttcccttggaaatgcttcgtgacgttattgttgaagggttgtgatccgaattttttaggtccttggttatccgtgggctcaaatttctttgtagggaatgtgacagtagggttcgcttgcttattccttttcgaaagatctcttttttatcttctacttccatccagttgttagcacgaaaaagcgcatcttggattgtatccggcttgtgaagtattagatcctctttaaaccttgaatcgtgccacaaacctttccaaagggcggacaatgctgattgttgtgatactcttgggagctttgaaagcacacccttgaatttagtaaggaaagctcgaatggattcatttggtccttgtgatatattacaaaggtcggtgtccgaagtgcttttatccataagtatggagtttatttcaggaacaaagctgacagttcgttgatattgctgattgatcctggctccaattgggtgaaccacatcagtgcttgtccacacatattctcagaaaagagtttgcagtatcccgcgtcttcttcagcttcatccaagtcgactcgtccagcgacgatcaggaacgctgtgagattgctctttgggttttccaatccgttgtaaggctcaagattgagtttccatgaatctctgattttcaagcttacgatttgtggggtaaaaggtgtttgcgagtttcttcaatgactcgatcgatatccggctccgaactagtggcctgatggaacttcgatctcatctctttcaattctcggctaacatttgtcatggtctcgaattggtcgagactttcttgctcgtgctgatctgttagttgatcatcatctccgagctgcgtctccccatcctcccgctgaattactttgttagcggcatcatgagttgtctatccgctggtcccattttgtgtatgggagctcggcgaattgaacattctccttcggactccaagaaggtttcctgcactcagagaatgaacacgagattgtatagtactgacattttggctaagaaatacatgggttgtttgtagcgtatcaacagctttttccacatccaagaacttttgtgtcatttctgacatgatttgcagcatggttttgagagtttcggccaacaatgtattgagggcgtcttctttggccattgatgcttgtctcaaaaatgtggtgaagaaaatttgacgactcaagaatcctccgtccccactggttgcgataaaatgtggtgtcggattcatacactcaagtatttatttatttagtgagaagaattatttttgaggacaaaaatcaagtgtaaaaactatgaaatggtatgaaaataactaaagtgtatttgttaataaaattgcccctcttttacatggctcttggccctcttacttatactagtacatcacatttaattctcaattatacaccataattttcctttaaatgtgtctgtttcagtctttgggtttaatgtttaaacattcgaatttgaattgactttagacttcgtgggcttcgcctttcgatccaaaaaagccgtgaacaaaattgtctttaatctcgagttcgtatccacctcacagcatggccacctcgcctatatcctctcaactcaaggttctcatgggtcctatcctttgtggactcctcttatgcctacatggcaatctttggttggtcccgaaccattggtgtagaatctgataccaacagtaacctccgttgaactgctgcttagaggcataaccttggttgtactgaacaaatggcataaattgattctgttgtggtggatacacttgatcttgggggtttgctacattagtgcttctgtaggagaggtttgggttgggcttgtagttgttgtagcccttgttgaaccctccttggttctcaatgtagatgatctcttcagtttgatcattctccccccttcttgcatttggaagtgctcttcatcagtgatgtagagtatctccttctgctgagccagcaacagtttgtctagcttttcattcaaagccttgatatccttccttgtctatcctcagtttctttagttcgtctcactgatcggtcatagtcttcattgtaacacccatcagattgtgccagattttcaactaactctcatccttcttctacatccttgttcaggaagtttccattggaagcagtgtcgagcagcatccttatcttttgtaaagctcttcggttagagtgtgctcaataaagaagctctcttaaaaccgtgatgggggcactgagtggtataacttttaaacctctccaaggcttcacagacagtttcattatttttctatgtgatgcctgagatctcgtttctcaccctagctgtaagagcattagagaagaacttggcaagaaatgctttcttataatcatcccatgaactgatggagtctggaggtagagtcttctcccaatggtgtgctttgtctcccaaagagaagggaaatagtcttaacttaaacccatcttcagtaacaccattgatattcagctacagaccctatcaaagctgtcaagatggtccaaggggtcttccatggaaaaaccatgaaatttgtttccttggatcatggagatgagaccgctcttgatttcaaagttgatattttgaactggcggtggcactatcccttgcctctggtgatgattccttggggcatcaccagcgccaatgtttcttggttgatcaacattaggtgggtcttgtatctcaactcctttgttctattgatccatagcagctggtcttttttgatcacagtatgcctttgctttttgtaactcacgagctattatgtcaattctatctttgaaaggtagtaggtgtgcagatcctttggaccgagtttgcatgcacaaagaattggcaagcagacgaaaaaaatgtgtttttaacttgagtaatgtaaaagaacttgatcttatttttttatatatatattttgaatgtaacaatgcaacaatgaattggcaacgacgccaaattgataattaggtttttacgcctaactatgttgtgaaatttgatttccccttaaacactaacatgttgatgcagcaacagggggtgtcaattcagtccactgtaattgctagcaatcaagatgtgtacataagcaactaagtcaagccaaattataatgattgggtccagtagaaccaacatgtgataaatttaagaactaaagtgcaataataggtaactcaacaggtgaatgaaataacaatagaataaaattgcaatcagtgggtggatacggataaatcaaagaagaacagaagtcctaaggatggattcattgacaagagtaactctagggttcatcaggtgactaacaggcaaaaggcaaataccctagacaatagattcaaaaccagatcaatccactctcataccattgatcctcattactttaccacttcctaatctcaagtctcgttgatgaaatatagcaaagcaggttttaagcaacaatctattaaagtcaataagcagtctaaacatccaatcgtttgcgctagaatctacaaatctctggaattcgtagatcagacatccatttgaacgtcttttggacgctggaataccttgggtcgaatttcaaactaaactgagtgaaataagcgttagggtcaacgaatctagaagggatctaacctaatcttcaccacctgaataacctagagattaacctaatataattcatcctcaaaaaccctaatcactactcaagcaacataatcaagaacacaaacccataaattactcatcaaaatgtagatttaaacaagataaacaactatactgaatgaactaaatgcaaaaacgaaatagattaagagtaattaaggtttcaagattctaaaacacaaagaaaaactatagaataaaagtttggtcctttggacaaaccccaaagtgacctatttatagtaaaatatgaaaaccctaaattcactagaagacaagagacttgaggcggtttagatgaatgatcgatcttgggatcaagcaaagagggtgctgcaaagcctgcgcctttgcctcgatgctacgagtgatcaattggtcgagtagttgcttcttcctctcctcttcttatgctcagctgtctcgttgagtggggaatgaggaggatctgaaggcaccttgaacgatcaacaagtcttttagaatccattgcccttgatcgagtatttggtcgagtagaggatcaagtaaagggtcgagtggttatctactgcttcctctatagatgccttgatagagtgattggtcaagtgaattgctctgctgcttccctcctggtctgataaagtagaggggcgagtgatttccttgtaacctccttttgaacctgaaaacacaccaaaacatccttagctaaatgatgacgaatacattcgtaaactaagtaaaatacagtgttatcagaaaccctaattagggttttttcaatcgagtttttctgtcgatttctttagaattaattagggttagttaatatcaattgattttcgttgtagatctaattagagtttctcgttttcgtttaattttcattgtagatctaattaaggtttcgtgtttccggttgattttcattgtagatctaattagggtttctcgttttcgtttgattttcattgtagatctaattagggtttcgtgttttcggttgattttcgtcgtagatctaattagactttgatttacaaatcgatttactaatgtttttttttattgtaagatgtcttttactcggaacgattattcaaggtttcgatctcaaggtagtgaaggaaacgcctcggcgattcagaataatcgccatatacattaccacagacgccaatcaatctgaaccatcaagcagatggtgcttctcctccacctgtcaatcaatccccccgcggttctacctatcacactactttgctagctgcccgactcaatgacttgacaataaaagagttacttgctaatcctgacgtgtaggtttgcctagattatgaagaaacagagtgtctgaagtacaacaggcgtgcctgaagcagtacagatcataacagagaaagtgggaaagtagcagttgcttttgccagcgtggcatgttgattggagtgaagaaaaggcgtatcagtttagacaaaggagacgaagtcgttagacataggacgtgggcctagttgtcaagataatgatgaggagctacacttggacctactggataaagtgaagcatcctgccttttccgtgaaatgatataagagaagtttcggtctcttattagggttagccactttacttgtgaaaagtggaagagaagaaaagttaagtagaacttgttcttgtgggtttcattggtgagtgaacaaagagagcacacggctgttgctgtgtttgtgaggtgggtagttttagtatctgataggagcaaatcaggttgttgatgttgcgtaacactgtccaaacttatctctgattgatcagtttgaaagttgttctaataaagtgtgtttattggagttgtgttctttgtctagtcaaagtacttagggatcttttacttcagattagaccctaaccggcctccgggaactctcgggtaagccactaggctctgatctcttcttgtctctgttcagttttgtctgtctgatggtgttttgatttgtaggtttgacgatgactcttcagttgcaactactgtccggagcatttttgaaagagatttcaaagaacctcatgcaaattggacacagacatcagaagcagtgatcgatcgatggtttgaaacctttggtgtaagtcaaataagttgtgttttgtttggtacaacaattgatcttgtctatttctaatgtgtcttatctttgttttgtagcaagtgtataactgggactctacaattatataatacatttcattgtattgattttgtaaacacacaaccacctcatcgatagcattcagagagggattccaaaaagagtcaacaaatctccttgtggcactacaatttatataaaatgatattattttaaatatcaaaacatatgaaagataaaaaatatacattaaatttttaagttcaaggcttgttaaaaacatcataaatttgtatttcaccaacactccttacataaccgagtatgcctgtaaaaaaaaagaaattttaacagaagttgaagaaaaaaaattgctctcaccgtttgtcaaagtgagaaatggtttccacagtttgtcttttcaatcaatttcggacaaaaataccctgggaaaatttcttaatggcatcaaccaaaccgtacagcagttggtatcggtttagttgatgcggttcagttttgaaaacgacaaaaaaaaacgaaacaaaaaaaccgaagaagaagaaaaagagaagagagaaacagaaagatttgagagagaattaaaaagctgttcgaaattcagtatccactccttcatatttcgacatcacttcgaattgttgggtagttgaattgaaccactaaactccaaaatccggcgaagagaaagttgtagttttttctggcgaagtaaggaacctccggcgagatagcaactttcgctatggctgggaataaagcaaacgacgaagtcccgacgaagcagcatacccaagatagtggtccagagaaggagaagcgggtattaagagtttccccgcggagaaaacgctcttcgacaaaggcaacggaggaactgggttagtatctctaatttaccgtttgttgtctttgagtgtatcagaatcgtaaagcttgtttgattaaagggttagaactagtcagaatttagcatatctttaggatggaattttgagttataatctggataatttttgtgtacgtacactaattcatattgcttaactgtatatcacttttaattgcaagcagtccaagtgttgctccgactgaagatcttatagttgaagagttaccaccaagactctttgctctatactggtacccttccaagacgaagatgaacgcgtactctaaaccggagtacatttatgacatagcaaatgcactaaaagggaaaaaagagatgcagtttcttctcgattctccatttagggacctttttaaaatacctgcaaacaaggcttccttctctggtaagcttgtccttggactaatatgccgtcagttagtgacaaagaaggtgaatgagatgtggatggtattcggcggtcatccaatcagatttggattaagagaatttagtatcgtaactgggctggaatgtgggaagtatccctagaagaaagccgtggaggctgttataagagtgaaacatgagtgtaatagtgtttggactactctgtttactgagaggttttgggcgaaaccgagtccaacaattgctgatttggtgagctggctgtaggaggagtaaagcatggaggggtggaagcaactggctctctctcttataattctggtagatggtgtgatgatgtcccacaataaccccaacaggctaactttgaagactgttgagatgacgaagaacgtgcagttcttctgcaaatacccatggggaagggtgtcttttacccgtactttgggaggataggaaaattccaaactccttctgatgctcaactactgataaggggtttactgaaagggtcttatgcactccatggcttcccattagcactccagctgtttgctttcgaaacactcccatccattgctaaggtaggacctgatgatgaagctaacaggacatttgcttagaggtctatccatcgtcttgcctcactgcgggcaatccagacatctagcatattggagtgtgaggctgctgatgaggtgtgttcaattgtttatgtacgtacataaaaagtaagtgtacattctctatggttaacaaacttatttatgtaggttgaggtcaactatattgtgaaacaagcggacaatgtttgtcctccatccctttcatgggatgatgaagttgatgatccaaaagttaattacattgaggcactgttgatagatgggcacgagtggcaggaggatgaatgggttggaggttatgctggagtaacaaagcaggtgtgcccaccacaacaagaagagataggtaagtataaatggtgttttcatattttctggttattgcacccagaagaaaaccaataaatagcagcaactggtttattgtagatgtcaagaggaaacaaaatgcaccgggcccgagcccaaaagcacctgctatgaaaaaacaaaaatctgctgtcgattgtgataatgaagaaaatgatgaggattgtcttggagagccgctgcttgagaggtttttagttgaaatgaggaggtgtttcaagaagcaggatgcccaaatgtatcaaatgcaagaagatatgaaacattttatccgccaggagatatgtgctgcccttgatccaaaaggcaaaaagccagaacaaaccataccttcccatgattcacggaaagcacctacatctatggataaggcaccggttactgcgaagaaggcatcgagaaggatgtctacaaaaggaagcactggaacgagaaagtcttcaaggctgaatcgtgtttctcatgatgtggacactcctgcgcattctgttggtggtaattccaaagaggaagatttggatgtccctggagtacctaccattgctgtcggcagaagaagaaattcttcaaagccgaagaagagtgtttcttttgttgttgacagtactgagctatctaattccaataaggaagatatgcaaggattcattgatgaacaggtatggcatgtaagtacattcctaaatattttcaaatccatatgtacgtataactgtactgtctgcttcggtacagtatgaagccaataatgaaagtgattttattggaaaagatgaagtggattcttcgtccgcagaagaagagattgttgacactggataagctatagttccttatgctggatccacacaatcccatccggtatgtcgtctactaatactcttaccaatctgttttaatggtgtacgtacatataggcttaaaaagttagttatactatgtttcaggatagaggaaatgtagttgttggtaagactgtcattttaggttcaatgtctgggactgtctatgtttgtacacaggaagggaggcctgtggaagaagctagtgttgacaccgagatggaagaaattccatctactgtgcttgcaagagcttcagaggtatatcttgtggtaatagttctatacagttttccattactatacgcatatatattacattaaaatgtccacttatatattgcttaactccatggtagcctatgtttcaggataatggaccaatagatggtgttgaacctgtcctagttggtacccatacagaggccgataaaaaagcaaatgctgatacagagatggtagacaatccatcaggtttacctttaacatctacacaggtatgtgttcagctaatagtcacttgttgtttttccatatgtgtacgcatataagacgtgtatgtatatttgtttcaggaagaagcaagtgatgccagtgctgtgactgaagctaatggtagcgaggcagaagaaacttttgagccttctgatggagatacagctcgtgagtctgaaattaaagacatacccgccacaagtgtacgtacattttttgtcactattgtctgtgtacatagattgtttcatacataactaaaaagcagctatccgatgttaaattctacaggttgaggcggcagcagaatccaaattagtgccagggatgaaagtggaaatacctgagaagacccacaatgatcccccgtcaccatttcaagtagttaataatgtaagttaactatagctgaaaataaaatttactatgaactgttcaaatttataaaatttatattatgcagatgatacgcgagttggatacacaaggctccgttgatttgggtgcacctaatgatatggaggtaacaatttgtgtgtttgaattcctaatcacttattagcatacataggattatatgtgtacattatagagacttatgtaggttaacttgtacagggagtgatggaagagccgggcattgtcgaggggtctggaggaaatgaggatccaaacccagggtcagatgaagcagacaaaaccgtctctattcataaaaataatgtatgtacctatttttaccatggacgtattatagaaaaacgaataaaactgttgttgacaatcataattgtttacaggatgaatcagacaatgatgttgttgtcgaagcaaaaaaagaaaaaaaagcagccccaaaggtcccaaaaaagtgaagaagcaactagtctatgaacaggatgatgcccttcctggaggttttaaggaaacaatagtcttggtggcagatgtaccaactcaacagtcagaggttgttatcaaggctggaaatgtctcatacaaccccctggacatggttgacccttcaaaagtagaggaattaaccaatatcattaaatgagaccatgtgtaagtatattctattatattggattagtaattattccatcatcatttttgcaagtcttaagcttgttatcaaatattttactggatttacaggattcatactcttctcgggtttcgcaaagtggacaacgagttttttgccaagcttataacacctggtataaagatcaaaagttcggtacgttgcattaatatacgtacactacttgccaccatgtataataaatcctacaaacatggtaaaatatggtttaagtgtacgtacactgattatattttttgatcatttcagcatttagaaatgatggcaatgttgatgtggcataagaacggtgaacaactgctagcaaacagatgtattgtattggacttctccctgaggcatgaactttccaagcgggtggtcgacttcaggaagtgtattaataagaacgggttcaaatggggcaaatttatgtccgacattgctaatggagtacacataaaccgtgaacccactatgaagtgggtgaaggatgtaaagaacagcgaataactgtgtatgacgctttaatatcacacatgtgggagtcagctgtgaagtcgagaatgactcctatttacgaaatgatgtcgtacttagttagagcgatgtgccagtatgtcttgacttatgcgtactcacttaaaacttttgagtatgagcgttgtttaaccgttgctcaaaacccaactacaggagattgcgggccttacacgatgaagttcttggagttgctcgcgtttggaaaccctgtttcagacttgttcaccattcgagaagcagacatggtcttctaccgttagaaatactcggttgacatctacgagcacggaaagcgcgaggcgggttctgtgtattttgctataatcatccaagaacaataatctgaatctttgcaactaattattttgaacaaacctatcgaagatatttgattgcaactacatttaagtttggagattgtaagaagttaatttagttttcgttatcactctcttctcaaacaaaatgtaatgtgtatgtacacgttaaaacatatgtcccccatatatatctatatttctcgtacactgcaaatttactttctaacataactcaggtgataaattgatttgacagctaacgcttaccaacacatgtatgacattcaatacaactgtaattgccccaactaaatccacaatagtggttattaaagtgaagaacttactgactcttcccgacgattgactctcgaagataactaagaacatggctgactaatgttggtctgaccttggtccattgatacgatcaagcactcgtggaagagacattgtctacttataagtgtgcattttacatgttttgagcatccatttgttatcattattgcatcatatcaccactgttttataccatttctcatcatttgtcatcactttgcatgtttaggatagttttgcatgcatattgtatatttgtgttgatttcaggtgatttggagctgttaacgagctaattggaagaagcggacctgatcatgtcaaaccactcgacccccaggtcgagcagatgctccacgacatcaaaggaccacttgaccccctggtcgagtagaagacttcaccactcgactacctggccgagtaccaccatgagagtcactcgatcacttcactcgatcacaccactctaccatgaagtcgagtatcaccatcaccatcactcgattacatactcgattgccagctaatcactcgacctctcactcgaccacctgggtcgagtactgttcttaatccgtcccaatactgcgtcgttttgagtattagggtttcagaatatctcgctataagtagcatgtactttacattttcgtagggctaagttttattttccgcagacactgtgttcttgacattttgtaatctggatttctcttaatcaattcagtattcagcattttgttcttgatttcgtttactgttgttcatcatgttatcaccttgctattactctgttgttatcatgttttcattctattcaacgtgtatgttctctgcaatgatgtctgagtagtgaataagtttctgaggatgggttagagtagtttagaattctcagtatgctaggtggttgagtttgattgatatatcccttctggattagttgttcttaatgcatattgctttctgatcaactggaattggagcccagacatttctgcgcccaaaaggtgttcgatgaaatgtttgaaccactaattctagagattcgtggctctgtaccaaggtattggttgcagggagcgttttggctttaacttgttgattcgtaagcctgttaggttagctctcgtcaatggtgattaagtctgggactaagttaacttgagagtctctgttgcggtgacacttagatttggtttttgttgtctagggataatttattgagcatgtcaatcacctgtaaactgaggaaacaaacctactcaattaccccatcctcgtgaattctttatgtgattgatttctttgttacgctactgttgtttactgcatcttgtcatctgttgcttagtttctacaattctttcctgttactcgacctgatactcgaccacccagttgtctagcaacagactgtgcagtcgagtatctttgtttcggttactgcatgttactcgaccagtcactcgaccaccccagtgctctgcaacgagttgtgttggtcgagtgttttactgtatccgcttgattttctgttttctgcatgttcacttaggactgctagaacacaccaaaacctgttattgcttggcttgacttagtgacttctgatcacatcttgattgttagcatcacatccatttggattgacaacctaaaatactacaatgacatgattgatgttttaggataattgagtaaaaacctattatcaatttggcgctgttgccgattaggtgtttgtttgttacatttaagatttcaaacttgcttagatcaagttctttttcaattttcagttcagttactgactgtgtatttttgttgttgtctttttgatccaggtacacctctgctgtatgcaaactcgatcaccagagaaccagaacctctttttcaacaataacatcgaccacatggcttgcgaattcagagaaagaagaaacacagtccaccttttaccccaacaaccactcgaaatggctgacgaacagaatcaacagaatggtcctgccaacattggtgatgtagatgcaccatcgtcagaggaaaggaattgcacctcctgctatccagaacaataacttcgagattaagagtggtctcatctcgatgattcagggaaacaaattccatggtctaccaatggaggatccactcgaccaccttgatgaattcgataggctctgcaacctaacaaaaatcaatggtgtaagtgaagacggattcaagctctgtttatttccattctcgttgggcgacaaagcacacatctgagagaagaatctgccccatgactccatcaccacctgggatgattgcaagaaggcttttctagcaaagtttttctccaatgtcagaactgcaagactcagaaatgagatctctggcttttcacagaagactggtgaaagcttctgtgaagcatgagagcgtttcaagggttacaccaaccaatgccctcatcatggcttcaagaaagcctctctgctcagtactttatatacatgcgttttaccacgcatcagaatgcttctagataccgccagcaatgggaatttccagaataaagatgttgaagaaggctgggaattggttgagaacattgctcaatcaaatggtaattacaacgaggactgcgacaggaccatcggaggcatagctaactctgatgacaaacacaggaaggagatcaaagcgctgaatgacaagctggacaaaattcttcttagccagcagaagcatgtgcacttccttgttgatgacgagcagtatcaagtccaagatggggaggggaaccagttagaagaagtcagctgcatcaacaatcaaggtggctacaaaggatacaccaacttgaaaaccaacaaccccaacctctcctaccgcagcaccaacgttggtaatccttaggatcaggtgtatcctccacagcaacaacaagatcagaacaaaccttttgttccttacaatcaaggttttgttcccaagcagcaatttcaggggaactaccagccgcaaccaccaccaaggtttgcaccttagcaaaaccaaggtcctgctgctcctgatgctgaaatgaaacagatggtacaaccgctgctacaaggacaagcatctagctccatggaatttactaagtagttatctgaattgcaccataacctggactgcagctacaatgacctgaatgctaaagtggaggcattgaataccaaagtcagatacttggaagaacaatcagcatatacctctgcacctaaagttacaggacttcctgggaagtcaatacagaatccaaaggagtacgcaactgctcacgccatcactatctactatgatcgagagctgccaagtcaacctgtccctgacttaatccctagggacagtgatgttcaagaaggggagccttctactcagactgaggtctctgttgttgaattcaacaattctgatggttttggcgatctcattcaatccacctcggaagagaaagcaaccataattgagaggatggtaaaacgtttcaaacctactccattaccctcacgtgctcttccatggaaattgaggaaagcatggatggagagatacaagtctgttgtagcaaaacagctagacgagattgaagcagtgatgccactgatggaagttctcaacttgattcctgatcctcacaaagatgtgagaaatctaatactggaaaggatcaagatgtatcacgattcaaatgatgaatgtgatgctactccatctcgtgctactgaaaagaggattgttcaagaaaagttagaagatcctggatcttttactctaccatgttccattggtgaattagctttcagggattgcatgtgcgatctcggagcctatgtcagcttaatgcgactctttgtggcaagaaggttggaatttattcagtacagaccttgtgacctgactttgatccttgcggataggtcttcacgaaaacccttcggcatgttgaaagatctaccagtcatgattaatggagtggaagtgcctacagacttcgtggtgctggatatggaagaagagcataaggatcccctaatctcgtactttacgcgactgcgctactgatcgcagcgaaagaagagaggtcgagtatcctcagagcggtgctggccgccacagagctgatgaggtcgagtacccacctgctcgagctgatacagaacagggcggctcgtctatggcctgggagcaatcacaggcagccattgacgaccaactgataacactagattttaacctttttaagcccttgcttttcatgcatttagtttagtttcatgtcttttttcatgcattcttagtctcttttccttcttttgcacattttgcattgcattgcctagcatacttgcatttggagtgttttgcaggtgaattaggtacttttggactcaacttggaggtttctaagacaagggatggacaaactcgagttcgggggacctaaggaaggatttgaagtttactcggcctatgtactcggctggaggccgagtggagcacacgtgaaaaacaaggagcctactcgaccaaggcactcggctaaaggccgagtggtgcacttaaggaagaagagaagccacttgaccaagccactcggccaagagccgagctatgtgaccaagaccaagccactcggcttttctactcggcctagggccgagcgctcctgcgccgactttcctattttgtcttattcccaattagggcaacctaggattgtgtataaatagatctcttatgtttttacccaaaatatctttgttttgtcttctggatattagggttcttagatttcttttgcattttctggttgttgtgttgagaatttggatttcatttcttctggaaacttgtttatctcattgagatctatcatttgttaagtttataatgatttctgggttttatgaattttctgggttttgttctatgatgttcttcattgttcttgagtagtcttcttcagagttcttgaggatgggttaggtttaggtggattcctcttttctttagctagctaagtttataaatgcatgattcccttctgttttaggagttcttaatgctattttctttctgatcaattgaaaattgatttcagactttctccacctaataagtgtttgatgaaatgtctgaaccaactaatttcagagatttgtagattctagcccaagacattggatgtttagactgcttattgactttaatagattggtgtttaaagcctgctttattatgtttcatcaatgaaaattgagattaggaagttctaaagttatgagaatcattgtcacgaaagtggattgatttggttttgaatctattgtctagggatagcttgattgagtttgttagttagctaatggattgaggagtccactaagaccaattaccccattcttaagagctctgtttcgtttatttgtgcaaaactcatatttttagtactctgttcgtctcgtgcaaaattggtgtttttagtattgtactcgacctgtttactcgtttgctcgaccgagtgctttacctagtgcttggtttactttccgcttttgctgtttgagttctttattttctgcttagtgtagttttgtttctgaatttgatttgcatgttaacctgttgcttaggtttagtagaaacacaccaaacctattcacacttggcttgacttagtattctttgatcgtatcctgattgatagcaattacacccatttggattgacaccttacatgttgcaatgacataagatgcatttagggaattgacacaccgaaaacccttgtatcaatttggcgccgttgccatttgggtgtttttcttgttacatttagaatttctgagttattaagatcaagttctatttctttctttctggttactcacttgtttcttcatttgcttgtttttgttttgcaggtactcttactctactagcacgtcgagtataagcgtcgagtatcatcaaaactggattactcatttcaaatctggtcgtaatggccaatgaagcgaatgttcgtgagttgccatgcaacattggtactggagatgcaccaagaaaccaccatcaaagagttggtattgtcccacctcctgttgagaatgagaattttgagatcaagattggtctgatctccatgaatcaagggaacaagtttcatggacttccaatggaggatccattagatcaccttgatagttttgatcgattatgtagtctcacaaagatcaatggagttagtgaggacagtttcaagctccggttattccctttctcacttggagataaagctcatctttgggaaaagactttgtctgcttcatctataagcacttggactgattgtaagacggcattcctagctaagtacttctctaactcaagaacagctagattgaggaatgagatttcgggattcaatcagaagacttctgaatcattttctgcggcatgggaacgtttcaaaggatataccactcagtgcccgcaccacggtttcacgaaagcctccctcctcagtactctataccgaggtgctttgcccaagatccgactactcttggatacaacttcaaatggtaactttctcaacaaagatgtagcctctggatgggaacttgtggaaaacttggctcaatctgattggaattattgtgatgaatttgatcgatcctttcgaggtgccactgataacgcgaacagccacatgacggaattacaagctttgcatgccaagatcgataagttggtcattgctctacctagaccaattgttgagagacctattcactacatcaccaacgaggagcaacagcagattcaggaagggcagtcctactcatatgaggaagtgagctacatacagaatcaaggtggctacaacaaaggatacaacaactacaagccacctccttccaacaacccctaccgaaacaacactgtgattcccccacaccctccggtttatcctccgtatcagcatcaacctccaccctatgttccattcccaaatagtttcaacctcgggtcgcaccctatcccaactccaccaataccaaccccacctgttcctgactttacagcactacttcagcagatcgtccaaagtcaaaatagtgatgtttcggtaatcgaaaagcatttagttgaaataaataccaatatggattcttctttagttgatctccaaaggcagattgacactttgatttctaaaatcaaccctgacgaaaggagagttgcatctacttcagcaccagcacatagctcccaactcaaagggaaatctatcctagattacacactagtcactgaggacagtgaagttcaagaaggggaggatttaactccagaaaaagaccagagagttgaactcgaccaggatactctgcctgccaaccgagcacaagttccagttcatgagaaaccagctgctgaagaagataagtggaaagtgttcattccaccgccctataaacccaaacttccctttccaggaaggttcaagaagcagattttggaaaagtacatagccatgttctctaggcacatcaatgagatagagctcaagatgccactcgtagatgcctttatgcttattccagattctcacaagttcttgaaagatatgatcatggaaagaattcaagaagtttaaggaatggtagtgttgagtcatgaatgcagtgccatactagaaaggaaggtgattcctaagaagttaggtgatctaggttcctttacactaccttgctccttaggccctctagttttcaacaaatgcttatgcgatcttggagcttcggtcagccttatgttgctgtctattgcgaagaggctaggattctccaagtataaagcatgctacattcagctagttcttgttgataggtccgtaagaatacctcatggcatgttggaagatttgccggtaaggatcggatcagtagaaatcccaactgacttcgtggttctagaaatggatgaagaacctaaagatcctctcatattgggaagacccttcttagctaccgctggagccttgatagatgtcagaaaaggtaaaattgatctaaaccttggaggaaacctcaatatgacctttgatattaagaaaaccatgaggaagccaaccattcagggtcaagttttctatattgaagagatggatagattggcagatgggttgcttgaggaacttaacgagaaagatcatttacagagtgctctgaccaaggatggagagcatggatacctatacctagaaactcagggttacaaagatctattagattcccatagaccggtagaagcatgggagacatttgaggagttggatatctgttcaaaggaggtcagttcagtcacagaaagtgaagaaagttctactcgacctgtgtactctagcagtcaatcgagcaagataacagaggaacctaactcgactggaacagccgaggacactcgatcgagcaccatctctgatgattggtcagaactcaaagctccaaaggttgaccttaagcctctcccaaaaggtctgaggtacgcatttcttggtcctaatgacacttatcctgttatcataaatgatgaattgagtgatgaacaagtgcatcaattattgaccgaacttaggaagtataggagagcaattggatattcattagcagacattaagggaatttcacctagtttatgtactcatagaattcatcttgaaaatgaatcatattctagtgttgaaccacaaagaaggctaaatccaaatttaaaagatgtggtaaaaaaggaaattctgaaattgcttgatgctgatattatctatcctatttctgattgcacttgggtctcagcagttcattgtgttcctaagaaggggggaatgactgtaattaaaaatgatcatgatgagctcattcctactaggacaataacaggacatagaatgtgcattgattataggaaattgaatgctgcaactagaaaagatcatttacctttgccattcattgaccaaatgttagaaaggctagctaatcatgtttattattgttttcttgatggttatagtggtttctttcaaattgctattcaccctaatgatcaggaaaagactacttttaattgcccctatggaacttttgcttataagagaatgccttttggtttgtgtaatgcacctggaactttccagcgaagcatgacttctatattctcggatttcatcgaggagataatggaggtatttatggacgatttctcagtctatggatcctctttctcctcatgtttgttaaacttgtgcagagttctagaaaggtgcgaggagacaaacttagttctcaactgggagaagtgccacttcatggttcaagaaggaatagtgcttgggcataaaatctcaagaaagggaattgaggttgataaagccaagattgacgttatggttcagttgcaaccgcctaagacggttaaggatattaggagctttttgggacatgcgggattctacaggagattcatcaaggatttttccaagatcgctagacctcggactcgtctgctgtgcaaagaggccgaggttgattttgatgaagattttttgaaagcttttcactccattaaagaagccttagtgtcggcacccattgtgcgagcacctaattggaaccacccttttgagattatgtgtgatgcttcagattatgttgtaggagtagttctaggtcaaaggattgacaagaagcttcatgttatctactatggtagtaggatcttagacgacacacagagtaggtatgcaaccactgagaaggaattattggttgtagtcttcgcctttgagaagttcaggagttacttggttggtttaaaagtcattgtctatacggatcatgcagccttgaagcacatctatgcaaagaaggacactaaacctaggcttttgagatggatactacttctgcaagaatttgacatggagattattgacaagagaggattagagaatggagtagcggatcacctttcaagaatgaggatgacagaggcagccgcaattgatgattctatgcccgaagaacaactcctagcaattgggaccggttttgacaagtttaagattgaaacaatgtgtgctacaaggaatgaaaaattgccttggtatgtggatctcgttaactacttagctgctggaatagtccctaatgagttaagctcataccagaagaaaaagtttttcagagacattaatcactactattgggatgagccattcttgtataagaagggagtaaatggtttgtttagaagatgtattgctgaagaggaagttcagggagtgttagagctttgtcacaattcaccttatggaggtcactttgctactttcaagacagttcagaaggttctacaagcgggattatggtggccttctatatttaaagatgcacatgagcacataacaagatgtgatcgatgccagcgagttgggaacatttctaggagaaatgagatgcctcagaacccaatccttgaaatagaggtttttgatgtatggggaatcgactttatgggacctttcgagccagcttcatatgaaaacaagtacatcttggtagctgtggattatgtgtcaaaatgggtggaagcaatagctagcccaacaaatgactccaaggcgattttaaaactttttaaaaccatcattttcccaagatttggtattccaagggtagtgataagcgatgggggctcacattttatcaacaaggtttttgagaaccttttgaggaagaatggggttaagcacaatgtagctactccttatcaccccagactagtggacaagtcgaggttagtaacaagcagaacaaagctatcctacttaaagttgtggggatatcaaggcgagattggccaactaagctcgatgacaccctttgggcctataggacagcatttaaaactccaatagggagaaccccttttcagcttctttacggtaagtgctgtcatctccctgttgaagtagaatatagagccatgtgggcaactaagcttctaaatcttgacatagggacaacacaaaaaaagaggtctctagatcttcatgagcttgaagagataaggttagaatcatatgagagctccaagatctaccaagaaaggaccaaagcttttcatgacaagaagattctgcataaagattttaaagctggtgatcaagtgttactattcaactcaaggttcaagctttttccggggaaactcaaatcaagatggtcaggccctttcactattaaagaggtacttccctttagtgcagttgaaatagtttcaagagagggttatgagtttaaagtgaatgggcaaagattcaagaagtacctagtggacagcatcattcccgaaggtgataagtgtgtattttgcaagttttgagcatccatttgtcatcactttagcatcatatcatcactgttttataccatttctcatcatttatcatcactttacatgtttaggatagatttgcatgcatgttgcatatttgtgttgatttcaggtgatttgaagctgttgatgagctatctggaagaagcggacctgatcatgacaaaaccactcgacccagaggtcgagtaggagcttcaagatctcaagagaccactcgacccccaggtcgagtagaagacatcacaacttcacctcaccactcgaccacgaggtcgagcgtcttcatctctatcacctgaccatcactcgatcgcatcactcgacccctaggtcgagtgtcttcactttcattgccagaccactactcgacctcaccactctacctggaagtcgagtatctcctgaccagcactcgatcgcatcactcgaccccgaggtcgagtgtcttcaccttcattgccagaccactactcgacctcaccactctacctggaagtcgagtatcaccatcaccaccactcgactgcatactcgatgacaagcttcagagccttcttcattccacactcaaccagacactcgagcacaaggaagaaaagaagactcaagctattcactcgacctcccactcaaccacatgggtcgagtacagttcttaatccgtcccaatattgcgtcgttttaagtattagggtttcgggatattcagtattcagtatttagtttctgttcttgatttcgtttactgttgttcattctgttatcatcctgctgttacactgttgttatcatgttttcaacttgttcaacgtttatgctttctgttatcatgtctgagtagtgaataggtttctgaggatgggttagagtagtgtagaattctcagtatgctaggtgattgattattggttgatagatcccttttggattagttgttcttaatgtctattgctttctgatcaactggaatttgagcccagacatttccgcgcccaaaaggtgttcgatgaaatgtctgaaccactaattccatagattcgtggccctgtaccaaggtattggttgcagggaacgttttggctttaacttgttgattcgtaatgcctgttaggttagctctcgtcaatggtgattgagtctgggactaggttaacttgagagtctctgttgcggtggcacttagatttggttaatgaacttgttgtctagggttaatttattgagcatgtcaatcacctgtaaactgaggaaacaaaactactcaattaccccatcctcgtgaattctttatgtgattgatttctttgttacgctactgttgtttactgcatcttgtcatctgttgcttagtttctacaattctttcctgttactcgacctgatactcgaccacccagttgtctagcaacagactgtgcagtcgagtatctgttttattttctgactgttactcgacctgtcactcgacctcacccagtgctctacaaagagctgtgttggtcgagtgttttactgtttctgcttgaatttctgttttctgcatgttcacttagaactgctagaacacaccacaacctgttattgcttggcttgacttagtgacttctgatcacatcttgattgttagcatcacacccatttggattgacaacctaaaatactacaacgatatgattagtgttttaggataattgactaaaaacctattatcaatttggcgtcgttgccaattgggtgtttgtttgttatatttgagatttcagacttgcttagatcaagttctttttcaattttcaaatcggttgctaattgtgtgtttttcttgttatcttcttgatccaggtacacctctgctgtatgcgaactcgatcaacaggcaatcagaacctccttttcaacgacaacatcaaccgcatagctcgcgaactcagaaaaaggagaaccttagtcaaccttgtacatcagcaaccactcgaaatgcctgaagaacagaatcaacaaaatggccgtgccaacattggtgtcggagatgcaccacgtgatcaccgccagaggaaaggaattgcacctcctgctatccagaacaacaacttcgacattaagagtgatctcatctcgatgattcaggggaacaaattccatggtctgccaatggaggatccactcgaccaccttgatgaatttgataggctctgcaacctaacaaagatcaatagtgtcagtgaagacggattcaagctctgtttgttctcattctccttgggcgacaaagcacacatttgggagaagaatctgccccatgactcaatcaccacctgggatgattgcaagaagtcttttctatcaaagttcttttccaatgccagaactgcaagacttagaaatgagatttctggtttctcacagaagactggtgaaagcttctgtgaagcatgggagcgtttcaagggttacaccaaccaatgctctcatcatggctttactaaagcctctctgctcagcactctttacagaggagtcctaccacgcatcagaatgcttctagataccgccagcaatgagaatttccagaacaaggatgttgaagaaggctttgaattggttgagaaccttgctcaataagatggcaattacaacgaggactgtgataggaccgtcagaggaacatctgactctgatgacaaacacaggaaggagatcaaagcgctgaatgacaagctcgacaggattcttcttagccagcagaagcatgtgcacttccttgttgatgacgagcagtatcaagtccaagatggggagggtaaccagttggaagaagtcagctacatcaacaacaaccagagtggctacaaagggtataacaacttcaaaaccaacaaccccaacctctcctactgcagcaccaacgttgctaatcctcaggatcaagtgtatcctccacaacaacaacaaggtcagaacaaaccttttgttccctacaatcaaggtttcgttcctaagcagcaattccaggggaactaccagcaaccaccaccacttgggtttgcacctcagcaaaaccaaggtcctgctgctcctgatgctgaaatgaaacagatggtccaacagctgctacagggacaagcatctagctcaatggaaattgctaagaaattatctgaattgcaccataagctggactgcagctacaatgacctgaatgccaaagtagaggcattgaataccaaagtcagatacttggaaggccaatcagcatctacctctgcaccaaaagttacaggacttctaggaaagtccatacagaatccaaaggagtatgcaactgctcacgccatcaccatctgccatgaccgagagctgccaactcgacatgtccctgatttcatcactggggacagtgatgttcaagatggggaggcttctactcaggttgacatctctgttgttgaattcaaccattctgctggttctcgtcatctcactcaatccacctaggaagagaaggccgccataatcgagagaatggtaaaacgattcaaacctactccattaccctcacgtgctcttccgtggacattcaggaaagcgtggatggagagatacaagtctattgcagcgaagcagctagacgagattgaagaagtgatgccactgatggaagttctcaacctgattcccgatcctcacaaagatgtgaaaaatttgatagtggaaagaatcaagatgtatcacgattcagatgatgaaagtgatgccactccgtctcgagctgctgataagaggattgttcaagagaagttagaagatcctggatctttcactctaccatgttccattggggaatttgctttcagcgattgtctgtgcgatctcggagcctctgtcagcttgatgccactctctgtggcaagaaggttagagttcattcagtataaaccttgtgacctgactttgatccttgcggataggtcttctagaaaacccttcggcatgctgaaagacctaccagtcatgattagtggagtagaagtgcctacagacttcgtggtgctggatatggaagtagagcataaggatcccttaatactgggaagacctttcttagcttcagtgggagcagtgatagatgtcagggaagggaaaataggtctcaaccttggaaagtacatcaagttgcagtttaacatcaacagaactccacaagagtcaacagaagatggaagaacctctggaaatgatagagtgatctcaagagaagaatatgagactgaaagagttgaagaacttaaaaagaggtctgaaaggcaagatgaaactctagagaaggtagcccacactgttgaggaacttagaagtaagctgaatcagttgcagaaggaaactcaacctaaatgcgggattgacactatcccgagaaagaagttcacttcaagatggtctgaagagatagattaccctctagaagagaaagaagcatattttgaagagaggggaattgagtattctgctgcagacctctccagggaggacgctgagtatgatgatggtatcagagaggattatgcagaccctctctacagttcattttcttcttgatgagtgtgaggagtcaagctagagactttaaacaagctcacttgggagaaagtcccatgaatatccttgtaaataattttttgttatttctgatttgttttagttgtgtttgtagttctcagaaaaaaaaaacaaagggagaagtaacgtgaaagtagagtaaaaattttaaatcattgttttactcgaccaacagaagctatagagtcttccagggagtttatcgagtttatagaagattgtgggatttcctggaggttttctagtgaacaaagaagagacaagaatacattgtgggatccgccgctgacgcccatgtcctccatgcaacagaccaacggacaagcaatcccccccccatctcttctcctccactcgacgtctgccacatcactcgacctccatccctctctactcgaccttatcacttcgtcatctcctccatccccattaaactcgacctccacctctcatccaaactcaaccaaactttcatcactttactctcaacgactccacctctccatctctcttcctcaagcactcgaccgcttctctatcgcctcttcaccaccgtctcgagctaccactcgacctcttcaccacttgatcaagcagccgtttctcctctccaaggaaaacactcgaccgccgcttctctcatctctccagtcacaacatcgtccaccactcgaccttgtctcccgcttcaccatctccacatcagctcttgttcttcgtttactcgaccactacacatcattcccttcctcacaactccactagacttcaccgaatccactcattcaaactccactcttcacgcgacgagcacctccgcttctccccctctgatccaatcactcgaatcaccgccacctctcacgaactcgaccttgcctaatcactcgacctcctacaatccgcctcttaccacgccgcttctcaccatccactcactcgaagaatcgtctctcacctcttccttcgtagtcgtttcactcgacttcgccgcaagaacagctccgcctctcaagctcatcaaacactcgacctctgccatccattcgccttcaacaatactcgatcaaaagtcactcgaccatcacagatatcactcgaccaccgcctaactctaaccacgaaactagcttcgctcgaccgaacaaaaccactcgaccaaaccgaaaaaaaaaaataagaaattttttttttttggtacactcgaccggttcacttgattggtttgtgtttttggtttgctgttactacgtattaacgtttatttttgagttttgtctgttttcaggtttcatcatgagtaactacagtggagaatcctctatggaccctgattacaatgtggatgaagctgagtccttgtccgctagaccgagagagcaacatatttaccagagcttcagggatgaattcaaacgctctgcagcccgacgtaatcagagaagagctgaaatcgccagaggaaagagggcgatgtcaagtagatatgagctgattgatgaggatatcgcaactgagtatgagccagagtcatggcgcaaggagacgaagctgctgaacaaacctaacgaggttacagtggaggagtatatcaggttctttgagatgaatgacttctggggaacgaggtatccgtgctatgagactttagcccagctggggttaccggaggacgtacagcatctgttcgagaagtgtcatctggagacactcatgtcttacccttaccctgcctataaggaggagaaaatcgagtttctttccacgctgcaagtggagatgtatgaggcgctcacagactttgagctggataccatggggttaggcttcttgacgttctcagtgaatgaacagcggtatcagctttcgatcaagaagttggaagaactgtttggtttccctagtggaaagggaaccaaacccagatttgatagagaagagctcaaggatttgtgggccactatagggaacaatctaccgctaaactcggcgcggtccaagagcaaccaaatccggagtcctgtgatccgctactttcagagatcggttgccaacgtcttttactccagggaatctacaggcaccgtgtctaacacggacatggagatgatagattatgcgcttacagggattctccaccggacgaagggaaagaatgtcttgagagcgatctcaacaacgcaccaccagtaatgcctctgttgatccatctgtgtggatacaggaagtgggcgttaacgaacggaaagaagaaggtgagaggagcactatgcgtgggtggcgttgtgacgccaattctgcaagcttgtggagtaccgttcaaggaaccagggttagcaccgaggatgatggacttggatcatttgcgcagatgtgagttcttggagtttgacatggctggcgactttcaccactacaggttcgagcattcatcgattaaaatcgccaacattcttctcccctgcattgacattactaggattctcgagggcaggaacattgacttcaagcctgcgcttgaagaactttatttcgaggacagtccaccaactgaggagatcagtcataccgaaggagctacaacagaagatattgttgagacggatgatatagatgaggcggagtttgacacgagcatgtatcatttcagtgagcatatacctcctacgagggaaagcaggagtttgagcgaagctcacaggaacaacagccagctgcagaagtggtgcatgaaacaggacaagttactcgccaagtgccttagggctatcaagtttctgaagaacaagctcagctgctcctcttccactacagctattccgcagggacatctccctcaggacatgccttcgaggagatatgacgcgcccgagccaagtcggcgcaggcctgaacctagagagcaggagattccgcatgtccctccgaggcattcatcattcgagcctcgtgaatctgggaggaagaggaggaccctactcactcggtctagcagtaggagttgacgacttctacagtctcgtagtttacacgaccgcggtgctggccgcagcaaaaggagagaggtcgagtatcctcagagcggtgctggccgccacagagctgatgaggtcgagtacccacctgctggagctgatacagaacaaggtggttcgtctatggcctgggagcaatcacaggtagccattgacgagcaactacgttcattcttcgactgaggtaagcgtctcacttcaccattgtattatatcatctgttgtgatttgtttcttcatttttttgcttctgtgattggatttgtcctgagtactctcttccaagtttatgcgcacaatggactgtgtgatttaagtttgggggagggctcaggaagtgtgtgttgcattgtatatatttttgagtctacattcatttttgagtctatttttgagaaagcttctcctagagttaagagaaaagaaaagaatgattagaaaaagggcttaaaagattcatgaatgcaaaaggtagagttaagttcttatattgagattggagatgggattaccattagagcttcatttgacatactccgggtagatgggatcttatctctgtatgcatagcttgggacttacctttagcattctaataaagtttaatcatttcttgagagatcccctgttgctgaagcctattctataagggaccatctttatctcttgaccttttaccgtagccaaatcagttcattgatgatgcattgcttgatacacgttccagaactaatgaatgttaaagggattagtagatttgaaaacatgtgtaggtcgagcatatgagtcagattgattgataatgaggcatggctaacgtttttaagtagaatgcatttagtttagtttcatgtctcttttcatgcattcttagtctcttttcctttttttgcacattttgcattgcattgcatagcatacttgcatttggagtgttttgcaggtgaattaggtacttttggactcaacttggaggtttctagcacaagggatggacaaactcgagttcgggggacctaaggaaggatttgaagtatactcggcctatgtactcggcctatgtactcggctggaggccgagaggagcacacgtgaagaacaaggagcctactcgaccaaggcactcggctgaaggccgagtggtacatttaaggaagaagagaagccactcgaccaagccactcggccaagagccgagctatgtgaccaagaccaagccactcggcttttctactcggcctagggccgagcgctcctgcgccgactttcctattttgtcttattcccaattagggcaacctaggattgcgtataaatagacctcttatgtttttgcccaaaatatctttgttttgtctgctggatattagggttcttagatttcttttgcattttctggttgttgtgttgagaatttggatttcatttcttctggaaacttgtttatctcattgagatctatcattttttaagtttctaatgatttctgggttttatgaattttctgggttttgttctatgatgttcttcattgttcttgagtagtcttcttcagagttcttgaggatgggttaggtttaggtggattcctcttttctttagctagctaagtttataaatgcatgattcccttctgttttaggagttcttaatgctattttctttctgatcaattgaaaattgatttcagactttctccacctaataagtgtttgatgaaatgtctgaaccaactaatttcagagatttgtagattctagcccaagacattggatgtttagactgcttattgactttaatagattggtgtttaaagcctgctttattatgtttcatcaatgaaaattgagattaggaagttctaaagttatgagaatcattgtcacgaaagtggattgatttggttttgaatctattgtctagggatagcttgattgagtttgttagttagctaatggattgaggagtccactaagaccaatcaccccattcttaagagctctgtttcgtttatttgtgcaaaactcgtgtttttagtactctgttcgtctcgtgcaaaattggtgtttttagtattgtactcgacctgtttactcgtttgctcgaccgagtgctttacctagtgcttggtttactttccgcttttgctatttgagttctttattttctgcttagtgtagttttgtttctgaatttaattgcatgttaacctgttgcttaggtttagtagaaacacaccaaacctattcacacttggcttgacttagtattctctgatcgtatcctgattgatagcaattacacccatttggattgataccttaaatgctgcaatgacataagatgcatttagggaattgacacacacaaaacccttgtatcaccaactctgttcattcttcgactaaggtaagtgcctcacttcaccattgtattatatcatctcttgtaatttgttctttattttgtttctgtgattggatttgtcatgagtatctcttccaagtttagtcacacagtggactctgtgatttatgtttgggggagggctcaggaagtgtgtgttgcattgtatatattcttgagtctacattcatctaaggcatagaaaaaccaaaaaaatttcaaaaatttcagaaaatgatttcacaaaaacagagtgttcatgtagttgcattacatttaggatcgagtctagagtgtttcatttaggattgttgcatatgcataagggataatgatgacatagccttgtaagcattttggttcaccggataaactcagtgccctcgttgctagttgtctgttgcgtagtcaatgaaactgaagtaaaattgaaccatgcctagattgctctactcgacctcactgtcataatctgataccattccctatcaatttgaacctgaatctgatctttaattatcatgtctgcatcaaatttgaactcatggataccctaaaatacttggattttcttattcattttgatcactcttcttaatccaagtagctgactctccttattagagtagttaacccgaacccaaacctagactttctttcaagccctatatcacttgtgagtgtttgtgaggtcttattccgattaagctt

SEQ ID NO: 545 - DNA, 105680 bp, Arabidopsis thaliana
tttaattatcatgtctgcatcaaatttgaactcatggataccctaaaatacttggattttcttattcattttgatcactcttcttaatccaagtagctgactctccttattagagtagttaacccgaacccaaacctagactttctttcaagccctatatcacttgtgagtgtttgtgaggtcttattccgattaagcttggtataaagtgttatgttcgtaacgacagagatagtgtctcatgtagttctagttcgcatttttcggactagataggactaggtgggcgcttatactttgggttgggatgtgtttaaaagaaaaaaaaaagggttgatttattgatgagaaaaggtaaaagactctaggtgaagtaagctaaagaagcagaaaaagtctagtaaaggttttgggatttgtaaagaaaagaaagagattttgttagttattaaagaagggcaaaagccctcggttttaaaattttaaaaacaagaaccttagttgttaaagaaatccatatcagctagatgtatcaaagtgttgagaaagtttctcctagagtaaagagaaaagaaaagaatgattagaaaaagggcttaaaagatttatgaatgcaaagggtagagttaggtttttatattgggattggagatgagattaccattagaacttcatttgatatactctgggtagatgggatcttatctatgtatgcatagcttgagacttacctttagcattctactaaagcttaatcattttttgagagatcccttgttactgaagcctattctgtaagggaccatctttgtctcttgaccttttaccttagccaaatgagttcattgatgatgcattgcttgattcacgttccaaaactaatgaatgttaaagggattggtagatttgaaaacatgtgtaggtcgagcatatgagtcggattgattgttaacaaggcatggctaacgtttttgagtagaattcgatcatatcgcagcttaaaactatcaacttagacattgatttcatctggtttatctggtgttttggctctgagtctcctctttcaaacctcacctctagcttgttcttaattgtttggttgagggcaagtaaatactaagtttcaaggagttgataagtgtgcattttacatgttttgagcatccatttgttatcattattgcatcatatcaccactgttttataccatttgtcatcactctacatttttaggatagttttgcatgcatgttgcatatttgtgttgatttgaggtgatttggagctgttgacgagctaattgggagaagcggacctgatcatgtcaaaccacttgacccccaggtcgagcagatgctccacgacatcaaagggccacttgaccccctggtcgagtagaagacttcaccactcgactacctggccgagtaccaccatgagagtcactcgatcacttcactcgaccaccaggtcgagtatcatcacctccacaacctgaccatcactcgatcacaccactctaccacgaagtcgagtatcaccatcaccatcactcgacaacatactcgattgccagcttcagagtcttctccatttcgcactcaaccagacactcgagcacaaggaagaaaagaagactccaactaatcactcgacctctcactcgaccacctgggtcgagtactgttcttaatccgtcccaatactgcgtcgttttgagtattacggtttcagaaatatttcgctataagtagcatatactttacattttcgtagggctaagttttattttccgcatacattgtgctcttgacattttgtaatccggatttctcttaatctattcagtattcagcattttgttcttgattttgtttactgttgttcatcttgttatcaccttgctattactctgttgttatcatgttttcattctattcaacgtttatgttctctacaatgatgtctgagtagtgaataggtttctgaggatgggttagagtagtttagaattctcagtatgctaggtggttgagtttgattgatagatcccttctggattagttgttcttaatgcctattgctttctgatcaactggaatttgagcccagacatttccgcgttcaaaaggtgttcgatgaaatgtctgaaccactaattctagagattcgtggctctgtaccaaggtattggttgcagtgagcgttttggctttaacttgttgattcgtaatgtctgttaggttagctctcgtcaatggtgattgagtctgggactaggttaacttgagggtctctgttgcggtggcacttagatttggttaatgaacttgttgtctagggataatttattgagcatgtcaatcacctgtaaactgaggaaacgaaactactcaatcaccccatcctcgggaattctttatgtgattgatttctttgtttactctactgttgtttactgcatcttgtcatctgttgattagtttctataattctttcctgttactcgacctaatactcgaccacccagttgactggcaacagactgtgcaatcgagtatctttgtttcgtttactgcatgttactcgaccagtcactcgaccacacccagtgctctgcaacgagttgtgttggtcgagtgttttactgtatctgcctgattttctgttttctgcatgtgcacttaggactgctagaacaccaaaacctgttattgcttggcttgacttagtgacttatgatcacatcttgattgttagcatcacacccatttggattgacaacctaaaatactacaacgacatgattgatgttttaggataattgactacaaacctattatcatctaccgtccagatgtcctcaaagatgccaatattctcaccttgtgtagctcacccaatgacttccaagctagaggtggccacaatccttccggaagcgctgatgaaggccgctatcgaccatttttcttaaggtgttttgcagctaacaatcccacggccgtgtattacgaaggtattcgtgttctaacgcatgaaaaaaacatcaatggagccatcaagctcttacagcgtcatgctccacaacgagcaaatgcaacacttgcatgcgccattgtattcatatgtgctgggtatgattatatgggctgcttgtttctacagctcttcacccgcaaccattatccatttgacttggttgccactcgagttttgggtgatgagttcatcgaggaaataaagaagtttcaccctccatacagtaatacatatggtcctattttctgttatcataccagccatggaattagtatgcctccatgcgccttctattgttacatggtatttggagctttccaaaacgtttgcaaccgctgatacatctggtcgtgtgctaggcgtgttagtcaaatgctatagttattccattctacttcatgtgttagtttatgttatccgctatgtgatgtttcaaattatattacggcttctactatattgtttatgtttatgttcaaattatattaatgcttcagaaattggcaaggtgtgttatgtttctccggattagttattccgcagaatagtcaaatgatatttagtttccgtagtaattgtaaattgtggagattaaaatctaaacgtccacaactacgtacacatgcatctaccaaataaaacagataaggtctttggtttgtctcggaaatgtggatattaacatatgggcgtacgcttgccacagataaagtctacgtacactacaaaatacacatgtacgtccattatgcatctaccaaataaaacagataaggtatttggtttatctcggaaatggtgatattaacatatgcacgtacacttgctacatataaagtctacgtacacttcgacgtacacatcatcgtacattgtgcatctactaaataaaacagataacgtctttggtttgtttcagaaatgtagatattaacatatggatgatgccacagataaaggctacgtacacttcaacgtacacatttacgtacacctctatttttaggttgtttttttaagaggttgctcataagaacaaaaaaaatcatatatggaatactattacgttgatttgacaatatgaatatgcatcatcagttccgtcctttgcaataaatacaaccataacttatccaaccatatcttcaatgatgtttatttaagtgttggaatttcattatgttgaaacaccttattcctaaatatgccaaacccaaatatacctgatgattggctagcgaagatagccaagaaaatggctgacaaatgttggtggtacctcagacctatgttgaaatccgggcctcatggaagaaacatagtctaccgaccggatgtcctgaaagatgcaaacattttcagcatgtgcgacgatcccgatgacttctacgcagctggccacgatccaaatgacatcaactccgaatgtcgctatagacccttctttaaacggtgcttagaggctggtaacctgacggctatttaccatgaaggactgcgtctcgttacacatgagtctgacattaaggcagctatcctacatttagagcgaattgtccctaggtacgccgctgcaacccttgcctgcgcaattctttacatatgtgccggtaatgctcacatgggtggtgtctactttcggctcttcggaagcaaccattatgctttagaatcagaggatacacgtgacatttgtgaagaggtgctagaagaaataaagaaatatggtaatactttaaaatatacatacgctaaaagcttttcgtacccggaatgtggtgacattcgtactcctgattgcgcgatgatgtgttacatgagatcgggactcttcaataatctttgcaacgaatgttacatctggtggtgtgccaaacggattagccagattctgtagttctcacattcgtaacgatcttgtcatatttataagtgtttcatgcaataatatgtgagctctgtacgttgattatcagtagtggaagtttgtttttaataattaacactttttatgaatctccaaacttactaactcaaagtactataataagaaacatggttaacacataagaataataaaataagaaaatatctacgtagacgctataagctattgtacacttggcatcgtttatttcaaactagaaagataaccaagcgagtgatgagatagttagtaaatgaagacgtaagaaaatttgatttgacgtggtataacccatttctagaagattttgctccttattaattacatgctatcaaatacaccatagaagtgacctctatcaactctcattaatattcctattagacgttcaaggttcccaagtaacgtactcaagtgatttggcagataaaataagttagttttgtttatttaaaagaagatttagtaaatgtgttccccttaatatagcaatatacaagaagccatattgttccccttatatacaatacaaacagacgtcaactcaaccttgtgtcagaaaacttaatgagtactttatagacgtacacggcgcgattatgagaggtacacagtattttgtttaatttaaaacttactaagattatgcactaaatatacatcaacgttacccaaccacttacattgatggttattcttccctttaaaactcatgtcaaacacacttagttgaatacacgaatccgtcttaaacctcctcatttggaaaaccatgcctttcctacctccactaaagcctccaaccgagttgtatctaggaatccaattgccaaaccccataagcatacttgtcaactacctcccagtcagccaaactcccatagagacgctaaggaacttagtctacacttgtgacatcaacacccttgcaattgatgaattcatgacgtggccgactttgctccaaccggattctaccttccgcccttacttcgagctgctgctagaacgtggaccaatcccggcggtttaccttgaaggtgttcgccaagcgagcaacttcgtcacagtagctcagggcctttcgctcatgacaacggtcgcactttctgatccctttgcttgctttgccaccggtttgttccttacgtgtaccggtaatcacttggatttcctcctttgcgagaagttccgtagcgagaagttctgggaaatgacactcacccttgaagcaggccacacggttggagagatggtgatgtatcacatcagctagcttcacactaaggctgttcgccactagggaacggtcttggaggtttgtccacacgccgagttgtgtaggctgttgcatgttcagtcatggctgcatggtttgttttttctactggtacgccagggagattgctatattctactagatgcgaagctgctaaggtataagctactcggctctactctcaagttttttgatatgacgggtgcacacatattttgcaacacatgtgtatgcttcgttcaacaatttaagttttatgattcgttccaactttgttccatgttcaagtttatttatcttctgaatctccgtttatataaactgtatgtcatttttatgtttctcgcttttgaatgaatggagtttaagttttatgatatgtctgcttatccgtacacgatatagtacacaaaaacttgatttagtaataaaaacgtgaaaaccacatttgactttgacaatccatggaaataaaacatggtcaaagggtgttgcccgcaaattaaattgtaagtaatgttagtacttgaataagcttctttcaaaatatcgttcaacccatcctcattttagatatagcaaaaccaaaatacatctcatcagccatatttgaaattgaaaacgataaagcagtaaaaaagaaaagaagagatgattagtgtgtgataaacatgcaaatatttaaaaatttcttacattaaatgattattttctaaactccatcaaatgtggagtatggtaagttaattaattttgtaattactttatttcctaaaagaattgattttgtttgatttttatattgaaattggtttaattctggcccaatggatagataccaagatccgctccatgatacgaatagttccgcccaatatccgctccatgacctgattaatttagaccaagatccgcgtgtatccgactttgtatattaccaatttaccctttttgatttttgtttatcttctaaaatttttttaaaaaactaatgcatcctatgtaatattctacaacttggttatattttatctaattctccccaattaatagtatagatatgaaagaagacacaaactcgtgttcaccttagccttaacttgttggagtcaatacttcataaacacaaggttccagcttggttctccaatgaccaacacaccgatcgaaacaccatgaatgctcctacaaagcttcagctcaatcaaacctcagtttaccaaatcaaacaagaacttatcaccttttcactaaataatgaactggctcggaaacatatagataactcaataagtaacctttataatcaggatcccagcgttgcatctttagctagtagagtcatcaataactccaaaaatttctgtctagatcggataacgtgtcaagctccaaacgttgttctgactcagccttctcggaactgctctctagggtttctggattttgacagttgtttagaattgtttggccggaaagcaacgaccataactccttgaatataacttggatcatagtttcgttaattgctttggatttctaggttggtaatgaacgcgtcagtacctttacttttccggcacaacttcagttatggtttccacgagcctccaaatttgcctcctccacattgcatttaattccttcttactctttcttattcttctcttatacacccatgatctacttcggctttgctccaccacaacgctcaaggctctccacagctacgacatgaccaaaagggctcaccaatgctatccactacctcagtgtcgtcctgtcttctcttctctcctcacgtcttactctcaggcctcccatttctctctcttttacgctttgttctcaacctcaattcctacgacgtgttactccccctgctccagtttgatttatcttttcatcacagatcccaatttgcttacgcactcaacaaccactcatcaactcaacacaaagcggcaacgtcacgacggtaactgcaaccatacaacaacgacggctcaattgtctctctcctcttcttcaaattggttgtttagtttaggtttagatattcccgagttcctcttacggctaaacgacagctcaattgtcatatatacccctacctaattaaaacaattacaccaaaacctaaacctacttctctttcattcctcgaccttaccctaacagagacggcggctacttctacttcattcctcgacatttacttcgccggagctcttcgccgtatctctcgcaggaagccactcctatctcttaccttaatccactcttccttgtttcttctcgtacgttctctctctctcactttccccttctatctctctcgttttggacaaagttagattgattgttgtggatcagtttcttcttgtgtacttcgcttttttagtagaaaatttactttctgcacgtgtttttgattggtgggtattgtcctctttgattggataagtgtttaaaatgattgtccaagtttgtattttcataagactattcacatagattaaacttatattgaacacagtagaataagcttatgatattgagccagattgtgtagaagatttgtctatgctcaatgataactcaatgatattacttgatgtgatgatattacttggattagatgcattattacaatctggattatgtgtagactagtttgatgcttcttgttaacaagtttattgcttattgcttaagacttatttaagactagacttccatattaataggttctatctctctgcccctatgctttactttactgttatctcaatttttctatgtatgaagtattgttgttgaaacctgaaagcttctacctaatatggttctcttttatgtgtctcaaagctgaaacaagtgagagcgataatcaactatcgaatccaatgtggaattgattaatttagataagtgcggtcgcaagattttggtggagttcgaatggtgaatctagaggtatgcactgaatggcttggaacaatttgtgtagtagcaaattggaaagtggtttaggttttcggagtatagatgattttaattcagctctactatcgaaatagttatggcgtttgataacggttccagattctctttttgcaaaggttttcaaaaggagatattatcggaaatccaatcctttgaaaatataaaatcatactctccgtcttataaatggagaagtatttgttcagctagatctctggttaataaaagacttattaaaagagtcgattcaggggcatccatctcagtttggaaggatctgttgattccggctcaattcccgagactagcaataagtaatggttcaattattgacccatctttaaaagtccaacatttaataaatagccggtcaaatttttggaataatgatctcttgaaggagctttttgatccggaagatgtcaaactaataagtgcattgcacttgggtgcgtcaacaaaagaggatactctaggttggcatttcacaaaatctggaaaatatacagttaaatctggttatcatagagcaaggttagaaaacttggaggataattcatctttcattggctatgaaataaacgttctaaaagcacatgcttggaaagtgcaatgtccacctaagttacgccattttttgtggcaaacattgtcaggttgtgtccctgtcacagagaatttacataaaagaggtataaattgtgatacatgatttgtcagatgtatcgctattacggaaacaataaaccatacccttttccaatgtcatccggcgagacatatatgggctctctcaaagattcctatggttccaggaattttttctacggattttatttttatgaatttggatcacttattctcaagaataccttcagaatttgattcatcttcatttccatggaaaatgtggtatatttggaaagcaaggaacgagaaaatatttgaaaatgtggataaagatccgttagacgtattatgtttagcagaaaaagaggcacaatcatggcagttagctcaataccaaaaataagggtttcatgggatcggaaaaacaaattcgggttcaaaataaatcacacgataatatttattctggttttcgttgttttgtgcacggatcttgaaaatgaagcgataagttttctggattagggtggttttgcatatcatcaaatggagactcgccaaccatgggagctgctaatcttcatagaagtctttctccactccatacagaagtcgaagctctactcttggcgatgaagtgtatgattggtgccgacaaccaagaagtagcattttttacagactgttcagacctggtgaagatggtgtctttcccaaccaaatggccagcgttttcaacttatttggaggaattcaagaccgataaggaagaattcacaagattttctttatctttaatttctcgaactgcaagtgtaaaggcggacaattcgtactgaaccgcttcatatcttttttgtaaacaattttcctcagaattggctcttttgagctctaaataaaatctgatgacaaaaaaaagataacttttgtagtatcattctcattgcaaagatcttagcttgtagtttgtatgttctgtgtatggtttccttatcagttttaaagactttagtgtttcaatgatgtttccaactttaaattctcttccttgcttgatattttcaggtcactgaagcagacaatttgtttcagatagtggagagtttccgctatatcctcctttagctacacaagtcaatttcgttggcaatatctttttttttggcaatattttttttcattgcatttttttgtaaaattattgagggttattattccatttaattatatatatagatatattattttcttaaataattactaaaatttataatatgttatttgttttttaaaaaatcacatataatcatatttagaatattcctctaacgacatcgtcgggggtctgagtcctagttttatgtaaaatcaaaagaaattagatataaaaacaaataaaagtgaaagataaattatatatttaaatttaatgtaggtaaagagtgtttataaaattagcaattaattgaatgtaatttcataaaaataatatttaattaaaatattaatttaagataatatcttcttaaaatagattttgtaagcactaaaaactaaataatatttattttaaggatttttcctccaaaaactctattaaaatgtatatatagatttagtaaggatagtgagattttctcaaagataattagtagtcgataacaattttcgatcgagattcaaattagatggccaatataaaggaaaccaaaaattaacagccctattaaagcccaatataatttctagtgagttatgtacctatgttattagccatcccgccacgactccttagggtttctctctcgcagataattttctccatctctacccatctaggattctccagattgtaagttcgtttattttatcgtcaatttcttcttgattccgtttatgagtaggataaagctgatgatgttctttgctataacatgttcttctgctatcataattttagtttttggcttttctcatgcttgtacgaatagtcattgacttaagacttagacctatgggccatttgacacagacatgttctaacattgtctatatatgtatatgattttgagttccaactctttggtaagattctaggaaaaatctattgcgttttatttgaagtcttgttgtgagtaattgtaactatgttaagtcttgttgttaattctaaagacgttactagtaactgtgtttttttgttgctgattttactcattaattgtttcatcaggatgttgttgttgctgcagcattcctagtctgattgatgtaattctgttgctaccaaaatcatcttgactctttaattctgtttctgtgcaaccttcttaactcttactgactttgactttgatccgcgagctaagcttaaggtctgaatgagtaatacgcttatgtgtagacttttatgtttttatgacttttaagaattcaacacttaagattatgtgtagaccatctctatgagaatcttaagcagcttgtaagtgaggtttttgccatgagtctctattgtggttgtatctttctgtaacaatttgagctcttaggttctttctacttcatgatttgttgcttagtgtttgtacatgttagtagtttgagattatgttgatttctatagagttggttatttgaaaggcgattttggtgtagtaatttctgataaatcaaaagttttttttttctttgtgggtttgagattttatcaaatcttcttttggtctgtggagaagagaagtcagaggttctttaagttttgctgctttcagctttgataatgtcgtttctatggtctcttctctagttgtattaaagggttttgttttgttgtttcgttttcagctttgttcgtgtaggagagcaagtctttggagttgttcacgtctttgttcattcaacgacagttttattgtgagtggcttctttattgttcattgttatttaagcagagtcttggtttatatattgagtcaattgtgtctctttagaatcatctttcataacactttcctttttgttttcgtaaactgcatatcatcttatactaatctatttgactttatctatgcagctgcagtattgaattctatcagcttgtttacctcacctatcaatgtcaactatccatggtagtgatgtgagtatcttcccctctaaactcatatttagttaatgcttctctgtaatttagtttgattttttatatatgaaactaagagtcttgcctggagtgatgagcaaactcgtttgtatcttcaactgagatttgatgagaagcttaaaggaaatataagaaaacacattgtgaatgaggctgggagacagtccataatagataagttttatgaagtgtatggggtaagacatcaatggaaaaaatttgggagcaaatttaccacttgcaagaagcagtacgaagctttcaggaaactgactcacaatagaaccggacttggttattttgcaaatgggttcattgacatgtttgaggattcgtggaacgagcggtgtaaggtcaataactcaatattaagcttcttctattggtttatgagtccattagtgtttctgattagtgttcttttgttgttctcattgtttgttttcaggaatggcctggaggtaggaaaataagtcagcggattgaattgtggtattattaaattgctagactttggagttggttttattattaaaccaaagtcgatttaattcaattgaaaatataccaaattatttaattgagattaaaatttggttattagattaaatcatggattattattggaatataataatcttgatcggttaatctaaaccattgcagattaagatcgtcgttgatccgcgttaagcttcattctctatacgatgtcttacctcctagagacttcacctaaattaatcggagcgtgttgtgatgttttaggtagtagaattgattccatttgtgatgaagttgtgtcacataatttcagtggggagttttttttatagtgaattttaaaccacaaaaatcttcacttgttgctattctctcattagggattaggtttagggaccaattcaaaaagtttgtgaaaagagcacgaacattgcttttgtcttcgaaactataacaacttcttgggttaacttgttgcattcaactagtgattggccaataatactactatttaataagagcttactgaaaaactcgcctatgaacttgtcttactgcagtaagtgaagtaagcatatcacttctgggactgtaggaacttgggtggtggtgatactctagtagcaatgacaacggaaacggaaaagaagaagggaccaacacagattcttaaaacagacaaggcaactaaacttgtaagattttttcctccttgaagcacaaaaatccttgaatcaaagctaaaatctagatattcttttttagcaatgagatatatttgtaagttgctaacttgcgttcatataatttggtttcaatctcactgctttgagtttgtgcgttttgcaggctgagaagtaggttgccaatatgactaggcccacagaggatgatcctattgagattgcacaagaagaacggccacacagatgaacgcaaatatctttttacatgttaattggcattttgtttgagaaacggaagctgaatataagtatcgttgtaacctctatgttaggcttggacttggtgctcaagtgtcacgacaaaaaaagcgtagaccctcagacgaccctctcgatcagaaactagaagccaagtttgctgcagggaaaagaaaaaatgcaagattggttgcagaatctgctggttctagtaagaatgccggtgatgacaatgaggatggtgatgaatcagaaagcaaaagccaagcatttggtatgaaaaagaaaaatacaagtacgcctcattagagtttgtgatgtacaatatggttaaaagtcatggccttgacatctatttctttttgcgcaacagatattttacataaatcatatggcttttgctttattgtataactttaaaatctctacgtctttgatatatgatacttagaatattctccatataatactctaccagaaaataaagagattcataccgatatcacttggaccatttctaaagatccgtcattttggaaacaatatcagaaatgaagaaaaaccttctctaacgtaaatcgaaaataggtaatttaattaccgtaattaataataataccaatttgaacaaatatcttttgcacttctgaaacggttgcgtctttttatcctaattttcgttaaaatatatacgtttatgtttttacggctgttttttttgtcacattttttcgttaaaatatttatgatatttttttgaatgttattttgtttgactacaatagtatcttttcgcagataaatggttgcgtgcgtctttttatcgcaattttttgttaaaatatttacggttgtggctttttattgcatcttttcgttaaattatttattgttatcttttttgacagttatgttttttcaactacagtcatatcttttcagtttagggttgtgtttttttatcgcatcattttgctaaaatatttacgatttttttttttgatagttatatttgttcaaaatacaattgtatcttttcagtttgcgattgtgtctttattgttgcatatattcatttaaagttacgtctctacattatatttctttgcatttcttttcactactttccgtataaacaaagttgtttatttaaatgtttatgatttttgaactctatatatttgtctttcttcctaaccatattttgttcattcacacatattatttgttttatgatgaattaaaaaatgataatctggaaaatggctccaaattctttactctctaaactatttataaacatacttacatacatcattttaatatgaaagaaattgctctaattcttgatctaaccaaagttttttggaatctaatagcaataacaatctcaataaatgtcttttgcatttctaaacggttgcgtttttaccgcaacttttcattaaaatatttaaaatttgttttacggtcgtgttttttttgtcaaatatttttaaaatatttatggttatgttttcggacagttatacttgtgtaactatagccgtatctatttgattctgaatggttgtatctttttatcgtaactttttattaatattatttgcggttgtatctttttatcgttatttttgttaattgcatattttggtaaaacttatgtaataattcgaatatttgaattattattataataatttaatacataaatattaggcttgggcgtttgattatgctgttctagcctcttaggatccataagggaaccaaaaaagtttcggttcggttcagatacttagaaagagagccgacaaattaccaaattctaatagatatcggttcggttttgatcattttactcaaaataccaaaaaaagaaacgaaaaatatccgaaacttttttaccaaaataataatggtccaaaatattaaaaaattaacaaaacttttttgggtgataggttttttaaaaatgtattggcttagatgtagttttgtatagagttgaccaaatattttttggttcgatttgggtatccatagatatccgtttcggtttgcgtataccgtatatccaatatccaatatccaatggatagtttgactgagattcaacaggagtatttagtggtatcttgatacgaaccggaaccctttttcagcttggtttggtttggttctttggttccggtttttatgccttgatcgttctaacttctatcgttaagtgaagtagtggttacttttcaagaaattttacaaagccgaaatactaaaaaatttggggtcgattggtaacgactgttatatttggctatacagactttgactatagaaattttggttgtagagaatttggctgtaaagactttgactttaaaaactttggctgttaaagtatgattggaactaaaaactgtagaaactgttactattatttttacaatatatatttagaattgtgaattatttgaaaatgagttttgtgataatatactaacaaaattaatttattataagttttagaaaaatacaaaataaaataaatagataaatatactcaaatctcagtaaataaaaaatatatttaatccatataaagatctgattaggtgttttggatcaatgaactatcactgtgatgcaattgatgcaaaaaaataatgaaaactggatctctaaaaagtgaaaatagaaagatgattattaattaatcaaaatatttttgagttaaattacttattgatagagaaattgtttttcatttgtcatggagaaaacgaaaagaaaaaaaaaagaaaaacagattttattttattatttgttttatagcccaaaaagtctcacattgtgactttaaaaaactgaacctgaattgaataaaataaagcagttaatttattttccatcatccgggagtgtgagagagttctctctcttatctctctaatatcttttagagagagagccacatccaagtttcttttgatgttccacaaaatccattaacgtcgtccagtttcttaacgctggctttgagtctgacatccaccggcttctcatgcagtagttggtcagcttctttcacggcatcatctggctttgttagcagagatgtccgatccgccgtccgtcaatgcttttcacagcgtttgtcagcttgcttctggcatccgtcggcttcttaagcgacggttggctggctttggggttttgtttttattttcgttttctctcgattcattttgctttagtttgtttggatttagtttgcgttttaatcctttgatttgactgcataattctctgatccttctttgtttaaagagcttaattcgattttcaagctaattttctcaattttaaaaatcggatttgaagttgcggattggagttgtcgttggattgattttaacgtaattgaggctaatttcttcttaccaaagcatgtgaatcgttttatctttcctgttttttaggtttaataatggaagccttgtcagcttatcttttaagtcgatgatcccggaattcatgaactgcgtttatccatggaagatttcaattttgcagatctaacggcgaagtttgtttgggattctctgaatttggtggtgatgttcatcggatattgttgagccttgatgtattgatgctcgttacgactttttccggtgactaagaattcctttcggttgcaaactatgtcggctgaccgacgatgacctaaaactccgacgtctcacgtgttatcatcattgtctcctttcgtgacacgtgtatctgtgctggacatgatcgactcttccttcaaccagtggtttcatgaattgttgggcttatgtttgtaatgggcttctttttgccgtctctgataccgggtttgaataaccggtttgagcgtttgtctctttgtacttgaagtattgtaagatgttatgcttttaataaaaaaaacttttatgtgaaaaaaaaaaaagaataaaataaaccagttacctcagattccttggatacttcaaaaatgtcggtttgcctatgaatcatagactttaaaagcttttaaattaaataaagtccttaaagtgggattagtaaatttttggcttttaatttttgttccaatcaacccctaagacactcaagaaaagaagaagaagcataaaaagaggcctaaatgcccagagaattaaacaaatgggccttaatatataaacaaacatcaatctctcgccgtcaaaggttacatctatcgccgtcaaaggttccatctatcgccgccgctgagaccgccactttaggccgtctcgtccgcaatctccgtaaccaacaccacccgcatcgcctggtaagctcgattttttaatcatttcgatctcatatgatgtcgatctgttcaatcttgcgaattcgatctttattttgttctgagatttagggtttcacgaatttgtgttctaggttttctggcttaatcatttttattgttaactgttctgattggttcttatgcttttggttacacaaagatctcgactttttgttgactctgtatgcaaatttgtcaaaagtcaaaacgttgttacagaaactctctttcgtgcttgtgtttatgtatgaacaatagcttcgctattgggtttgttgatttcaccacacttgattaaatatgtatattctattgaaaatgtggtcaatcttggcaataaaaattgaattgttggtttagaatgtggtcgtcactcgtgagtatagattggattagtggatcgaattattaagtcagtggattgaattgtggtattattaaattgctagattttggagttggtttcattattaaaccaaagtctaatgaatgtaaagttgaatttatggaaaagtattggttatttccggttaagaatggattacttgaattataagttacttcatgacctgccttgctattaaagtaaaaactggttgttacacgaacacagtagaacaatgtattaaaaacagcccttccctctctctgtctctatatatctgtctatatcatagttttatgaattgatttttgtgggggatgattttgcagcgaattgatcggtgaggtggaagatggagttttgtcccacatgtgggaatctgttgcgctacgagggaggtgggagttcgagattcttctgttccacatgtccatacgttgccaatatcgaaagacgggttgagataaagaagaagcaacttctggttaagaaatctatagaacctgttgttactaaagatgatatacccacagctgctgaaacagaaggtattttcagtctctggtcttctcttattctaaatttagaactgtgattagttagttagtccatgctctgttgattggtcgactaaattcgtaaatactttaaagttgattggtggaaatcagttacataattactcatgttatggaaagggcaaaaacaataatgctaaagtggtattacatcattcatggtatgcaagtgcaaaaacacttggggaaagagtagagtagactttttgttcaatgactttctcatgttgggattgttttgttttaacagctccatgtccaaggtgtggccacgacaaggcgtacttcaaatcaatgcagattcgttcagcagatgagccagaatcaagattttatagatgcttgaagtgcgagttcacttggcgtgaggaatgaaccgatgatcatcaccttctctgtacccgctaattttgcaatcttctttgagtttgttttaccattacaaagtttgtagttcctctatgtactctggttctttctgtctcagagctcaagagtttctgtatttaaaacaatcgataaaattttggaatattgtgcaaagttttaatttttgaggtgaagaatgtaagcaaattgatctgttttgagatttttagtatcaagactgcgatgtatttgttattgcattggtatttgacttcttcctcttcctctgttaacgtaacctccagatttcaatttctcacatttcttcgtcttcttagcaagaagatgtctaagcagaggaaaaaaactgtattagccaccgtttttcgcaagtcatggtaccacttaaggctctcggtgtgccatcccactaggttcccgactagcaactagttctgaataggcgaagctttacgagtggcagctccggcaagctaaacgtatgggacgaatagctagctccactatcgactttggtcgttcttgatccagatggcaaacggatcgggtatggtgctactactctcaacgccatttattctctcgctcgccattatgagaaatcgggtgttgatcctggtcccgagatacacattgtgttgacaggttagattattcatacgatggaaagtattcctcacacttccttatcttgcagctcatgaccctgatagtcttgttcctctcctttttgatcatattcttgctaccgcttcatgtgcaagataagctttcaaagacaacggtgatttccttttttaagctatgtaaaacagacaaggatgtgtggatgctgatttttgagtttcatttgtgaaggtggattatttattggagacgtccttccttgttttgatgcttttaaaatcactcccctaaagaggcagcttccatagttactgtgcctaacactctcgatattgcctccaaccatggtgttattgtcacatccaaatctgagtctctttctgaaagctatacaatcagtttagtcaatgatcttctagagaagcctatagtagagaagcttgtcaagaaagatgcgatcttacatgatggacggacactcctaattaacacttggataatatctggggcagagcatggttagacctgatcgctcttggatgcttgtgccaacccatgatcttagagcttattcctaaagaatgacattgtaattcacacattactcttcttgaagttgacatattgtaaatgcaaaatatcaatgcctttaaagaaaacaaaaactagttaaagaactgcaaatatcacatgaaacggaaaccatcagtttcttttcacatttttgtatctcttttctgtttcatattacacaacaattcccacaagcttttttgagctttattttgagttcttcattatatataattactagataaggtccgcctatataggcgggtgtataggcggatgtaagataaaaatttattcaaatattcattaagaatatttaaattttaaatagtaaatattgatccagacattttttctaatatttaatttggaaatatttgtattaaataaaattttaatcatacacattcaattttactatacattttaattatctatttcatcataataaattatcttgtaattctacacactccatctttctttttatggtaatgtgtaggggacaaaatcctcgtataatatattcataacataaaagtacattcggacacttcatggaaacgacatcccatatgtatcctctaacaatatcatacttacacctgtgagaaacatcaactaagtacagaccaagcgataactaaaacacataatttgctaatcatttcactattcattcctatacacatgagtaacccggactatcatgtccttatacactccatcttattgatgatatttgaattttaaataggaactcacatactttttcagtatttaatttagtatttccttaaaccaaattttaattttacaaattcgattttacaatataatttaaatatctattttacaagaatagaaaatataatttatttctttacactccatcttattgatagttttccatttttagttaaaaaaaattttaagttaattatttagatataaacatataaattagtatatgtaaatatgatttttttagtttcctatcttttttttaggaacaaagtaaaaaaagcaactaacacatgtcaaaatctgatcgatagagttgacacgtgtcatgatcctatgagttagtaactttgaaaaccatactttatataataagataatattctactagggttggggccattgaaccgaacagaaatttttagttttctgttcgatttgggttcactctgcgaaaccgactgtcataatttcaagggttacacgagaattttagtttggtttgggtcgaactgattgatttctcgggtaactctcggctaaacttagatctgttttcaccaaaaccctaaattaacggaaaatatccaaagttaatcaaaaataacctattttaacccaaaatatttttagaaattgttggttttgcttttcaattaatttagataacttttagaactatttcggttaaccgataaccaaagaaaccggcttggtttggttcgtcaaccgaagtagcagccctgcctgaacagacaaactatagatggaaatctagacagtttaccgaagtaagagaaattgtattatacattgtaaaggtgtagttgtcttcgattttcccaaagttatatgatcgtaaagtctcttagagctaaaacaatttgctttcataattgaacaaaactttcttacaaaagagttgtccccatttaatcgaaagaataaacaactgtgggcaaacccaaaagagagaaaagttaaaaccttacacattcactaccaacagagttaatccatgtccttcctcaatgaaaccgatctatgttcaatgttgtattgtatttttttgggtccagaccctcttcctttttctcttcatgtttcctgtcttctacaacgtctcttctacaagcactacttcaatctctttgagtgtcattcaacttgttctccaataagatctagacccacaagtaagaaagatattccttgaaacaaaaggaagtagaaatggattccttgcgccgataaaagacttcgagttgccgcggtcagtaacagaaacgctagagatagctccttcatataaatcctattgtgcttcttcttcttcctcttagtcttttccgcctttttctcggcttcggtttcgggtgcagacacacctctctgatgtttagttgtcttttcgtctttttcgactaacgcagcaagatctccttctgatgaccgtcctgatttttttgtaacaacccattcataagcacttcctagctgaaacaaacccgagaccattgcgttgaacttagtcacagacattgtgttctcaaagagaaggtacgggacgataaacggaaacgacttcggggcgggaaggatgttgaggaaagacattgtggcaggtatgtagcaaacaacccaagcgggaagctcagcttcgggtacaaacatagtcattggcaggataatacaaaagagagtgaatgagtagaatggcaagattagcttcctcaggagaaagaagaggaatatcaaattgaatttctttcctatgcttatctacaaaacaaacacacaactattaaccacatataataccaaaatttagaaagtattttaggtattttttttctatataccgttgcacaggttgtaaaaacgttattttttcattgaatataatttaacattaaattaaccgttagcgcacctttgatttaatgaccgcgggcaaacaaagacgaaatagttgcataggacctgaatgccatctatgttgctgttttctataagcttcatacgattccggtaattcacattggcactaaaaaaggcaacacatagtatgacattagctaagaatctaacaaactagtttgtattcgtaataacaacaacatgttattgttactatacctcaacgtcatttaggaaaacgaatttccatccgtgaaggtgagcacgaaccgcaatgtccatatcctcgacggtagttctctcgagccaaccaccggaatcttccaaagctttgatcctccacacaccggctgtcccgttaaacccgaagaaattcaagaagacactattcacttgttgctcaacctcaaagtgaaaagccaagttaatattctgtaatcttgtcaacaagttctcttccttattcacaaaagaccacctagcttgaaccaatcctatttcctcattgtcctatcaatgaaaacacaactgatttagtatacaatcttttcttggatcaaattaaccaattattaccttaaaatgaggaatggtcttcttgaggaaatcaggtagaggttgaaaatctgcgtcgaaaatcgcaacgaattcgtagtctttaacataactacagttcatagcagacttaagattaccagctttgtaaccttctctattaacacggtgacgatacacaatgcgtgcacctagcttctgccatttatgaacctcttctttaatcaaactctgcgttatcggatcatccgaatcatcgagaatttgaatcaaaatcttccctttaggccagtctaagttacacacagctgcaatagattgctgataaacctgtacaaaaaccaaaacttagtaaaaatttgtaaccaactcaaaatttgttttagcttttgggtttttggttgttacctctttctcattacacatagggatttgaacaagaaccatagggaggaaagcaccattatcaccagattcaagatcagagatagaatccggtttaggaaccggtttaatcttcttaaaccggatccaaaaacaaccaagacaaagaatgagtctatcaagactctgaacaagaaacagaacaatgcagccattagcaagaaactgaagaggaggagcaagatactcaacacgaagcaaaacccatctcgtgtaaacccaatcaaagaaccctttattgaagataaactgaagctgaagcttagaagttccaaagctccaacctttgaaataagcagcaatctcaaaacccaaaaggattaaagaaagccatagaaacacctttaagcaagagtagaaaagtttcgatttcttcgtatggttttgcttctgtaatgaacccactcccgaggaggagatttcaatgtctgtacggccggcggcgatacggcggcgcacggcggtgccgagagcgaataatgcagaaccgagagaagtgagacaacctgcggcacgatgagctttgagaagtagaacccaagtgagctgtcttgcgttcttgttacgagatttctcatgagttcttacgaggaaatcgtcatgagaaggtgattcaagttccaccattgaccagttattagggttttccattttgacaacgactggtgttcctttacgagtgttgttgttgtttcctttagcccaccattcaaactttggtgccattttttttttcttcaaaaaagaaaaaacagagaagaaagaagctaaagaatggatctcattgccagctagaagattgatggagacgcgtgttactgtaataacaaaaagagaagagaagatgtaatcatgtaatgaagagaactgagaaaaaaactctgttcccgagataattagagagtatgaaaattgaagaaatttaaaagacaaagagagagagaacaaagtggtaacagctcaacacgttttttttattatattagcagattttgaagaatatacaaaaaaaaaaaaaattgagagaaacaaaacaacacccaatggtcaaattgttacgttgaaggaatttgtagattcccagaataaggaaataggatcaaaagatatgtttaccaaatttgttcttcttcgaaagactccacttataatcttctgatgattttggtacaatgtttacaaaaaatcagatctttgatattccgcgtgtgatattaactgggattagagaaattacctcgagttaataatcacacgcgaaagaaaaaaaaaaaaaaaaagaggaaagtaatctaaaaggattattttttggagaatatccgcaaaagacaaacgtaaggtaagaagaaagtaaaaatagaaatgtggatttgagttgagatatggattttctgtttttttttttttttactgtggttaaaattgtaatgagtgggtgagagagaaagataagaccaagtctttggccacaccgttcatttagacatttgcatcctaatttggcgttttttggttttttttttttttactgacatttttatttagttaaacattcatgatactattctcttagtattgtctttatctataaatcaatataatttatctgccaatttcttctaacaatatgatgttgtctaggattttacaatcattgaatggaatatagtttcttgattccactctaacagaggttttgattggtgacaaccaaaaaaatatatgaatgtaggaaaaactaaatgaaatgattatgaatataaagttcttaaaaataaatataaaatctgctagaatctaatacttttaattgaggaaaactttgaaaagagtatctaagaaaattttaaaatgacatgaaatgtaatttatatttagttttctcatgtatacattaaagaaacaattgtaatcaccaaatagatataattaaatataagaaattggtataaaaatattttagataagtattaaatttcaagaatttaaattcccttggtatgtttcactaataattaattcagaaagtaattagaagacaatcaaaattgaataagaaagaattgatatccaattatatcatatttttttagttttgatcattatatttcttctttcttatttattgatccttatataataataaaatgaattatcacatcattcatataattaaccaaatttagttttttgttttgttttttgaatgaagatatattacccaaccagattattattttacatcggcaatgaaaataaatggtgtttcaaaaacatattatatgaggtccaaactaataaaacgacgaaagagtagcacacatgattttttttgataatattaatttggtttcatctaaatcgatctttttgaatgtacaattagatcggaaaaaacaaatattattattaacttaataaaatagtataaatagtttatataaaagaaaacattgaaaatactataagtagttcaaattgatcaaaacattttcatattattttacttgatcagataatataattattttttatgaaatcagcgagttaatattataaacatcaactaaactatacatagtcttagataatatcacaaatataaaatattttgaatatttaatttactgtatattcaatttctaaatatctataatttcttcatattaatttatgatataatattttagtatttacataaatttttatttgataattatatttccagtcatctttcttttatttgtaaaaagaaaatcatcacatcatttatataacaatagtatagttttttttaataattttgttaatttatacataatactaaaaatattcaaaatagaaaacttaacttaatgtgtatatatcttatactttaagaacatatgtgttagtctacaataccctcattcatatggtggaatgggttaggatttaatgtttagggtgtcctttgcgtctttgcggcttgaactgccaagtcatgctaatcctagtccgatgcaagacacattaattgaagttagaccatgttgacactcataaaagtacaaatacattaatgtaaaaacagtcgcttatatgattatatatgagactataaaatctgcacggttattatgagatcagtattggactaacttatacttttctttcacaaagatactcaatacattaacatcatgttaacataaaatctttcacaattcaataatttaatatttttaatatgtttaataaggtaaatcgttatttcgaactacccgtttctaaaattataacttaaaattaccgtttctgattatatttataaaattactatctttaccgagacttcgaataaaataatatgaagctttattgacaatttcgtatcgagactatagtttctcattcctgacagatttaaagtttgagagttcatacaaaagtaaacacgacgcagtgcatgatcaatataaaattttcattaacatctcgtgtcagttttaagtttaatggttgctttgattttataaaataacttttgtcggtgatagtttgtggtaggccacgtttagacttgtattgtatggccgtcttttggattcaagattcctctgcatagattattcaaattgcattagtttatggagaaaggaatatggatatgctaaatcaaacattaaataaatttagatgtttataattcagctgatgaatatgacatatgcattgaatgttaattggaagagaagaactacgtaaatgtcaacgagtttttaaaatttaaatggcttttttttcatttgattacatcattagtaatatataatctaattatattataataaacactacatgcaatatatacgattacgatgaacatataccacgaacaacgattctatgatacattttttccataacattcgaatccaccacggacagttttgcatgtattatatctgatgaacatgttctccattacctcacctatcttctagtaatagttgctcgataaaattggaatttatctctacaaacccaacttcagtccacctacaattcgataagttacggatatatgattttgatgttggcttttcacctcttatgaatgtgctttcggtctgcaatcaaaatttgtctcctttcaactttgatgaaggtgctttacagctaaaagaaaaaaaattagaagcttcaacttacttgctatctatgcaattgtggcggattaaaatctcatgaacaatttctccaaatgtggaagggtaaaatcataaattgtccttttccaaaaatttccaaatctgtcagctcgaaaatttgcatttttaaaaaaattgagcctacaataattcttttaaatagaaaaaatcgtcgtacgtgaatcttactcgcaagcgatttttctctctcaactcttcttcttctgagcataaattcgtgcaccgtcgatagggtttctctgtcgattccggcgacagtgagacccggtggctcatggttcatcatacgtaatccacttcatctttttggcgaggctattctgatcaaaatcaaggggagctgtgatgggggacaattccacaagactccaaaggtaagagctctaccggtggaattgcgttgtggtgtggaagaaggagacttcacggcgaggaacgaaagagaaaggtggttagattcggagtgtggcgacgcaggagatttcacgggactattggttcctgggggaggtcgtctgtggtccggtgaagctatgccaccgtcgatggattcctaatctattccctaccgctttttctctctcacgacggctcatggtgcttcctcaacaaatatcaagatcggttatcttctttctccggctcttctttggcgggatgatgacggatcttgtgtcaccatcatcgttcggcttacgacgtcctggctcgtcgaagatcctcttttccgatgagtatgcgcaattctagggcggcggcttcgattaggttttcttttgaagattagggtttcttttccagtttattctagtttgttgaattgggccggttttgtttagatagtcttgtccggtttggtgtttgtggatttggccctaaggaaatttgtatgggcctaaatccggaaatagcccattgggcaattatttataatattgaataccctttaaaaaaaaaaattcttttaaaatattaataacttcaagattaaattgtttaaactttggaatatttgcaaaaatatatttttttctaccattttgcaacaatacctttttatattgtccattctaaaaaatacctttttttgaacaaaatgaccaaattaccctcatcaaatgagaacatgtaattggaaactgaaattttccgtcaattttttttttcgccaaaaaaaagggagatttgcaaaagtgccctttttctgataaccttttgcaacaataccctttcctgatgtccatttttaaaactgcccctcctaatgtggaaaatgactgtcttacccttaatgaataattaggttttcactttcatttctcctattgacaaacctcttccttttcgccgacgaattcagttctctccgacaaacctcttcttcgccgacaaattcagatctctccgacaaacgttttcttcgccgacgaattcaaatctctccgacaaacctcttcttcgccgacgaattcagatatctctgacgccgaattcatttctctcccgacgacgacttcagatctatcgtcgaattcattctctccgacgacaaacaatccccagagagatcgatagatccgacagagaaatcgccagatccgacggtaacatgactctcgtttttatagtggattttatagtcgattttatagccgattttatagtagatctgatgatgtttcaatacatgtttcacagatggatttagagagtgaaatccttacattgcctgaacagatctacaaagaagatgacgaatctattgcaattggtacggttcaacaacactcggattggagtttagttaataaagtagaggaagctttaggcgagagtttatttcagaagattagaagtttttttcttggtcctttagttgaattgcgaccaagaatgaaggcaaataaaggaatcagattttctgggaaaatctgccactacctcatgcagcagagagtaaagactaaaggatcaactctttggtttagagttgattctcaaccaacccgtttctccttgagagagttcttcctcacgacaggtactatgatttacaatcgtttttaaagcataactaattataatagaatgatttacaaggcattttaaaaagtgtttgcatggtttacaatcgtttttaaagcataagtaagtgtcatagaatgatttacagtggattttaaaaagggtatgcatgatttacaatcgttattaaagcataagtaagtggcatagaataatttacaagagattttaaaagctttttaaaggattaaacatgatttacaatcgttttaaaagcataagcaagggtcatagaataatttacaagggattttaaaaagggtatgcatggtttacaatcgttttttaggcataagtaagtggcataaaataatttacaagggattttaaaagcttattaaagggtaaaacatgatttacaatcgtttttaaatcataagtaagtgtcataaaatgatttacaagggattttaaatgtgttttcatggtttacaatggtttttaaaacataaattagtggcattgaatgatttacaagagattttaaaagctttttaaagcgtaaaacatgatttacaatcgtttttaaagcataagtaagtgacatagaatgatttacaagggattttaaaagcttatagaatagttaaacatgatttacaatcgttttaaaagcataagtaagtgtcatagaatgattttcaaaggattgtaaaagctttttaaagtgttaaacatgatttacaattgtttttaaagtatttactataaaacctttaataatagtctctacattgtcttttgttcttacatgaattcaatgtgaacctgttaatagggaacttcgacgaaaggggaaagatcttgtgtaaaagaaccatacttttgggcgagtgaaggagtatatacacttggtgatctcgaagattgattgttttcaaaacctaaggaaggtgaacctgctgttgaagatgaagaaaagttgtgtcttgctgcagtattgttgattgaaggaattctattcacaccatttgtaaaagagaagatacctttgtcaagattgcagcatgcttcttattttgagatgtacacagcccaaccgtgggtaaagaagcattcagtgttctatcaaattcaattctgagaacggacaagaaaacttgggcaaaagagaactatgatctgagaggatttggactcgcgctaaccatatgagtgttgagcgtagttccagcatttggtgcagcatatggagttagagataaggaatgccaatatgaatatccattgatattgaagtggaaaagcactactactccagagtttttcaaggttgtaaaccttgtaaatgatgtttctaaggtaagcttttgtctatttacaaaatttttaaaaggtgttttagaatggttttgagatttgaagttctgctttctcaagatttgtaatgttattgtatcttcacagattgaggtgaatacaattattgaaaacccagaagacttcaagtctttagttcctgatttccacacacacgacatataattccaacaagttttggaacttgttaagatgggctacagaatgaagaaaactgaatgcaatacaagatgcgttgatgtttgtgctgaccttaaagagtaggtcaaaacaaaatgaataacaaaatatctgataacgagaagcttgacaggattttgacaatccttgaagatcttaacaagatagtcgagctgattgagaggattttggacattagaatggaggaaaagaataatcacagatctgaggaagatgaagaaagaaaacaagaggtaagaaaaaagttttaaagattttatgtatttaaatcaatttacagaagttaattaaaaaagtgtactcttttttttcgcagtatgaagaagatgaaggactagaaagaaaagcaaaggtaattgtaaatctttctttaaaagctaattgaaaggaaaagttttacaaagtattttaaaggttacatacgtagtaaaccttaacaatgtactctttgttttcgcagtctgaagaagaatgaggactagaaagaacaccagaggtaattgaaaatctttacaagctattttaaaggtttactaattatattatcgattgacttattttttttattttgttgcagaatgacaatgacacatttgaagattcaatccgagagccaaacacacagtatgggagctatctgggtgatgatgaaaacacccaacgtgatgttggtgatgaagtagctgaagaatcatcaaaagtgcagtaatcttatttctctaaaagtcttacaataatgattagtatcctttttataactttacattctgttatcttttgaaggatcagtctcctactccacgatcctctacaccaaatttcaatattttatttgaagaaagtctggatgttcaaaagaataagaagagagttagcagaggaagaaatgaggttagcatttaaaattttttgtattatctcaccaagtttttataatgttttttttcaaatcttttaaaagtttatctttcttgcaactttagaacaagagagttaaaccaagtgttcatgctaaggataatcttaaaacaagaaaacaggttagtctttgcaacggtactgttttaaaaatttgtcaattgtcttgttatgatatttacaacggattttaaaagtacttttaatcagtgttttttactattgtagatgccgagaaagaggcagaaacaagttgatagtgttgatgttgatgttccaacaagttaagaggttagtatctaatttattatgattttgaaaattttgtttacaaggtattttaaacatctgttttttttctttttgataggcacaaagtaagaagaggaaaattattggcaatgatggtgataacgctgataatgatggcgacaatgatgatgatcatactactgcacaaagaaagagtaaacggggtacagttccttccattcatacacaagcacctttcacagctgagaagaagaagaatccaattttgcatccatttgcgaaagttgatgccacaagacttgagaaattggctgaatggaagaaatcaaggaaaaacaagtgagttttgttgtaagatagtgagttttttttttaaaataaaacatttattggtgactgttttgttgttgtaggccactatcaatcgccgaaaatattatagatacaaagtggtttacaaccctagagacgccagggaaagcaataacagcaacggtatgtctaaaactccttgtaaaattggttttcaaaagtgtttttaaaagcttttaaaagactaaaccatgatttacaatagtttttaaagcatcactaagtgatttacaagggattttaaaacgggttacatggtttataatcggttttaaaagattagaaagtggtaaagaatgatttacaagggattttaaaaaggatttacatgctttgcaatcatttttaaaggactagaaagtggtaaagaatgatttacaagggattttaaaagctattaaaaggggtttacttgattaataatcgttttagaagcataacttagtggcatagaatgatttacaaggaattttaaaaggttttaaaagtgtttaacttgatttacaatcgttaagaagcataagtaagtggcataaaatgatttacaaggtattttaaaaagggtttgcatggtttacaatcgtttttaaaggggttttctaatatgataatttttatttttgttgtgtttagcatgttgatgcagctttggagttgatgaaaatgaggaaggaaagcaatcctgaattcttcaaaaacaaaacagttgtatttgttggatcgtctttcttaaatgcgattgatgagtcatgcatggagtttttggatgataaagagggatttcagtttccatctgaagaaatctgtaagctgataatagaggaagaaaccaagtgcatattggctcctttctatatcaaagaaaaatgttgggttgccttgctaatccacttggaacagaagacattttgtatatgggaatgtgcaacttcttatttaacagaagaagtcaagaaaaaatatgttggtgcctactctatagctatgccatacattgttcggaacaacctcaaaaaagaagacatggatgtctctccatttagcatcaaagtcctgaccacttttcctcaggtaacttctttaatatatcatagtcctagaaataaagattccgtaagtcctggcctcattgctcaagtaattcttttggtttttcgtggtaggctcctagaaatgaagattttggtatctatatgctgaagtttatggaatgctactcaatatataccagccattcaaaccttgaaggaaacataattcaaaacgtaaggaagaaattggctgctgacatcttcaccgaattagggtcaatcactttgtagaagtagcagacttctaatcaaaaagtagtggaatataagatagatttagcagcttttgtttcttattacataaaactttgtcatttgaatattttatgaacatttatatggaacaaaatttatgaagtttatttagtacaactcttgttaacaaaattactgtataatggttgtttgggttaacatgtgctttgatttgaatggaaaacggctttaaaatgttaaacatgctttttaacagggtttttttaacgatttacaagctgttttaaaaggattttaaaagtgttgaaaaagctgcagtagctgttattatgaaaagatttacacccgtttttaaaatgatttacaaccgtttttaaaatgattaacaaccgtttttaaaagagaattacaaacgtttttaaagaaattaacaatcgtttttaaaaggattttaaaagtgttgaaaaagctgcagtagctgctattatgataagatttacagccgtttttaaaatgatttacaaccgttttaaaaaaaaaacgtttttaaagagatttacaatcgtttttaaaagaattttaaagtgttgaaaaagttacagtaatgttaacactgtatctgttagtaattgggcctaggcctcttatttacaaaaatcaaaccgttttagtaaaaaatcactaaaagctcaaaattcactataaaccaaaaacaaacaaaggaagggaaccgtgaaaagacaaaaggtaacaaaaaaaaaaaaaagagaaactgtcgtctctcactttgtcttcttcctttcaacaatctgaagaaattccgtttatccagcaaaaggaatcaattgaaggtaacaaatttatgacactgaagtttgatatttgggtttgttcgattttgtttatttttgccgaatctcttttttgttatagcatttctagggttttcagttgaaaacgaaacaagtaaaatagattgatatttggaattttgaaggagttttagaaatggttttacaattttgatagatttatgtttaaaagtttgattttgaatgccgattaacttctttgttgtagcaatttcaaaggttttttgctttgaaactacactaataaatagattgatgtttgggtttgtgttttaatttatagatcctcacttaatttatgggttaccagttgattagagttagtttgaaaaagggggttttgggttctatttttggcggcagtgttcttttcaaaggattaaaattttctttttgaaatggtttcaaaacggtctttgaaaaggattatggagtaatgactgtgttttacaagggtttttaaagtcattagaacgatttgtaatgacttttaaaaatagttttacaagggtttttaaagtccttaaaacgacttgtaatgactatgtttatgtttcgaaaactacacatgcataataaatttaatgactgtgttaatgtatttcatcaggttttgagaaaatgagtacaaagaaattgtacttccctacaagggtatcaaagcattcatccaacaaaattgtctcgaatgtcagggaagctttagagccgatagagttcaacacattaatggacacattcttgggtcctatagtggaatttgctgaaatggacgtagccttttcaagccatatagttcatcatttactccagagaaggatactaacccacaatgacgaattgtggtttgtatttgctgatcaacctatacgattctccttgagagagtttatcataacaacatgacttccaatggatgatgcatcaggaagcagtccaaatgtgaagagaaagaagatagaaaagtggtggataaaagataatcagactttgaagggaaagcagaaaaagatttgtggattaatgaggatatgcgttttatcgatcttacgtatgttttggaaaagcattaaaaaaaaatgctgctagaggagagaatgagattggggggtttgttaccagtggaggggatattgctagctcgaaatccgtctaccaggctgccaattgagaatctgcagaaagctactgatttcgaaaagttctgcaagtatccatgggcgcaaattgtttactcatatttggtaactgaagtgaagaaattcgatattgacattttgttaaggaaacaatatggcctgtttggatttgatcctgcaattcagatatgggcattatcatcggtttgaagttgggagaaaagtttggcactagagatgaatcatctagtggaaatattccattaattttccaatggagatcaacatcgtctccaagtgcaaaatctataacaataattgcagatggtgacaaggtacattttcttagctatggcttttttttatgttttaaacactgtttataaataaaaaaaatgttttacaatagttattacaatcaagttttaaggatttacaaagggttaaaggcaatttaaataatttacaagggattttgaaaggttaattaagaattgtgcattatttatacacagtttggaatttggtttatctttgcaggttgaagtgacaccaatagttggtgttaattctcatgaatatgaccacttggtttcacagaagaattctgaagacaaggatctgttagatatttttgatcttgtgatcaaagggtatagaatgagcaagaaggattggtgtcattgatggattaaagtggaacaaggacatgaaggtagaattgatcatgtattgaaacctgcaattgaaacacttgtgcatcaaagaagaaaaaggaaattaatgtcctttgatgagaaagtaaaattggtctatgaaaactatgaagttcttaagaagaaagttgaaaggctgaagggctatttagggatcgaaagagtttctgccagttctactagagaagaagaaaaagaagaggatgaaaaaaacgaggaggaagaagaaaagcaagaggaagaagaaaatgtatgtatttttacaagggattttaaaagcttataaatggtgttttaaagatttttagccgttttaaaaggataggtagtgttcgatatatatttacaagggattttaaaaacttctaaatgaggttttaaagatttaaagtcgtttttaaaagataggcagtgttcgatacttattagcaagggattttaaaagctttttcaaagtgatttacatgagtaattattctattttaaagaacaaacaagtgtatcctggcttgtacttataaaacttgtaattatttatacatgttgaatacagaggtcatcattctattaacaatgatgaagaaacagaaaaacaagaaattcccaaacaaggacaagaagaaaaacatgaggaagaaggaaaagaagaggaagaaggaaaagaagagaaaaaagaaaaggtatgtatttttacaagagattttaaaagtttataaatggtgttttaaagatttttagccgtttttaaaagataggcagtgttcaatacatatttacaaggaattttaaaaacttctaaatgaggtttaaaatgtttaaagtcgtttttaaaggataggcagtgttcgataagtatttacaagggattttaaaagttttttaaaagtgatttacataactaatttttcgattttaaagaacaaacaagtgtgtcctggcttgaacttataaaacttgtaattatttatacaggttgaatacagaggtcatcattctacttgcaatgttaaagaaacagaaaaaccagagaatctcaaacaagacgatgaagaaatggaaggggaagaaggaaaagaagacgaagaagaaaacgtagaagaacatgatgaacataatgaaactgaagatcaagaagcgtatgtaattttgtcagatggtgaagataatgggactacacccacagagaaagaatcacaacaacaaaaagaagaaacaacagaggtctgcattccttaactttttaaaaagacatgataaaattgtcaaaaaataaaaattttgttttgatgttttggtttacaggttccaaaagagaccaagaaagataatgaagatgttagacaaacaccactctctaataaagaagaaaaaagcactcaggaacaaaacagtggtaagttgtttttacattcacagatgatttgccttgaaaaacaacttctaactatttttttttgttttgtatcagttgaaactcctttgacgcaggtcattttgagtcaggagctaatggaagaaattgacctaaaagttaaaaaatgggcgaaaaacaaaggaattagagatctgctatcgtcacttgaagaagtaagttaaataacgtcatagtttggctgtcaaagattttaattctaatcattttggaattttcacatttcagattctttgacatgacagtaaatggcaaaaagtcgaaatttgggacatgtggaacgaggtgaaattcaaattagcattaaagaaagcaacattactcattcatcctgacaaactgcctcgagctcttccagaagtgaaatacctggctgaacaaatctgcaagataataatggttagtgttaaactctttttttgtataacgatatatctttaaaaacttaaatattattgttatgcaaaaaataacttacagcttgaattttatttgcaggtagagaaggacagagttaataagtcaaaaatggattaagttcattagactgacttatttcaaacatgtttattttacttttgttattttgaatctatgattgtacttatattttggttatgtatatttaattatgactgtcaaatcaatcaaatgctttactattgtcaactgtttatggatttataagaattgtcatgatttacaagtgattttaaaggcataaacaatttatacgcataacgaaagatttacaaaacattttaaaggatttgtaaagccttgcaaacgaattaaaaagggtttacattgtttgcaatcgggttttaaggataagaaagtggtaaagtatgatttacaagggattttaaaagcttttaaaaggggtttactagattaacaatcgtttaagaagcataagttactggcagagaatgatttacaagggattttaaaagcttgtaaaagtgtttaacttgatttacaattgttaaaagtatatgtaagtggcataacgaatgatttacaaagtattttaaaaggactttaaaagacgttttaagcaggagtttacaatagattttaaaaggtaaaatattgaaagaaccattaaaattacttctaaagtttgatagtaattttaataaacgattcacaagacattttaaaggatttgtaaagccttgcaaacgatttaaaaagggtttacatggtttgcaatcggttttaaaggataagaaagtggtaaaaatgatttataagggattttaaaagcttttaaaaggggtttacttgattaacaatcgtttaagaagcataagttagtgggagagaatgatttacaagggaatttaaaagtttgtaaaagtgtttaacttgatttacaatcgttaaaagtatatgcaagtggcataacgaaagatttacaaggtattttaaaaggattttaaaagacattttaaacaggattttacaagagattttaaaaggtaaattattggaataacccttaaaattacttgtaaaagtttgatagtaattttaataaacgagagtaataacacgacataatgaaggaaaaattaaaaaccccaacaaagttcaattctcttgagataaaggtatatctaaattgcagcaacacaaattgatttgttgtgacccgactgaccacacctattgcatttgtgtaattttggttttggatgagaccttccatgctcccaaacagaaggtatcctctttttctttcatttgccactagggacacaagtagaagttgcaagctgtctatcgttgcaagctgtctatcgtttttgagaatttgtgcatgaaaggtgcaagttgtctatcgtttttaatataaagaggatgagattgtatggttgtagacgtggagactagcttgtaactaagcttcaaagaattggttgaactatctatttgaaaatcctctacaagaatatcaaccaatgcgtgataggtaatgtgctcatcaatgagcactaaagaagctcccatttcaatgtctaattcaaattcccaagtcatattgtttgtcaactttcacaagccacaaacagaatacaattctagcattataaccttataagataaataacaacaaaatcaacacccataaactctgacactaaagagagaagcatggtttacaaatcattttaaagcgtaagtaagtggcatataatgatttacaaggaattttaaaagctttgaaaagtggttaacatggtttataaatcgtttcaaagcgtaagtaagtggcatagaatgatttacaaggaattttaaaagctttaaaaagtggttaacatggtttacaaatcgttttaaagcgtaaataagtggcataaaatgatttacaaggaatttttaaagctttgaaaagtggttaacatagtgtacaatcgttttaaagcgtaagtaagtggcatggatctatcacgaaagcatatgtaaattgtataacgaattcacataagcaaatctatcacgaaacagtataacgaattcaaaaggtactaacgaattcacaaaatctacccaaaaattgaaagcaaaacagtataacaaatttacaaggattttagaagtaaattcaatcatcaaatctcaaacaaaattcaaattcgaagctaaagcaaatgtcaaactgtcgattgaatcaatatcacgaaacagtataacaaattcacataagcaacaacaaaatcgaataaaccaattcgaaatcgagacatttaagttaacattataaattcgaaattgattcgaaaaacaaacctgggaaaaacaagagattgaatgaagactcatacggtgaaatcgaaaacacaaagccgacaatctcccacggcgaaaatgggatgcaacggcgacaaactaaactatttccgacggaagaagaacaagagagagagaaaatgaattaggtcgatgaagtgtacgtagttcagtaagggtattttgggaataaacctattagatggggtagaaataaaaatgggaaaaagggtagagttgaaaaggggcaataaaaaaagggcattagagtgaattattcaaaaacaaattcccgcctaaattttttccgtaacaattttttccccagccaaaaaaatgtatttaaaaatccttgtaaatttttaacgaaagaggatgtcggtacacttctgatgactcatcaacacgtgttacggttgtaatctcaagatgacacgtaaatttgttagaacccaaatgataaaactcttttgctttcgatgtaattatgtggtgggctcttcttagtgataacacggttttttgggccgttttagctattgttttcttatgtttcagagagaatttggtgccattctagagccaagatgaggaaaaacacgtattttaggtgtcaagaagatttttagagtttccgagaaaaaagtatcaaaaggcgatcaattccagtgcttcggatgtgtggcatccgtccaaggtcttcctaatcacggtatcaagatacattggtatggatggaaagctagaagagtcaagattaacgtcaaagtcgaatcgaagcaatccttgaagctgtttaggagttatggcccgaagagtagagacatgtccccaagtataaatacttgttctaagtcctaactctaaggtgtgccctcatcacaagcaaaccctagctgccgccgtgagctgccaactcgccgccgccgcacccttgagctcggagatcaccttctctctctctttctctatcgttttgtataagattcgctaaggcggagctttgcctcttgtattcaacattcaaagaggtaatctctaaaccctttttaagtcttacttatctctttgttatggtttactcaacccaacttttgattagctccttagttggatttgaggggggggggggggggcgggcagaatcatggggaacttagatccaatttaggttggcggttatatgttctttttttatcgtttacactgttttttctggttgagtttgatcttaatgcaggtatgtccaacacttcacctagtacatgatcttaggtactttatactttgcagaatctcgtataattgattgaacctagctcacgaatgaattttgtgttataaccatgcggtcgctgagttataggatatggactagaatcgaacttgaacttaatgctttgatctatgcgttgttgccatgttatcacctataacctagggttaactgagtagcgcagtttagggagattagccggcttccacctatagcctagagttagccgaacttgaatgaatttcgtatgttcgagaacttggaagtaaacaaacctaaccatgttatcacctgaatttgaatctttatcctattgttgaaccatgatatccagagaaacaatcgaatacctaacgcttctctcttattgtctttcgtttatttacttacttgtcttttattttgtttacttattgcatacataaccccctctcttattatttggtcctagcttcactctcttttaaaggatttctctgaactacttctctccttatggattcaatcctaaagtactacaaccgatttgctgtgcacttgcagtagtcgtgtggtccttaaggtaaaaacctgaggcggaataaaacacgcatcaatctttttggtgctgttgccggggacagattgttagttccacaagtccaagaactagagtgaactctacgacactttgcttcttttttttttttcattgttttaggaaacttaaaagatgaatccaaagaattatcccgaaagctactattctaatgtgaaccatggctcaaatagcgaatcatattactccagccactactcgccggatgcacccctagtacatggcgtctcttgacaatctcagccgtcccaaaaacatactttttaaattagtaaaatttaaattaatactttattgactaaaatttatattattaaaatctaataaaatatcctacttccaacccttgttcaaataatcgctaggtgttaattagaattagttttttatatttttataataatgaataaaaatagttaatatatgatgttaaaaatgtgtataattttactgtgttaataaaaagacaccaaataaaatacaaaactatagtacaaacaatattattgggtcaaaaataaaaataaaggccaacaagactggtccaaagaacaatagaaaatttcaataattacacgtatcctgagcaataattgtgaagggattgaaacacaaagcacacttgcaaatgtcccacatcggttaccagaggaaggagctcaagaaaactcgcttataaataatgcatgttccattaactttaaaattaaggagctaaagtaaagtatacgtggtctaagaattgagactcaaactgttaaaattttatcagttatcaaaccgattttatcattaatcggccagttaccgattaatttctccgatttgagtgaaatcgcgtcggatgagtactgccgagtgattatccggccgcctgcgtttttgaataggggttccaaccatactaatttgtaaacgtttcggtgcatgtaggatttttttttttttgttttagttcttgaaatgtgatatttatttgaatcacaaaatcgagggtttatgtataaatgaacgaaaataccaaaccacctatatgacgaaacagagcataagaaacagatgatgagagattaagctatcgggatagtagacattagaccagctttgaaggaggggctcatcatttctggcaagtccttgtggcgagagatgatacgaagaaggatgaccttgtcaatgatatgagctaggtagaggggagaatgcggatgttggtgatgcttccaaccattcccctctcgccaaagatggtaaatagaagtttgaaaggcgggacgaatgattgcatatccgtgcgcagacttgcgagaatggacatgcgaatgaaggctgtcgttccagtctgggatgtagagttaccaatcatggcatataagtagttccacacagtaaacgagtatggacatgcatagaacaagttgtctctcgattccgtcagttcatcacagagtaggcatgtctaatgctcgagcattcatcaggtaagtaactatataatgaatcaatggaccatctgtcccaaattctcctcttcaacatatttaagctgtggattggttttattacatattacaacaaagaaccttaactgagtaaaaaaagcaaaccacaagactattaaaataaacctataaaatgggaagacacccaaaaaaacctgtgatcgatattgtagacaatattccaatttctttagagcgcatggaaaagagattgatctcgcttaccaaaaaaaatcacttctcttttatttcctgttttatagcttcatatgaaagtaacacctctttgaattttgcttcagctacaactgcaacaatcgatgtaaattccacaaggtaagataaaagaacggttaagatggtgaggcggaatccgcctagagcttacaacgacgtacttttgttatcctgattttggtctggatggaattccaaagccttttccctgaatgctttctgaatgtaaacaaatccgaatcagaacttacttattgagcatatgactaggtgggtattattgcattcgataaactcttgccacgcttaccttaatctcagcttctgtgtatggagttgctcgggacctgcaacacaataacacaacaaaccaacaataagttcccttgacctgtcatccttacttgttgagacggaatcaaaatagcgattagccattttggtttacattaacatactgattaccatagtaggaatattgcgaaccattaacataatcagccatgtttaactcagattcgtatatggtaatcaacgttgaacctttgctatagattgactcatttagttatgttgattattctatatttcacaaaacaatatataaaaaccagtgtacgttatcatagatgactctgacttttgttatttgatagacctagaataagcgattacaacagcaatcaatgaacaaaactaagaagaaacagacccgagtgtactttcaactctcccaaagccctaaggatcccaatgatctaaagatcctaatatgttctccctcccacttatttatactactctagtgcatttcagcttcattttcattgcaacatataatgagaagctagagccatggataattaacaaagtgtgagccatatctgcatttttgtttgaatataaaacgataattacctgctgagccctaaaaccgagtaatggtgtgatagtggatatactcttctctggtctgaaggctcctggtgattggtcctttggtttctatgcgaagactcagttttccagtaccaatcatgtcgctgaaactgctgatggtattgctgtgcaccaggatcattttccgtccagttctcgtagccccttctaaatttattcctctctctgttgaaaacgctttgcatacgcctaatacgtgcctgtaacagagcatcaacagatctgaacgcatgttcaagtgatttctacactccaataacaggtttctacgaaatcatggattaaatggaggagatgtatcttcaaagtaatttataatcattttcattggtgtgacaagctgcaattcaaatctaaataaacggtttactaagatgcatggttgctgaaaatttgaaagtaactccagataatgttactaaataaaacgatcaaagtagtttgtgaaatgcctacacaatttacatgtagaacaccgactatgttattttctttgtcttgccaacgtaagttatcagtaggagaaggaaatctagacttaccactctctccaactcatcctcatactcctcttgcatccgtttattgtaccttctccatgcttcctcctgaaaagatgttcggaaagttcctcttcccgccgacggtgttctagttagctttaatgaccaaattacaaaagttcttagttagtctggagaatgtgaatcactaacatgacttataacgaacaaagaaatagactaatggaaaataaggccaatgaaaaaccaaaagactgatgacttttagctactaacatgtaatgaagatatcacgatttcctgaatatctatatcatagtatctcagagaaatagttggttttattcacctgggtatagacccaatcaaaatttcttcgcagctgatgaacctaccaaataatagtagcatcagacactacagtcccacaaagaataaaccaaaacaaacagacgtaaagattaacccgcagagaacagaatcattgtatgattctgtgattccacaggttatattaacagtcacacttttcggcaaaacctcttattagagcaacataacaaataagtcagtgttttctagtgaagttatgcttctctagatagctaccaaattcacactttatatcaccaatcaaagcctaaacttttccattaaattttttttattgcgagagtcatattatcattcacaatgaacacaaatgccaataagctcctctaaagatgaaccaactagaaccttatctaacccggtagctaatcatttctcaaccatcaatcctcgactatgagcacgaaagcacagaaaaccaaaaagctactttctcaagcataattcgatacaacattgacacaactaaaaccaatcatcaaaccctcacaccaacaaacattaagatcaatctcgcttaaagtacgccgcttatgaaaattcacactttgtatcaccaatcacagtctctataatttttccattacttacagagaatgtcataacaaaaaagaatcaactagaaccttatcaaactctctaactaatcatttcaaaaccatcaatcatcgcgtacgagcacgaaagcacgtaaaacccgaaaactaaagctattttgacctcaagcaaagccaatgaaattcacactatatgtcaccaatcagagcctataattttccattactacttagaatgtcacaacaaaaaaagaatcaagtaaaaccttatcaaactctctagctaatcatttctcaaccatcaatcatcgcgtacgagcacgcacgttagaacgtaaaaacccgaaaactaaagctattctgacctcaagcaaagcctatgaaatttacactttatatcaccagcctataattttccattactactaagaatgtcagaacaaaaaagaatcaactataaccttttcaaactctctaactaatcatttcaaaaccatcaatcatcgcgtacgagcacgcacgaaagcacgtcaaaaccggaaaactaaagctactctgacctcaagcaaagcctatgaaattcacactttatatcaccaatcagagcctataagtttccattgaataactacaactttatcaactataacgttatcaaactctttaaacagttcttaaacacaatttcgagatatgaacgaaaacaaaactaatgaattttgactcacggcgaaagtagtagcggttgcgcagattacaaaagccgcgaggacttcccaaggccttgagtccggcttctgctgcggtggtggaggattccatttcttatctttatcatcttcgcctcccattttctctctgcttcgttttctacgaattacgataatcgataagaggatctttggggttgtaacaacatcgtcagagaatttcgattgcttctcttctttcttcactactttgaagatcaaattggattttgatttttttttttcttcttccaccgcctcaattcgtctttggaagacgttttctctccgtcgtaccgacgacgaacaattttcagaattttttgttttcgataggtgagaaatagttgggcccttattgggcctctttcccaaacaaagaacgaatattgtttttttttttttttttcgtctgaataattcatgaaattatccaaaggtgaaatacaaggaagaaatatatagtataatactaaagttggcaggattttaaccttcaaaaactaaaaaaacatagggagataaacaaaagaacgaattaataagtaaattgattagaaataaagagaatctagaaaaaaaatctgaattaggagctaagggatcgacgcacaaaagccttatttgtcttgttgagaggaaccgagtcaaaatccattgtatagctcttctttgtgctgaaagacttttttgacaaattttccgacgttaaataaatagtcagaaattttcgacggcttcgtaatgatattccgacggatttctgacgacatgtttcccgtcaaaacaccgtcgaaactttcctatggattcaaaatggtcgacaattcgtcagtgatttccaacgaaactccgaccaaatatttcgacggatttccgaccaaaatatatccgttttgacacctctaatattcgtcagaatatgttgtacctttccgacaaaattccaacaaaatacactcggttaagtagccgtccggtcaaatagccgtgcgtatagttatttataaaaaaatcatcaaatctccaacgaaaatcagtcgaaaactcgtctgacatccgtcaaaaactcgtcggaaaaattgataattctcatctttattttttctaccctcattgacaaaatcgtccaagcaacaaaatagaaccagagagaaatggtttcttcgaatccgtttaattatttttgatcatggatggaccagcccatgcgtgatccggtgacggagttgctaacgccagaatatacagaaggtcttaaacaattcatggcatttgcgacaaaccaaccagtaaccatcaaatcaaaacaaatgtattgtccgtgttctacataactaattttaagagttattctggtatcttaagtttggatgcatttatatggggatgggtttatgccggggtacaaagcttggctcatgtatggagagaatgagtcaatcactacaagaaaataggcaaacgacgactacgcaaggcgactaacaatgtattcgtccttttttgcgactatattacgactgatggacgacgacgttacgacaatagacaaattggtcgttccatagtcgtattttagcgactacaagctttagtcggtaaatagtcgtccaagtacgactatttgacgacgacattactgaaaaaaataagtagtcgtaaagtagtcgtatattgacgactacatatccgactttaaacattagtcgcaaaacaggcgacgatactacgactattttcactttgtcgtccaatagtcgcatagttgtcgtataataccattggaaaatgtttttcgcgttgctgggtaggtacacctaatttctgagcgtctacagtgtttagtcgtaaaatagttgtaaaaaatcctctatataatccacgacactcttcattctcattcaccaacaaatcaaaacaacatcaaaagaaataaaaaacgatttcgaagaaaaaaatataagtttagtttatggtataatggcgggaaacttcaataatggcggtggtggcggtttctatcgagattggatgtacaagagatttgatgaagtaacgggaaattagtcaaccgaatacgttgcaagagtagaggagttcatgacattcgctaatagtcagcctatagtacagagtagtcgaggtaaatttcattgtccttgtagtgtatgcaagaatgaaaaacacatcatctcgggtagaagagttagtagtcctttgtttagtcaaggatttatgcctgattattatgtttggtataagcatggagaagattgaatatggatataggaactagttacacggatatgacgtattttagtgagaatcatgaagaagtgggtaatgttgtagaaaatccatatgtggatatggtgaacgatgcatttaattttaacgtggggtttgatgataactatcatcaggatagttatcatcaggatagtagttatcaaaatgtcgaagaaccggttcgtaaccattcaaagaaattttacgacttgttagaaggtgcaaatactccattgtacgattgttgtcgtgaaggccagtcgcagttatccttagcatctcgactcatgtagaacaaggcggattataatatgagtgaaaagttggtggattccgtttgcgaaatgtttacagaatttttaccagaaggaaaccaggctaccagttcacattaccaaaccgaaaagttgatgcgcaatttaggacttccatatcatacgattgatgtttgttcgaacaattgtatgcttttctggaaagaagacgaacaagaagatcattgtcgattttgtggcgcacaaagatggaagcctaaagatgaccgtcgacgaaccaaagtaccatatagtcgtatgtggtatctacctattggagaccggttaaaaagaatgtatcagagccacaagacagctgcagcaatgcgatggcatgctgagcatcaatcaaaggagggagaaatgaatcatccttcagatgcggcagagtggagatatttccaagagttacatccccggtttgcggaagaacctcgtaacgtttatctcgggttgtgtactgatgggttcaatccgtttggcatgtctcgtaatcattcgttgtggcctgtgatcctgactccatataatttaccccctagtatgtgcatgaatacaaagtacttatttcttacaattttgaatgttgagccaaatcatcctcgagctagtcttgatgtcttcctccaacctcttattgaggagctaaaagagttgtggtctactggagtcgatgcgtacgatgtatcattgagtcagaattttaatctaaaagcagtgctactgtggacgataagcgattttccggcgtatagcatgttatcaggatggattactcatggtaaattttcttgtccaatttgtatggaaagtacaaagtctttttatctacccaatggacggaagacatgttggtttgattgtcatcgtagatttcttcctcatggtcatccatcccgtaggaacaagaaagactttctgaagggaagagactcttctagcgagtatccacccaagtctttgacaggggagcaagtttattacgagcggttggctagtgtaaatccaacaaaaacgaaggacgttggtgggaacggtcatgaaaagaagatgccaggctatggaaaggaacataattggcacaaggaaagcatcttgtgggagttgtcttactggaatgacctcaatcttcgacataatattgatgtgatgcatactgagaagaattttcttgacgacatcatgaacactctcatgagtgttaaggataaatcaaaagataatatcatgtcaagattagatattgaaattttttgttctcgatcagacttacatattgatagtcagggtaaagctccatttccagcgtatgcattaaccgaagaagccaaaaagagtttattgtcatgtgtgaaacatgaggttaaattcccagatggttattcttcagatttggctacttgtgtagacatggagaatgaaaagttttcaggcatgaagagtcatgattgtcatgtttttatggagagaatactgccattttatctttgctggactccttgaccggaatgtccaccttgcattatcaggtacaataaatgttgtttaagttgccacacttttttaaacctctgatttaacttaaacatatatatatatatatatattttagggattggagcatttttccgggacttatgttcgagaactttacagaaaagtcgggttcaaattctcaaacagaacatagttttaataatctgtaacttggaaaagatctttccaccatcattttttgatgttatggaacacctacctatccatctcccatacgaacctgaattgggtggccctgtccaatatcggtggatgtacccatttgagaggtttttcaaaaagtttaaaggaaaagcaaagaacaaaagatatgcggcaggatcaattgttgagtcatatatcaatgacgagattgcttatttttcagagtactactttgccgatcatatacaaacaaaatcaaggtaaatataattatttattttacgatgcgcaagctatactttagaattaaaatcaattacatggatcaggttaacaagattcgatgaaggagaagttcatgtatatcatgtccctggagtacctaacatatttatgcacgtcggccgtccaagtggtgaactgcacgtggaatggctttcagagaaagactaccaaagcgcacacgcatatgttttaagaaattgtgactattttcaaccacttgagaggtattttaaatcactccttaatttaaaattttcattatgataagtttgatttatttatctttggttgtaaatatagtatgttcgaggattttctttttgtgaaatatccaaccttgtccgaaaaagaactctacgcgaaaagagctaaaaaatattatcaatgggttaaagaatatgtaagtctacatcattttagtaatttttaaaagtgatcatttaaattatgttgatattgttattgtttatttattatgtaggtaacatattggaaccctacttctccatttcctacttgggttcaagagattgtgcatgggcctttgaacaaggttaaaacttggccaatgtatttcacacgaggatatttgtttcatacgaaaaatcatggcgttagacgaaaaacatgtaactatggggtatgtgttaaaagagaaaattacgtggattcatctgatgaagcggatttctacggtaccttatatgatatcatagaacttcagtatgagggcatcgtcaatttgaaaatcacactttttaagtataagtggtatgatcctgtgattggtagaggcactcggcgaagccatggtggtgttgtagacgttctatcatctaggaaatacaataaatacgagccgttcattctaggtacataattaagaatacataaggttctctgttaattattaaataactttgtatttttattaatatgtataacttgtgtatgcagcatcccacgcagatcaagtttgttatattccgtatccatatacaaagaaaccaaaaagcatttggctaaatgttttaaaagttaatcctcggggaaacatttatggagaatatgaaaacaatgatccgactcttttgcaaacaaaaaatgatgaagctgtgttgctgactacaattgaagatctggtattagacaatccggtagaaagcttaaacccaatcatactcgattacgatgtcggagatgctgaaccagaagatgaattccgatgtaatttatcgtcttcaaacgatgatgaagtcgaagatgatgaagagtactaaatgtgtgctttatatgtatattaattttcctatttatatgaaatttttttgtttaagaatatatcatataatgtttaattatttgaataaatattacagaaaccttataattatcatgaatatttataattataattaatttgttgggctgtcggcatcccaagcccaagcccaaacccaataaaattaacgacggcaatacgactaatagacgatggacgtttaatgatattgggcttttaaatttcgagcccaaacccaaaagaattaacgactataatacgattaacttgcgacagacgttttatttgttgggcttagtaattccgaagcccaaacctaataatgttaacgacgatattacgactaacatgcgagacaccattaatttgttgtgcttttaaattccgaagcccaaacccaataaaaattaacgactattcaacgactattcggcgacaattgtctttattgttgggctttcatatttcgcggcccaaacccaaaaaaattagtgacgaaaatacgactacgttgcgactacctgtataaaaaaaaccctaattcgatcgattcacttctcatttcatccaaacaaaactcttcttcttcgatcttcttcttcaacttcttcttcttcgatcttcttctacaacttcttcttcgatccatttcatctcatatctacctaaacccagtcgagttcttcacctcttcttcttctcagatctgattcgaatcgaatcatcttctctttcttcgatcgtcctctttcttcgatctcttcgtctctcttcaaccatgcctaacgccggtcgtggaggttcacgaaagaggaagacaacccccaacgttacacagagagccggagggtccacaccgcttggaagaccagcttccctgcctcagcagtacgacttcactccggcggcagcgcctcaagttcctctgacgcagccgcctcaaaccgtcggagcctcaacgtcagcccccccactaccgcaactatccgccgccgcaataactattccagagctccaccactcagcgtgttgatccgccgccgccgcgatctgaagaggcgcagtttaatccaccgccagaagctcctctaaaccaagaacaatcggagtctccaaatcccaactctcaggcatacacccatccatcttctcaaggcaataactttcaagagggagctcctcaatcgttgtcggagctacaagaagactgagcgagggctctcaatgacatacttatggttcccaggagggaaatgtggaccaccgtactgtctcatattcccaagccgaagactgaatagtatgtgctcttcctcaaccctattagcttgatttagattctgtatttgcttgtgttaggttgcagcaatgattagcttgtgttaggttgtgtcttgattaacttgtgttaggttgtgtcttgatttgcttgtgttagattgtggtggattgctcttgtgtccgctttgttaatttgttgtgaacatagattgtgtcttgatctgcttgtattagattgtttcattggattgtgtcttgattagcttctgtaatactctgtcttgatgagcttgtgttagattgtggtggcttgctatcttgtgtgaacatagtggtcatgtcttgatgagcttgtgttctcttgtggtggcttactctcttgtgttctgttgtggtggcttcctatcttgtgttctgttgtggtggcttgctctcttgtgaacgcttgctatcttctgtgaacatagtggtcatgtctagcctctcttgtgttctgttgtggtggtttgttttgttgtggtggcttgctatcttgtgttctgttgtggtggcttgctctcttgtgaacgcttgctatcttctgtgaacatagtggtcatgtctagcaatacttgtgttctattgtggtggcttgctctcttgtgttcgcttgcaatcatgtgttctcttaagtggttagattgtgttgtcttgcttagataatctagcttagactgtattctgtagtcatctcagtttagatgttgtggtctattctttctgttgagttgtttcactaatgtaacatgtttttttctttcattgtttcatgtgcatggaggtttactcgcgacaggagatcaaagttggttagaaagatcactcggatttttacacagaaatttaatgctccctactataactggtcatgtgtgccattggataaaagagagaggttatttctagagtttgcggtaagctgtcatgcatctctcttactttcttaactttcctgcttaatcttttaaatttcactaactcaagctactcttttttgtagaaaactcacagttgggatcccttaataagagggactgtgcagtattacttcaatgaggtctgtaaatggcgcttgaaggacatggttagcaccgcaaggagaactagagagcagcctccatggattggtgaaactctgtgggctgttatgtgcgcttactgggacaccgaaccagcacaaaaacggagtcggacctattccaaagctcgtctctctgaccgtaacggtctcggtcctcacatccacttctctgggccaaagtcttttcaagaaatccaagacgaatttgcaagtttttctgttacctctttcagttacctcacatgtatgtttttgagtatttgagctgtgttggtttcattgcaggaggagaaattgggaagaacggtcactattggtgaggtgtttgtagagacacatactaagtcggatggtacgtatgttgatcggaaggcggagatgattgctcaaacttatgagcagaatgtgagagatagattgttacagctaaaggcggaagcttctgctgtgtctgatgggacttcacgacctcgggagctgacaaatgaggagtacacaaccatctttctcgaggtaaaatgttgtagtctaaacctcttgactttgagtttatggttattctgtcactaatctcttctttatttcttttcagtccaccgaaagggattcaagaggcaatccttatggacttggcagtctcaaagacacattaggttgtgccaaccgcaatctccctggagaatcatcatcatcctttctagatttagaagaacggctgaaggaagtgcaacgcaagattgaggagcaggctgcctacaatgagaagcgagattctgagattgctgcgcgtgaagctgagacagcccgaatcacggctgagcaaaaggacaagctcgaacacttgtccttagtggagaatcatctccgacaaacagatctgcaattccttgacttcatggcctctcaatcttcgacaaccatagagcctctaccagctactccacaaaatgatcaataggtttagatttcagtcccttttcccttgaactttgaacaataatgtgtgtgtgtttagaactttgaacattaggtgtaagttgtgttttatgtatttgataggattttcaataataaatgtctttttgttacactttatagcatttcaaacaacaaacaaaccgaattatcagattcgatgaccaaccaacaaaaaatcaagatatgaccaaattcttattcggaaacaaaatgtcgtcgtaaagtcgtcgtaaaatagtcggaacatagtcgtatcatagtcgtaaaacagtcaccaatattaccgattattatctgacaacataacaaagtcgtttagtgatcgtaaaggcatcgtaaagttgtcgtaaactatttagcgactacgatacgacaaccagaacagtgcccacaatccagtacaattgatcgtaaaatagtcgcaaagtagtcgtcaataaaagtacgacaattttacgactacaagaatcatcccccatatatagtttaattaatcgtaacatagtcgccatatagtcgccaaatgttacgaccaatcaacgactatttcctgccgactgtttagcagtcgtatgttagtcgtaaacttacgactaacatacgactaacatacgactatgttgcttagtgactatgtatatacaactcattgtttagtcgtctaatagtcgtattattccgtttacgactatgaaacgacttgttttgtagtcggttaacgtctgtttttttgtagtgaatggtgaattatggtagttgtagcgaacattatcctgttgataggttagtgggaccaaatccaaaaatagatacaaatgtaggtaccgttcagatggtgaatgatgcttttcgtgaaaatatacactcgtttgatgggaatagtgatagagtagaggaacctaatttagaagaacgaaagttttttaatatgttagatgcatcaaaacatcccttatataaaggatgtaaaaaggatcattcgtctttatctgctgcaaccaagttgatgggtatcaaaacggattataatttgtccgaggattgtgtgaatgcgattactgattttgtgaaagatttattacccgaagataatcttgcatcaggaacatactacgaggtgcaaaaattggtagctggtcttggtttactgtatcaagtgatagatgtgtgcattgacaattgtatgttgttctggagagaagattcagatcgcttgacatataagttttaccgcaaacctgggtatcgggaaacaagtggaagatctcaattccatacaaacagatgtggtattaaccattatcagagaggttgtagaggttatatcaaattaagcgcacatccgggccaatgagatggcatgtagagccaacaatagaaggaaaaattacgcatccctcagatggagaagcgtggaaacattttcaaacagtgcatcctagttttgcttccgagagaaaaaacgtatatcttggattatgtatagatggattcaatccctttgggaagcatggacggcagtactcattgtgacctgttatcgtgacaccttataacttgcagccatcattatgcgtgaaacgagagtttatattcttgaccttcctcgttcctggcccacatcatccaagaagatcactcgacgtgtttctacaaccacttatatacgagttacaaatgttatgggagattggtgttgaagcgtttgatgtttcatcctaacagaatttgtcatgcgtacgacacttttgtggaccatcagcgacttccctgcatatggtatgttatctggatggacaacacatggaaggttatcgtgtccatattgtcaagataacactcatgcattccaattgaagtacggacggaaaacttgttggtttgattgtcataggagatttttaccgagtaaccatccgtatcgtcaaagcaccactttgtttacgaagaacaaaaaagtggtttatgggtcacctccagagttagatgacacatatttgctaactcaattacgagattttggtgcagctacatcaattgaggttggtggtaatgggcatgatcttgttgatggctatgagttaatcacaattggcataagaagagaattttctgggaattgccatattggaaggatcttttgttgagacataatctagatgttatgcacattgagaagaacatgcatgacaacatgatgaatacagtcttaaatgtgccaggtaagacgaaccataatttaaagtctagactagacttgcaagacatttgttcgaagaagaagcttcatattatggtaaatggaaaatgaacaattcctgcgttccggttagatgcaatctcaaaggaagaattcttcgattggataatgcatggtgttgatcatggggaagagaagcaaacgtggtgggaaaggtatggcggtgcaccatgcgagttcgacgagcttcttaagtcgtacacacgaattggtaagtcttttactcttatttgattttatattttattttagtttaactatatttttttattttatctatagacggagaagaatggaggtgtggaacctaatttgtagaaatcattgaggatacacaaaccaacaagaaaactggattaattcaagacggttacatcgcgggtctcgtcgagacattgaagagaaagatgacggagttcctcacacagcttccccaaaatgatgatggttcctcaccatctaacgtccaggcccgagaaaaaatcaaccgcattgttcttgaggtaaggtttatttcataatattaattttttgtataatttttaaaaatttactaacagttgttatatgcaggaaattccgtcaaactggggtcgtgtggtagggttaggtagcctaaaccaaagcaccacatatttttatgccggcccatcatgggattctgagatctttaaagagcctgaggagaaagacaaggagatcttagttttgaaggagcaaaaacatgaagattcttgacttcatgcattcaaaattttctgattttcctgatgatctataaatgcttttgtttaaatttaattttgttgttatgtcaaacaaatttattttcttttgtaggataatatgtgtacttttaaaatatttattttataatatttcaagaaatatttttctataaacgttaatttaaattaataaaaatattagtaattaaattatacccgtcggaaatacaaacaacatcagtaatctgtcggaaaattcaacaacgttactaacctgtcggaaatacttcgtcggaatccatcgggaataacgttgtcggtaaaccgtcggaagaatataccgaccgattttcaacaacgttctgatgcaatgtatgacaataatattcgttagaaaatagtctgaaactatttcagacgaggatccgactatgttccaaccggttttgcaaccaatgttattgttagaaaagcgtatagaaattgtcggaaaatacctcgtcggaaacccgtcggtaatttgtaacacgtttgcgacgacattcagatttccgacgagatagaatcgaccaatctatgtcgtcgaaaattcgtcgaatacggctgtttccatcgttattccgacgatttcgtccattggaaatagcctatctttttgtagtcgatagtattaaacatgtcaaaccaacccgagaagtcgataacctcaaactggaagagataccgcttaagatggcaaaaaagcgaaccacaaactccaaaacgaaatagatcttaatgagagaaaagaaccaaccatagaacatgagcccaaagctaagggcaaaaagaatcgagtccgtctcatcataaaggagagattttccaggatattaaatgacaaacacaacaccacgataagcaattaaatggccaaaacagaaacttcactcaaacaagacccatgcaaaaatcctacaaaaagaagattccgaaaaatcctaacaaccccaagaagaacctgcaaaccagagcaacaagtaatcatatcaagtaatcaagatgtatttattaactactagagaaaatatttgggctacgcccgggtaattttgataattgatatagtattttaaagttagataacatagtttttgtttaataacatttcttattttttatatgctaagaaatagttttgttctatcctgtgttttcttagatcatatggaataatttcaactcttatgagattggtatatagtttgatacctagcatcgtaggtaggcgactatcatattattttatatagtaatattaagcacattttcgtaactttgtggaatagtttagcaaaagaatattgatcagtatggttttctacgtgaaagattcataatctcaaactgttaagttccagcagaagtggtgtatatgccatcatgctttgatgataagaattagaaggtacgtggtgaagttatacgtccgtttaatatatgcattttttgttaaaagttatgtctgtttaattatgattggtaactatagcttaagatttgaagtttactaaaatctgtgaatgacagcaaaaatttgtaaattattattgaatgatcatttagtgtaaatattttgctggatggccctctctcttctccggacaacatttttatatctatttaaaacttaatttttaagaaagagctcaatattagaaggacacagttgggcaaaaatttagagtcatagcacaaaactactaatacaatggcaaagagaaagtgaagatagggctagaaagtgaaaatattgctggccttattgatgcttatctaaactcatatattttctttgttttcttttccattcctttaattttacctcattacctcatatatttgaactatatattgtgttttccattttaaaaagtagaagacatgggaagagaagaagatagaagttagatagctggatcttcgagttttctttcacctgatttggtatctaggaaaatgttgttctcaagaagatggaagattgtaacagtttggtgagaagcctggaatttggatgatgtagatgattcacctctcgataatcacatattctacatgtagaatggccaaaagatgattatattaactattaagaaaacatattgaccttaacgtatgtagatatatctctaagaaattatgtaaatcatgagaagtaacacttactttgtcgaagtcgtcggagaaacttaaaaccaattataatcttttttcttggaatctctttctttttttctggtaatagaccaagatgtaggttcgcttcaaggaaaaaatcatctttaaaggttcgcttcaaggacgtctttttcacaccataccctctacttattttgtcttctcctcgtcttgtataaactccacactcatctttgatactattgatttggataccctagtttacaggaaaagttgattgtaaaaggaatactaactttgacgcgcaaacacaaaccaaaatatcttcattatagaataatggaacaaacttgattgcaaaagtttattgaaaaatagaatctatcattacaaatttgtttacagaaggatacgaagagatcagttagatttggttacgactcttcgattttggtatgccacatgacttttgttgagaataagaaaattatggtagaaaaataagaaaattatggtagaaataacgattttttatgtgtccaaatgaaatgaatcaagtctctatttatagagtttaaaaagttataaactttatataaatatatgttttaaaaaattttgtttggtatgcaataaatgattgtaaatagataaaagaaaataaaaatctcccaaaatctcaatatccaataaaaatatagcaagtgtcaacatcttaataatctctttttttcaaggaaaaaaaagttttggacaatacactctcattttcttgagtttgaaacacacattccactcacttattgacacgtggcatacacatgcccaaaatttatcttttcaacatgttgaatagtttcaaccaagttgaatccacgtaagattttttaattattcggcaggtgcaatgtggagattcaactattgaataaataattcaacacgggcattgtggatagtcttacactatgaacaatggtcttttcattaaacaccctccacattatcttctttctcttccacatcctttcctttttctttcacagaataattcaatacccactcaaattttatactctacaatggtattttataagagaatttatctctaataattcaaagaaaaataaaatatcagaaatttcagtaacaaataaaagcataacacatgtcccatctacatttaattcgcctccacaatttctatctctaactatttaataacaagtggcaatgaggggtccatttttaacaataaaacattattgaatccgttcaacaccatttaatggacgtaagagttatttctttatacaatatctcattgtaagcattcagttattgaattaattttctcaatatatcattgtagatagtcttataagtatgcagacttggcagattgagggagatttttataaggctgatgtggatagcttgagaggcctcaatgagcttcttttattagtatgagattttatctatgtaaagtttgagcttcatatccaataatttgccatctaattttgacatattttgaaattttaatccttaagtttacaaactaaacttgatatcagttcttgcattagttttgtatttatatttcaaaaacagattgaaaacttaaaatttaacgtacgttatttattaatttatcaagatgttaagaaattttcattaatttatgaagttaattttataataatttaattaagttacgttggatattcagtcacctataaatagtttacatatcttcatgtctagataaccaaataaaaatatattttattacattcttctcatacaggaaaaataagtcagtaatctccaagcataagaaaaatatggctaaactaatctcccatgttactgcgctattcattgtcgtagctctggtgtgtgcgtttactcctgtctttttcgatcaaagaagctgaagcaaaatcattatgggacacttgtctcgttaaagtcactcttaaatgtgcattgagtataatcgtggttgtttttggaaatggaaccatcattgagtcttgttgcaacgcttttgtccaagaaggaaaaatgtgtcacgataatctcatcaaatatattgctgatagaccaagtttaattggccgtgaaacacaatacttgaagaagagggatgacgtgtggagtcattgtgtctcaatctctaaaactgcttaaaatatgtttgtttttaatattatttcgatcgaacatatttaaatgttgttgatgtaacatttttgttacgataattaatttctttatatttactttaatacaaaataaattaaagcaatctctcgtaagatgaataaatttcaatttttattatattttaaaaacagaaaaagggacatatttcacataatccaaaaatgataacgtaagaatagcataagaacacttttagttctctttatatgtttgatattcggctaactgtataccaatcaatttaacaacataaataattattttttgttcatttaaagcaaaagataaaaccattaactattaaaaaaaaaaactcttactcttttgtgactaaagtccttaaaccaaaatctccttacactaacaaccgctttttgttttccaaatctacacaaactataattgtaaacaaaaaaacattcgaaagggtttgtgatatatgtctctgtagtaaattgaatcatttctctttctgaattttatatagatattacatttaaattgatgtaatagttgttgtaaaacttcattagactctcaacccacaactaggctagcttaaaattgagaatattgaccactcaatcattttattatgtccaattcaatcggatgctacctttttaaatatttggaatagagtttcttcatttaaattcaactttttccaaatagtcttacctagtatgagttccgtgaaatatatatttttttttttgcattcattgataacgatcatatctttagtttttcatggaagtcttttgtaattattagttatggatgtaaaccatatccctctcttttaaatatattattcaggtcccattaactagtcttttagattaaaccaaattttcataatttgctttctaatatgggtaacataatttaaacaaaatctaagtatggcttttaaacgctcataatgaaatatatgttgggtacttaatatttaaaccttttagctattttacttacaatcttatctatgtaaagtttgagcttcatatctaataatttggcttcaaattttgatatatatttttaaattttaatccataagtttataagctgaacttaatatcagttcttgcattagttttttttatttaaatttcaagaacatattccaaatataaatttaacgtacgttgtttattaatttatcaagaggttaagatattcacattaatttatgaagttaattttataataaatcgaatttagttacgttggatattcagtcacctataaatagtttacatatcttcatgtctagataaccaaataaaaataacatatttcattactttcttctcatacaggaaaaataagtcagtaatctccaagcataagaaaaatatggctaaactaatctcccatgttactgcgctattcattgttgtagttttggtgtgtgcgtttgttcctgctttttctgtagaagaagctgaagcaaaatcattatgggacacttgtctcgttaaaatcactcctaaatgtgcattgaatataatcgcggttgtttttggaaatggaaccctcattgagtcttgttgcaaggatcttgtccaagaaggaaaagtgtgtcacgataatctcattaaatatattgctgacagaccaagcttaattggccgtgaaacacaatacttgaagaagagggatgacgtgtggagtcattgtatctcaatctctaaaactgcttaaaatatgtgtgtttttaatattatttcgatcgaacacatttaaattttgttgttgtaacatttttgttacgataaattaatttctatgtgtttactttaataccaaataaattaacaagctctcgtaagatgaataaatttcaaattttagtatattttaaaaacagaaaaaggaacatatttaacataaacaaaaatatcttcttatctccattcttgtcccattccattaagtacgtggaaagactctaaaagaactatagaaataacaaaaagactcttaaaccactatctaaatcatagctaaaaacagtaaaaataaagatatatcacatattattcgacttaatttaaaagtttgctttaactagttccaataatatatatatttttaattgatatcgagttcaagtattattaatgttagaaaaaatagaatttaaatattataaatactttaaacgttttataaagtttaaataaataaatatttcttataaattcttataaagttcaactatttataatatttgaaatttcgtaacagatatcataaatatttataacatttgataaagttcaactttctaaaacttttaattctttaaaatattgaagtggagtaaacgggataacactttcaatttagacgtttgataaattaagctttcttctcattcgtattcagaattatcttaatatttttatagtataaatctgaacatttgtccaactatataagtaatgtaggaaattgtacacatatttttctcatcgactgagtaatatatgtttgtttttaaaaatttgaatcgcatcaaatgcagaaaaatctaatatttttttaattatatgtattttacatatattcaaaataaattaaatatgagatcaaataaaagtgaaaaaagaatcatatatttatgtttaaattaggtagagatcgtttaagatattagcaatgaatcgagtgttgtaatgtcccgtccatccttaccagtgagcacccacgtcctctctcagttccgtgagctccacctctgttcgaaggttgggtgttacttctaagtgactttaaagacaagtttaccgaccgtgcaaataaccacatgatttttttctgttttttgccctcacttatatggttttggataatcactttctcgaaggtcaccaaagtgcactttgtttacataagttaaggatattaatcagtttgctaatatcttctatttaatttttgaaatctgtaacgccccgaaaattaaaaagaatttttgaagcattactataataaaaatactaaaatttccaaaatatacaaagttgaaatctcgtataaactccaattctaataaacaaataaattaaacttaagaaaatctaccaagtctcgtttcgaataacaaactctaaacctcagctgcataccgctcctcgtcaatgccctctgcacggaatcagaactgatgtgagcaaaaaatcgcccagtgagactataaacccgaagaacaagtaccaacacggtctaatcccgcacagaataatgttcatgtgctggtactaacagacatagtttccattcaattaattttatataaagtaaagcacatcagaacttatgctaacaaaatacataattaaatcatcagaacagaataatatcatcagacagaataataacatcagaacagaacgaccaggtatccagcaatgcatgtcagaatggtacaatcccagcattggttgatccaaaccatatacaaacataatatttacataataaactcgatagggatggtggcccctatcaaggtgataaagaagtatggtccacgacattaaccgacctcaataccactaacagactaacagaatatggaatacatctgttggcgatgccggccgccacagattgcctaatagagctagctaaatcagagtcgcatgctgatactggtcttagcagaataacatatttcatcatgagaatcatattcagaataatcaaactgaaacaaataatcaattttcagaatttacaactaattcttttattctttttatcatactcctaaaatattatttaaatatataataactaataagggagttagaagtcaccaggaaaagcttttaaaactgaacgagtgtttacaacaattctatccacgctccaaatcaccatttaattcgcctaaattcaattgttgatcagaaaagtaagtactatataccatctggaagctaatttcaatttcaatcttaatcaagtattagagttgacagaactggtttacaaccaactgaaccggtcccaattactaaccgcttaaaatcaaaactcaaccaattcaaaattagatttcaaaagattgttttataaccgtaagaaccggcgtaaataaatcctgatttgactatgaatcgagaaaaacaaaatatttaccgatcaaatttcgatcaactccgacttccgattgatgatatgtcagtggcgttggattcatacgaacgagagttttctaacaaggtatagatcaactcctaattctttctgcaagagattcaccattaaagagtttaaagctcattctaaggaagcaaactgaaaaaaggaagaagatgaagcttaccaagaactctgaaaaagactgaaaacaacccaatactaaagattcaacaactgaagtcacaaccaacctaaacagccacaaaatccggtcacaaattacaacaattattcaaattggcattgaagcaaaaagggtctaagaaactcaccaaaaatctcaaattgattatggattcggtttctaattctcaggggctttaaaacacatatatatatatacgatacattagggttaaaaaaacaaggattcaaattgccaacaacttcccttcagtttcgggaaagataaactcgaattctctcattttttacgtttttgcactttaatcctctgatttttctctatttacagattccgcccagatttttgaatctctcagaaatcccctgaaaccagacagtttcaaaacgctcaatttaacccaaaatctgatcctatattttcttttaattttggatgttacaaaatcttacaaatttatgcaactgtattccattgtaaatatgatttatttcaaaattatctatgaaactgtatatatatagataaactaacaatgaaagaatatcataattattctaaaacgtaaatgttaacccaattataggtaaattaaaattttcaagagaaactgttacaaatgttcttacattgataccctttttaaaacaataccccaaaacatttctcgacaatcattttctcgtcaacaaattcagaaaaagtttcctgccaaaaacattctaacaatcccccccccccaaatcattcttgacaaaaaatttaccaccaaaaaataatgatcccataaattttgtgggaaatgtgattccaggaagtttagcgggatctggatttacaaggccattaaaagggttttaataaaaattacatgggttttataaggtttttaaaatatttataagggtttaaaaatatttacaactgttttaaaaagattcctaaaatattttatacaggattttaaagatatttacaaaggttttgaaggttttgaaggttgttcttaaaaggtttaagagaattgctggtatctttgtatctttgctggtatagaagattttaacaagatttacaagggtttaaaaaaaaattataagggtttaaaattgatatataatagttttaaaagatttatatatatttttaaaaaatagtttataaggattttctaattttttatcaaaacaattatgcgatttaattttctcattatgttcacttaataaataaagtgtaacttagtcatttaagacataaagaaaggtataactaaaaatggacaagaagagagggtattcttgaaaggaacgtttttggatagaattaactgaatttgtataatatttccaaatattcttttcaaataatgtttttaaaaatataactaaatatgctgaaaacaaattacttattttattatcaatataaaaatcaatatcatatcaccaatgtttaaatataattgaaaaggtaagatagaatttgctgtgattttattttgacttcaaatctataataagaaattaagtggaaggattgtgctatatttcatctttgactaggaaaaacaatttaatgtatatttgtgttattatctatatataactagtgtaattataggcaaaatcaaaaagagaaagttcagagaatatcataaaatgactactactatgaaaacttttgtcgcatttgttttgactgtcttttttattatgtcttctgctcattgtcgtactacaactggtggtagtccgggtaattggttattgttatatttatattatttaactatggacatgtttttgttttttgttaatgattattgattattgttaataaaacagggtatggaataggggggcgtacaaaaacatgctttacaccagctttatgtatttatcgtggagtccatgggtgcgatagttattgtaaaactaaaaattttgattacggctattgtagacaagaacattgttgttgtgttaattactaagatgaaataatttactaagtttattggtatctgattaagaaaataaatcgatagttcacattttgtttttaatacttttagacagcggaataaataaactttaccgaatcgaagtaagtttgatttttaagcaataacattttgcaatttaaccataatttataattaaatttaaatgtaacagaaaaaatggaaatgtaaaataaatggaaattcgatccaatacataccattaaaaggatgctgacccacaagagtgaagtaagcggatttcggctcaaagtcatgtttattcaataaagtcatatcactgatcgttttgcatagaataggccatgcatgttgtagtcaccaagagtcacggcacgagcattcgcaactattagacgtggaacattgttaccatgtgggccaacgactctgtttaccttgtatgccaccaatgttgtgttgtgggtgtcgtttgccaccaatgttgtgttgatagacaccaacggtcgtttgccaccaatgttgtgttgatagacaccaacggtgtgttgttcgacaacgagatttccagtttatctgtcttgtggttgctggtcaaccaccaaaattgtctcaaggataagaacccgttgttatcaagttgttgtcctgctttatcgtagacactaccatcatcatccctcaaaaatcctttatcctatatatcaaacaaaaccctatatatcgccacctaaacgatcgatcataactcccccacccttttaattagctctttaaacccaactagaaacctactctagcatggttaaggaactcatccaagtaaggtttaataaactcataagaacatgatgaataagaactgaataggtgatataaccgtatatttactgattttagctagctatgttttaggtatatgattttgagtctttatgttttttctcgaatctttttagtttcttttcaggtattctatgcaatgggacaacaatggagataagaagacattttggagcaaaaactaaggaaaaggaagctaaggacgatttcagttccaaattcagagggagtgtcgatcaacacactcctggtgtcgatcgacaccagttttggtccagcaaagtccatgacgctttcaagtttacagaaaaggaaatttgccccagaagattttcctatttgtattatcagtccctggacgttttatacggtttttatatagttgtttagacctaagtttcttttatgaagttctttgcaaatccctattttcagagacataagttattcatcccttgttattgagagattcattcagttttcaatacagtgaagagatcccttcttactctaatcttatttgttgtggttatgctttcttactcaattatgttgctagtttcattcaatatgtctaagtagtttgcttgttagaaatagggtttctcatcagggattcatatggtttagtagatcgcccccctgttaggttattctagtagaattcttcatctttgattgatcttaatgctagatctagagtaattaactagatcttgaatctagacaatagatatgcccaccaaaggtatctgtagttggatctattattattatttgatgagcctggtttataggtgtgtaataaaaatcggcctatatactaaggtgaacaattaaactcgtttagaatgcatgtttaggttaaagatctctcggcttctccggttattcttagctataggcatagggagtttcgcggaacaccaccggttattccatgattagagttcgagtttaagaatggttcgataaaagcctagctttcactagatctactaaccaatagtttccagagaatatcttgtccctaactctttatttcatcgtttacaaccaatcaatctgctgtctttttactttgttttcttttactttcaatcattccctgctagcttaatcttgatactgaattcattgtgttaacaaaacaattttgtgaaaatcgatccttaaatactgcaattgatctcttatttgagagagtagttcttagggtaatttgaaccctatcaaatttggcgccattgctagagttcttgggaatcaccattgagtttactttaaagatttcgtctaatttttacttttattttgttactcacgcgtttcttgttttcttcttttttgtgtttcaggtgtatgcctaggcaaacaaggagcacacaacataaggagctcatcaacttgtctgttttgaacttgggaaatcttggacgcaccaaccgaaaaactcagagattaacaatggctgacagagtcatctgagctgatgtagaaggagttttgagagatgaggatgggcaagcctacaatgaggctggtcagagattagatgatcatggactcatcctacctgaggacgccaatgaggatcaggcgcgcctcaatgcgcaattagctgccagagagcagcacggctcagtgtcgagcgacaccaactgggtgtcgatcgacaccttcaagagcagaacgcagatgcgattggtgtcgagcgacacaacagaggtgtcgagcgacacaacagaggtgtcgatcgacaccaatcccagattcctgcagctattccttcaggtgcggaaccacgtcatactcttggggatttcaacaggcctgacctgttctatgctaatcgttcagcgattgtacccccacccttccagaggaacgactatgagctgaagcatggctattttgctttagtaggctagcatcctttccatggattgtttcatgagcagccaatggaccatatcgagcgttttgaggacctcgttccgagcatcaaagctaatggaatctcagaggactacctactgtgccagctcttcccttattcacttgctggagaatccgcttcttggatgaaacaacttaaagcaggttccctcaagacttgaagaagcatcaagatagctttcttgaacaatttctatgatgatgctaagtctgagtttgcttcaaggagtatcaacgggactgcccgcatcatgacttcagtgaggtacaacttcttggtaccttcttcaaagaagtcgattggagataccagatggctttaaatgcatcgagcaatggtaactttaacacgagatattcagctgatgctaccgctctgatagagaatctcacttgcagtaacagcaccaagaatgctaactctgagaggaagaagattgttggagctgtttcgggcaatcagatggcagaggtgaatgctaagctggattcggttcacaacttgcttacaaggaagaagcatgtccactttgcagctgaggatgagactattgagcctgagactgagtcaaagagggagtcttctacatagatggtctaggctacatgaagtttagacagccacatggcaacttcagtggcaacaggtttacagggaaccagagttcctcgaactacactcaaaagcctgccttccagaagacatttccttagagcaacttccagaggacctatggtaacacagcaccaagaatgctgactttgagaggaagaagattgttggagctgtttcgggcaatcagatggcagaggtgaatgctaagttggattcggttcacaacttgcttacaaggaagaagcatgtcaactttgcagctgaggatgatactattgagcctgagattgagtcagaagagggagtctactacatagatggtctaggctacatgaagtttggacagccacatggcaacttcagtggcaacaggtttacagagaaccagagttcctcgaactacactcaaaagcctgccttccagacgacatttccttacaacaacttccaaaggacctatggtaactcagctaacccccccctaccccccacccccaccccccccccccaccccacccacccacccccacccccccctcatcagagaccagaatggaatccatgcttgaacagattcttgagagccaaacaaagcttgttgtggagtttattggcaagtttgatgctgtctacacagatcttaatgggaagatcgacaatctgagctctcacttcatgaagctaaatgtacaggtagctcaaactgcccaatccattaagagacaagaaggctttcttcctggtaatcatgatgttaacccaaggaagagctgtaatgccatcttaatcagagatggagatgatgtgtggaaagaagttaatactgaagaagagctagaactcactgctgcagagttggtgtcgaccgacaccgtatggaacattgttttccaaaacggttcctcacgagggtgtcgatcgatacacctctaatgtcgatcgacactgggtccggactacaccatataaggtgtgcatcccgagtctacctatgccacgcttgtcccttatccgaggaagcgtcgttctaagcaggagattcatgctgctaagtgcacaaccatgatggagaagatcctcacttctcttcttaaggatgtttctgagacatctcctgctccactcaacaggtatgtcaagcgacttgttgacaatggtattaaatcagatgaagcctcgctgctgacaagggacatcagtgcaatcatgctgcctaaggttaagaaagagaaggcacagagagtggacattgttgagtagttccgcaccatcactcctgatcagaccactgagaaactccctgagccaggtagctttgttcttgattgctctatgtccacaggcaggttcagcagctctttatgtgatctgggatcgagtatcaacctcatgcctaagtttgttgatgagagactaggcatgactaactacaggccgactagaatcactctcctcttcgtggatcgttccaaacgcatccctgaaggaattcttgaggatgtttctgttaaggttggtaactccctaatccctgctgattttgtggtcctggactacgataaggaacccaaggatcctcttatccttggaagagcattcatagctacagctggtgctaggattgatgtgaagaaaggtaggatctctctaaaagtttgtgatttggagatggagtttggcatggattgttcagagttcactacgactatcagtagcattgcctctggcacaaacacacctcctaaaactgctcagaatccccagacagagacacacacaatgctcccatcagctcagctcgccaatgaaagttgcagagcaacgatgtcgatcgacactatccctcctgtcgatcgacaccctcgggattcacagacagaggattctccacattctcttcagccaacacctcttgcggccctctatgataagttctcttctatctcttgtcctgctttcccttcgattaattctttagattcttcgaagtctgcttcacaagataacaagcctagagttcttcgaaagcttgtttctcctgttgttcttgcaggacacgaggagagtatcgatcgacaccaccatgagtgtcaatcgacacctgcagctgccctgaccagatcagtttacacaccgccttggaaggcgaggaggcagcagcaatcctccaccactccaccctcatcttgaactccgccaagtcaagctattgactcaaaacaagcgcttagtgggaggcaacgcactagtttgatttttctttcccttctttttattttctttatttttgatttatttttctcacctacttcggatttgaatgccactggggacaatgtcgtttaagcctggaggagcttcttactaattatgcttttattttttattcttattatttttcgtttttgagtttattgagtcattttcttatcttgaaaaaaaaaaacgtttgtttattttagttaggaatcatgatctatatttcccttgattattgcctgattgatgagtgttgcaggttcggctcaatccgaatattggaaaatctagatggcaaaccaacagacttgaggatatcctagattccaacacaaccactaaggctggagctaatctcactgctcttccttttacctcttcaaacattagtattcatagatcttgactccttgtccataactgatattgagaccaatgtgataaaaaaaataatgtgttcctctccccatataaaaaataataataataatgagagattgatagaattttcagatagtgtataggggtaggaatgtttcctatgaccccattattatacattatttggaatggttaattacaaaggatggaaaaataccgagggtgtcgatccagtatgcgagttcccctttgtttactctttaaaaagaataagtctaggggagagaaagaacggtcaatatatcatggtatagtacaggaatgagtctaaaaggatcttgagtgttagcttgtttgatgagacccagcgatgaaagcctggtggatatagttgtgagaacttaggtatgaaatttagaatgttgtgtaaggttgtagagaagtacatattggttaggatttgattagacttgttaggcatatggacttagtttggatgatcatggcaataggcttgagaatgttggtagttccttcgatttcaaaacctcttccacgggttcggcttttgtgttttgcttgagggcaagcaaaagctaagtctgggggagttgatatatccctatttttactgatttaatctatgattttgagtctttatgttatttctcgagtctttttagtgtcttttcaggtattctatgcaatgggacaacaatggagataaggagatattttggagcaaaagctaaggaaaaggaagctaaggacgatttcagttccagattcagcgagagtgtcgatcgacacacacctcgtgttgatcgacaccagtttcggcccagcaaagtccatgatgctttcatgtttatagaagaggaaatttgccccagaagacttccctatttgctttattagtccctggatgttttatagggttcttatatagttgtttagacctaagtttcttttatgaagttctttgcaaatccctattttcagagacataagctattcatcccttgttctcgagagattcattcagttttcaatacagtgaagacatcccttcttactctaatcttatttgatgtgtttatgcttttttactcaattatgttgcttttttcattcaatatgtctgagtagtttgcttgttaggaatagggtttctcattagggattcatatggtttagtagatcgcccccctgttaggttattctagtagaattcttcatctttgattgatcttaatgctagatctagagtaattaactagatcttgaatccagacaatagatatgcccaccataggtatctgtagttggatctattatttgatgagtctggtttataggtgtgtaataagaataggcctatctactaaggtgaacaattgaactcatttagaatgcaagtttaggttaaagatctctcggcttctccggttattcttagctataggcatagggagttttgcggaacaccactggttatttcataattagagtttgagtttaagaatagttcgataacaacctagctttaattagatctactaaccaatagtttcctgagaacaccttgttcctagctctttatttcatcgtttataaccaatcaatcattccctgctagcttaatcttgatattgaattcattgtgtgaacaaaagaactttgtggaaatcgatccttaaatactgcaattgatctcttgtttgagagagtagttcttaaggtaatttgaaccttatcaatagggtttagagattatttctctaattgtcgaatacaagatgtaagaattcaccttaatagatctataagaaacaaagagtagaaagtagggatttggtgtctttggagctttagatccaagagacaaatggttcttgtgcttctaagcttctcggtgaaggcacaagggagatgcatgaagagcacaactcttttcgtgtctaaaacaagtattaataggtctcggaaagttagtagtgggtttagggttttttggaaaaacattacgtagtttcatttaagtgcaggataatgcttgagaattggtacatgcttcatgactggtctctagagtaggcttcacaccgatcatgtgggttgtgattggtcccaaccggtagctcttcaccggtcacaaagacaggacttcactctaatgggcattgaaaacaaatgttgatcatatgagtttactttatgtggttactaactcttctagctttccatagaatccaaaaactctcaatttggtgcacgagaagttctccaatggatgtaaaaccctcaaagctttgaatttgttagaaaacgcattttgcttgcctcataaaaccttcttcgcttcttaaatacttgattatcatctcttagaccttgaaattaatccaaatgtttcataaaatataagaaaaaaatagctaatataggtaagaaaatacgatgttattcaactcccccagacatagacttgcttttcctgaagcaaacaatagagtaaatcaagtggaaaggtttgaaaatcataggacccctcttattatcagtgaccgtactttgaactataatctgcagaccacataaagcaaaacttgcgttagaacatcagcactatcgcctacacctttcttgtccttgtccatccgatttgaacctacaaaacttctaaattcacgtcaatcatgtaacatcccactcccatcttcttggagcattttgttttaacattatgattcagcccatttaaggcccaagtgaatgaaaaaccacaaagcgacaaggtctagtagttgtgaccacatctatatatgtaagcatgtccttcctcgttaagattaataaaccctagttgcatttggtgatgagagaaataaatgaagagaatcaattgttgtgagcttttcctctcgctgtcatattgagaaaaaaggagcagatcgtgaaagagaagaagaaagtaaagaagtagagaataaaacagagatgaagggcgagatatggccaagaagaagtgatcatcatcaccgcaaaggaaaagcattgagagggggagatatggttcataaaagtgagggggagtaatgatgaagaagattagagcatatctaggctggagaaaagcaaaacacaagcaaagatggaagaagatgaagggaaaattgtgaaacttcttctcctcgaaccagaaagaattagatcatgagtacaacatctctagaaagaacaccaacccaagaatccttagcaactaacagatcttcaataagagtcaaacttgaggagttatgcgtgttactttccggccaagtaactgttggaatgatctgcaaatatatgctaattatgaaccagaaaaaagttctgagatgggatatcaatagcaatgtttggaggtcgaaatgatatttgatctggctgtaaattggtggagttcttcatgataccacatgctccatattccacagtgcgaatcaaattctaccggatagtaatggaattataaatctgtttgggaagcactttagtttaaagtaattagtggcaagttttattgtttggtttggcaaacaagcttggtttgagcccaaacttttcagaagtctttaagactttcataattatgttttggttgatggagagccatggtggatgataacatcgtattttcgcccacttctactatgtttttactaggttgttcatggagaaatcaagagatattagatacttcaaggttttttccaagtatttgtatttcaaggaagaattaagagttttcaagcaaaaatgagtaaaagtaaatcaaaccccatttcaggacggtttttgtaccatagaattatgtcatccgttcaaggtcttcacctcgatgtggaatcaccacaatccattcagccattcagaagttatgtcgagagggtgaagacatgacccaattgttagaagttatatgcacccgttccggagcctctaagtcacactagccaccaagcatgtgcatgggctattcaccactctcaccactagtcgcccacccttgtgccaagtctagaagcttgcccaacacttaacctaatcaacatatattaacgcttaacctataaataccaaacctttagagaaaaaccctacgtatttgatggccttttggagtttcttttaatggcctccttcacagccagctcaaagcatgtagcctccgagctccctatccacctcaaagcttatagaagtcgtcccttgaagatctctctcttgttcttcatcgctttctcttcgcttctcttatactttttcttatactacttttgggtagatgagttatcttctgtgacatcttggagaagtttcctttgaacccccttttgttattgattcgtttatgatcttattctttatgatatatattatttgcatcattagcgaatagttttctttgttgggttttatgggatgattcaaaggggtttcatggttcaaaacttattaggttgttagatccgattttcattcatacttagattcttttgggacatcttttactttattgcatttgttttgattaatcaccaaacgctaacccaagagggaaggatctctaaccagataaaccaaacttcagacatcgtattaccaatcattcgtgttgttgcatacgtaagttgaaaaaaggacttagaatacttagcgaacgcgatcctaatgtgttaatctatacgttgttgcatacgtaagttgtgtaacataatatagggcgatttgctaattaagtatattctagggttagtcgtttattcgtgtttcgtagttgtgaactagagcaaaaatattaaaaacttaagagagactagccctattattcgagaatcatgataccttgagaaacccttgaacacccaacaccataaatttatagcttacaactgatatatattttcttgcattaacttattttattgcttagttatgaggaaacccaaatccaaaacccctaagtgtagttttttcttagccatattttatttcataattaaatatttatagatatcactctttgtcggatcgatccttaaacataactaatgattattgtgcccttgtagctaaggtgtggtccctaagataaaaccttgaggtaaatcttataataatttggataatatatcgtgggatcctactgaaaggaaagaatattggattatcatccaaatgaaagggacaaaatagatgcaagtacttaactagaggtccatgtcaacctatgatcatatttttctttagaaaacaataggaacttcattgatgatatttaattcagcttggtttggtaaatactctagttcgctagagtatagcacattgacaaataaagtatagtacattggcaattgtttttttgattagttgataagagtggagcagttaaagaaaatttggttgagttattcatgtcaaagaaatatcttctttatctctgaactctgcaattgataggctgtttgctaaacattggttaagtttgacagttgagaggacaaggttatgatagagcaagtaacatgaaaactgagttcaatgggcttagatcattggatgctagggaaaatacttctccatattacctccattgttttgctcatcaacttcagttggtcgtcgtcgttgtagttgcaaaaaagcactttgatgttggtggtttttttgacatgatttctaagctgttggatatggtaggagcttcttgaaagttatcaaaaaggagtagtacaaaattattaatggtgacattagcactggaagcaagagctttctcttcaaaggcctaagtatacccgttggaattctcatcataaaactttattgcgtatggttgatttgttttcttatatcattgaagttatagattatatccaagatgaaggagttgatgactcaaaaatacgtcaagcgtttggtcttctcaagtactttcatatctttgattgtgtattctatatacaattaacgttagtcatgttgggtctgacaaagaatttatcgatggctttgcaaaggaaggatcaagatattttgaatgttatgtggagcccgcatccgggctgcatcccactcgtcccaccggtcactaagctacgtcaaaaagcccataagttaggcccatcacttacctaattaacgaaaagacgattctacaccttaacctaattgaagcctataaatacaaagcttaggagaaacccgatggcgtcacgatttagagagcctctttcacagccaccatcgaccagactctaagctccattgaagatccacctcttcgatcataagcctccaagtcgacgtcccttgaagatctctctcctattcttaattgctttctctattctcttcttctactatttcttatacaacttttgaggagaaaacttatcttttgtgacatctagagaggtttcttttgaaccccctttgtttatatctttgtttatgtctttcagatgcttttctacttcatctctatgtcatttctttgcatcatgaggtgtttatggggtgattcaaaggggattcatggtttgattcacactagttgtgagatatacttttcattcatattagcttcttttgggacatcttattctaatgcatgtgtttgaattgatcaccaaatacagatcgaaggaattaggacccctattgggtaaccctaatatcagaaatagtgttaccaatccttcgtggtgttgtttgcgatggttgagtaacaagacttatagtagtactaaatgaatcaatgcttaatgcgttgaagtatgcagcattgacttcaaaggttgagtaacggagtatggggagatctaacagttagacgtatagcctaggctaactcgttcatttgcctttcgtcgttatgaactagaacaaaaatagaataaaaacctaattgatatatcacctattttcagagaaccatgatatccggagaaaccctagagcgaccaacaccttaatcttattgcttaacaaccgatttttgcattgctttcattcattcactttgctttcattcattgcttttattacttgctttcttatttcattgcattagtcattaggaaacccaaacccaaaaccccaagttaagttttgtcttagcctgatcttcttctctaaattcaataccttatagctacactctttatgggatcgatcctaaaatactagtactgattattgtgcacttatagtttaataggtggtctttcttgtaatgtgtgaataaaatatacatcaatgatccgcgacctcaagttccaactctatacgagcattgacagtctttacacgatgaagatggcaaccccatctatgaatttcttgaagaacaactgaaccctctagacggacgagaccaagattaacgagctccatgtgaagttaatcctttaggtgtgggagacaacatagacgtgcctcctctatagcatcctcatttcatcaattccaaacaccttgctaatgttgccgtaagacatgccacttatgtacccacctttgagacgagccgctccaaatcgtacgatagccaaattttgatgcaccaaaacaatacctgcaagatcgacctgttgtatgagtcactaatcctccaggacgtgactacaagataatacctcaaatcattggtgtaataccccgtcccaagacctaagaactggacgggaaggacgcaagctggaccgttcaaccaaaggagaaattagattgtaggagaggaggattgatcaaaaatcaaagttcgaatgatatgtatagatcagtagaagagatctacaagaaaaatcatgagagattattactctagaaaataatcaaaaggtgaaagaaggatcaaagttgtcaatcaaccgtatcgttaagaatttcgtcgtgggaacgaaaaaattctaatgaaagccgtaagtcagcatagagactttaagaaataccaaattccaaggtaaacgatctaagtattttccgaaagtatcggctagagccagtagttgctagcaagaatttcgaaaatttagaaaattgtctaacaacaaagaaacggatgggaaagaagaaaatgaattttttggtagaataagacacatatgagatggtcaagaagaatcagaaaggtttagggtcaagatattttcggcgaatatcagattttctaagaaatgtcctaatggcctttaaggagcagaaattagaattttgtgctaacgtcaagcataaaattaattataggcattccaataagactaatgaggcaataggaagggtttaaattaaattagaagacatgagtaattttcagtacggaattaagtcatcggaaaatattctacccgatcgccaagaagtaaagtggtcccactacaagaaagtaacgtattgatagcagtataatataacgttttatacctttttgctatagttggcatatccttcaattttggatagtgtttgcactttacaaacgctatgtctggttggtaagatctaaatttttggaactctttttaggaatgtagaatacatagcactcgttcgttttaaaacgttgtgtattgttgcgacgaataaaataaatttttttgctcccgaaatacttaacgaaaaaaagaagcgcctaacaaaattttcattctccctctccattgttttacttctcaagcttttttcctcactacctttgtcaatctccgaaatcccttgctccctcttcaccaattcctcaaatttagaccaagcttctcttcgaaaaaatccttaacctaaccatgagtcatcttcctcttctccattttactctcgttgcaaaccctagccgccgtcaaagcaagcgagacatgtacccactcgatactcatggtccagacaaagatccgtcttagtttgaaagatgccagcgccctcatgttcctctgattcttcctcatcttactcctattccttcagatctataatcaatcaatgtattttcttattttattcaatcgatttatcatctcttttgttggtaaattgatgtctgtgttacagatcaaatgttgtgaactaattagcctaatgattcgattgattttggtgaacccgaggatcgtacaagtatgtagctatggaggaagatggagtctaatgtcatgagattcctgtagacaataaccttcgattggccgtcctaaacgtctcgacaacctcttgtatgcttgctaactcatttcactttccaatttagatttgcttcaatagctcataagatttcaagtttgggtccgataagatttggtctatgtttaattcttatgatattgttggagaaatggagatactgaggtttgatttcgctgcgctcgttagatttaccaactaacggctccgcttctcctctaccctccacgcttacacattcctcttcttctttacaggttttgttgagtccatgttagtcaaatttactagttttggtttctcgagtctgagggttttgtttctttgaaaccaatttgatgtttctcctgagaaattccaagctagattcattcttaattgctcttaaatgagaatgttagtctgctttgttcaattttgtgcttagataaagtgtttcacgtgactctacctcactatttgaattagtctaagtggaaacattgatagccatacttgtttgtatttgttttctctccgtatgttttcttgcttcttaaatctcattcttgattcatctacagaggttaaggctttactctgcacctatcaagaaaatcgtgtataaaattaaggaacttggcaagaggatcaacgatttatgtggtatgtgcacattctttactcatgaagtgtttggtttattttggttagtgaattttgtttattggttgtaaaatacggttgttgggatgcttatacttgcaagtatcaaggagtttgataaaaaaacttgcttatatgatagaaaagtcgtctctttttgtttactttaaatgtgttgttccatgattacttcttaaaatcttaagttgattagttttgaattttgttagtgttgtgatgttgttgtattttgacgtacgtcccatttttttataaagttaagattagtctattgtaacttaatgtcttctgttaggtgttatgctcgtcttcatggaagggctgtgaactgttaattgtgaactgcaaagaagaagaagaagaagtgtggtcatcgcaaccatgattttttagaagccaaagaagattccaatcatgtttgctttgtattttgttttcctcttgagagatagtttattccttgtttcattgaatttttatgtaaaacatttatatcaataaaaagatttcgatttctatctattatgaattgattattggaattattaaaatttaaaatctaaattcaaatcgatttgaataatatcattaataacaaagaagaagtgctattgtaaaatataatattccagcaaagaatgtgctataataactaacagtattatagcacaaagaaaatccactatattatgtcttcgacctattatgacgggagaagatagagcgcttgttaaaatgctaaaatataattacatagggttattcggaagatagaacgcttgttaaaatgctaaaatataattacatagggttattcggacgctacagaagtccaatatttttgtagtgtctgcatcataaaaattaaagacctttaagtgaagagtatagtatcgtacattggtatcgtaagttcgttgcgtttactctatattgattatttgtcatttatctaaccttcatttttctatttcccttttttttattattgtgtgaattgattgcttccttttagtttcgggaatgggttggggtaaattataggtttggtagtcaggcttactgagtaatcttagattattcatgacactacttttttatttttcatataaccctagtaagtaatccttagccggtgcggtgatataaccctgtttttaccatttttaactgtgttttcgatataggattttgagtctttttgttatttttagagtctttttagttaagagtgtcgatcgacacactcttggtgtcgatcgacaccggtttcggcccagagaagtccatgacgatttcaagtttaaagaagtgaaaattttgccagaagacttctctatttttattattagtccatgaacgtttttaggtaatatatatagttttaaaggtcattgtttagacctaagacgttcttctcatccaagttttcttttagagacataagctattcatccatgttttacagagattcattcagatttcaataacagtgaagagctcttttctaactcttttctttattgatgtgtttatgttttcttactcaaatatgttgtttgtttcaatctccatgtctgagtagtttgcttgttagggttagggtttctcactagggattcatatggtttagtagatcgcccctttcgtaggttatctgtagaattcttcaacagatgctagttctagagtatgtaactagaacttgaatccaaataatagatatacccactataggtatctgttatcagatctattatttgatgagtctggtctttaggtgtataagaatcagcctatttactaaggtgaacttattgaactcgattataatgcatgtttaagtaaaggatttcatggcttctttgataatcttagctctaggcatagtgagttttgtggaacaccaccggttattctaatattagagtttgagtttaagaatggttcgataacaacctagctatcattagatctactaaccaatagtttccggagaataccctaaacctgactgtttattatcttgttttacaaccaatcaatctgttgtttacttactttgttttattttattttctcataatctcttctagcttaatctcaacacttaattcactgtgtgaacaaaagaactttgtggaaatcgatccttaaatactacaattgatctcttatttgagagagtagttcttagtgtaatttgaaccatatcatgcggtaatcctaaggcggccaaaactagatgatttacatgttttgctcaaactcaataatttttattatatatagttttctaaatgggcccgagaactatacatattttggtaacaatttaagcatgatactatattaagtacaagtggttttctaaacacctgaaggcgaccgaatgatatttaagtcaagttcgggctgacacaacttataaacgtggtatgggttgaaaagcctaacaccatttttgggaggtaaagatacccggagtcaatcaattttagagaacagattcattcagggaacttctattgttttattacaggcgtcatacatgatgctcctattctttcttatttttaggatggttcagggtgttacaaaaatggtgtcaaagaatggtttatttatgctcacggacctttgtttccaatgttttattgaatcaaaatgtgttacaaaacctgactaaaaaaaatcaggttgttgatatgatcactttgcttttattttgtcgttagataaaatttagaactcacccttttgtttgttacatgtgttgtagatattgagacgtggtcgtatgaggatgaggggtaggcgtgggcattcgggttcccgttcgggtttggttctttttttcgggtatcgggtctattcgggtaggaggttgagaaccattcaggtctaaaaattctgtttggtttcggttcgggttcgggtcgattcggttattttagtaaaaatgtaaaaataaccaaaaatacccaaaatattttcgggttcgggttaggttcgggttttttacatatatacccaaatctacccaaaatactcgattacccgtaaatatattggttactttttatccaaatataaccaaatgtaaccaaaatacttaaattacctaaaagaaaactataacatttgttacttttatcccaaatatatccaaatgtatatgaattactaaaaaaatctagtatattcggatttataattttaattttaggtgtttaaggtattacaaatatatatataactaatatttttaggttacatttgtatttgggtacccacgggtattacattcggttcaggttcggttcaggttttttcgggtagtgaggtcgaggacccattcgggtaaaagaatgatcaaggtactcaatcaatcgtatccaaaagaattttttcgaagaaaagaaaaattctagggaaagccataagtaagcatagggacttgaaggaatgcaaaagtccatggaaaacgagctaagtattttcacaaagtattgaccagagccattagatgtctagcaagaatttccaaaattcagataattgtctaacaacagggaaacagataggaaagaagaaaatgaagattttaggagaataagacatatgagattatcaaaaagaatcagtgaaccactcctgctcgctcttggccttggctacttaggtttagggtcaagatatttttgacgaatatcagattttccaaaaaatatcctagcagcctttaaggagcagaagttagaattttgtgctaaggtcaagcatgaaattatttatatgcattccttaggaatttctgtaaggaactaagtcgtcggaaaatatcttaccctatcgccaaaaggtaaagtggcccggttaaggtaaactttagtaaattagagcatgttactttaccttaaaatcgaattttcatgggtagaatattttagggacaagagcacatgaattgagtagaaacatgttttcagcaaaaatcagaaggtggaatgaatatgatttttgttaaaataggtcgagggcgtttgattgactatgttagggaacggagcttcctctctaatcaatgaggaatgatgcgcaagaaacttgggaggacatgtattgcgaccaaaaacgaataagaaggcaatagaggtgtgtttcattgtgattggccaaaacttgatagcgtgatacatgcccatgctgattcatcagcttgccacaaactttgaggagtttaaataggtgatttccactcaaaattttgtcagaccaaaaatggtaagaaaatttctaaagtttgtgggtgtattctagagaaaattcctgaacacaggtgaaagaaaaatttcggagtagttagcgagttagtccgtaagtatttaggttttagtttctgattactttaaaaaaaaaatagttttagattcaaacctaaatggatcttaattatgctatagttagaaacgttaactaagtgacgcttcaactgaaatcgataagtaccaaacatttgaagtagcaatatctaggttgggttggggtaagttataggttgggtaatcctactaagtaatcccttattcggtgcgatgatccttaggagccagaactagatgatttaaagttttttgttaaaactcgataatttttattaggtataattttctaaacggacccggaaattaaacatgatttggtaacaatttaagcaccatactatattaagtaaaaagtggttttctaaaaacctgaaggtgatgaaatgatatatcagtcaagttcgggctgacacgactcaggaatatggttgaaaagccttaggccatgtttgggaggtaaagatactcgcgcttgatcaatttagcgaatagatttgttccggaatcttctattgtttgattacgggcgtcatatgtgacacatctgttctttcttattgtttgagggtgctacaattggtcttgttaaacaaaacaattccataatttaatcacggaccatccgatggatcattttattcttttctaaaaaatctgcagtattacacaaacccctggaatactcgaagactatttgaagtgtaagcttttccatatttccctagccgacaagactcattgatggttaaagtctctacccgctggatcgattattaattgggaaggatggaaatcaacctttctaaactacttctacacgaaataaagatccaattctttttgaaacaagctgcaagaattccaacaatgacaagttgaaactttctacaaagcatgggaacaattcaaggactacgaacgcgattttcctcaacaggcttcactaaaggtcacttcttaagtatttctgtagaggattacgtcccaagtttaaaatttcactcgacaccgctagcaatggagatttcactaccaagaccgttcaagaaagacgagctctcactaaaaacctgattcttccaccgattttggtagaaccatccgttctaatgatttagatgcaaagcaaacttctgagctgaagaatattgtttgggttgccaaacaagggtgggttgagcttaagctctgcatgagtactcgtggtgtttgggtctatgctttggtttttggagaaccaagctagagttctgaggttagaccgtcgcctcttcaacaagttaaggataaggagaggacaatgttttgtcttgtacgtattcaaatatttttagatagttacttagtttacggttaagccaagtatacctacgaattacatatattacgagtaatcgtatttgtttgttgagtatattaatatctataagtataaatatatttcatttaaagtataaagaaataaaaatacgatcttaaagatggaaactaaactaagatggatatttgtatgtgtgttgagtgatatgtgaaatgcatgccaagagtacagagatgcgggtgagccgcaaacagtcctgcaaagagagatccttttatttttgttgtaatatatggatgtagagtgcggatagatcaggatggctaatgagccgacgagtgtgaaatgctaggaacaagtgaaaaaggcacgagggattaatagcgtgaatggtgccatgaacaagtgcaagagacatgaggcattcgtaacgacgaggataagcgtttggtgacacgtgttgtatcagaaccgtctttaggacggtgatggagcagtctcattttctttatgtgtgtgtatgtttgtgtcataatctttaggacacaattattttctgctagtcttagattgaaactttgtgattgtctatgcgtgtttttgtatgaggacttcgtgagccatgaggcttgccctcattgagtgatcttcgattgctatctttctcttttgcaggttggttaagttaagagtttgttttcaatcttttttggcagttttgtaattaaagaatactttgggccaagccacgaaattaacgcgtggaccagctttgtctcacaatttggtatcatagaccggtcgtgtggctttgcgaggtcggtggcatgccttgtgatcggtatccgatagtattccttcaaaagggtgaaaaaaactgtttggcagatcggattaagttgatatttcttctagcgttatattgactcttctagctttctataaagtccaagatttctccttagcaagagtagctagttagaaacagcagtcatagatcagtcgcccatactcccacacgaggcagcataggagatttttagacaatgggcgaaaacccgatccaacaataatttggtgcaaagaaagaccttgaaaaagaaaccaaacccatgaaacttcgaatatgtactaaaatgtggtttacttgtcttatggtctattttaccttaacttacaaaccatttctgactctaaaaatacttgaatatcttctcttagctttgatatcacaccaaacacttcctaatatataagaaacaatagccaaaatgggcgaaaatacgatgttattagaagagacactatgactagacggatgtttaggatcatgagggcatataaaatcattctattcatgtatcataaaattggatgtatatacgttttcagagaagttttatatcaaaatagctagtattggtgggtatttaatacaaggtatacaatagcatgccttttggcgggaggagagtgtcacaatttcttcataaattgagaaatgtgatgtttgtaaggcgttaataagggttttaaaatggtaagtaattataacaaacgagttgttacacggtttctatctacctctacttcattgaagataaaaacgaaagcattagttaattaacttcagacttagttttttttctggttaattaagcataaatatcaaaacaaattcaaatcataggctaatttataaattctagcaaatcaagatttggaattttagattaacataggttttaaaggaatgggtgcaaatatatctcaatataatataaaagaagtatatatttaaaaataccatactattaagtttatttttcaaaaattccaacactagtttatttttttaataatatcataaatttaggtatatatttgataaggcctgcctaattaggcgagtataaaaagtaaatataagttatgtcaatgatatttgaattcaaaatagtaattcacaaagtaaatattttatttcataatttcaatcttatacattccataactatttattttatcataataaataaaataaatttttatacatttcatcttattaatgatatctgaattctaaataatagcacacatatttttctaaatttcatttattaattattttaaaacctaatttcaatattttacattccttttgtcaatacaatttgactatctatttcatcataactaggatttaacctgcggtttatttggttcttatactaaatatttaaataaatttgatatcctaaacttataaatataaatttttgaattaaacataactaaataataattgagatttttttgaattaaattaaataataatttagattgaatggaattaattttattgaatgttttagattgaatcggatcataaaaaatttaggagattgttaagaccaaattatccttaatgattttgaatagcaaagaacaaaatccagaattgaaatcaaaattgaggtcaaattagacaaaaatttcattttgtacttcccttttaataataaggggataaactggattaagtttacacacttgatgttaaaagatatgtgctaacttcttatatcaaagtaatatatatatatatatatatacatatatatatatatacacatttcatattaaatatatatcttagttaatattaacaataattaaaaaaacaaattataattaattaaggactccaattccataaaattgtttcgaaaacaaacattgggtaaatataacttttactatatgacataatctcatcacttaattttacctcatgtcaaactaattttaaaagagctaaaattaataactaaaacagaaaaatataataacaatctcatcaaataataaacaattcattcttataaaagctattttccatttttcttgtacgctggttactttttaaagttttttgcattttcatttcgcaaataaaaatgttgtattacaatgataactattgttttgtccaattaacttaaccttaaataacttgtattgttattttgaactccaactgtcatttggttttagctaattccttaattattatattttacataataagattgtataatttcttaaaaacaatttcaagctttaaggaaaaagtattcgttttatagaatttgtagctgtaaattagaattagtaaatgtttttttaatttctatcttatttaataagatacatatagtttttttatttatttatttttgtcgaccgatattaagtagattaagctcaaaagagtcatttgtgagtaatgttgtttacatacgtgatatgatgcggttttgtacggactttccgtgtcaaattattcgctttaacatttgcactacgagagatcaaagataaagaaaagctagtgaattctcctttgtcgctctgtaattcttccaaatatgctgaaaatacgggtcattcaatagggtaagacaccatcttcaccagctttgaacagtttgttaagaaaaccacatcttgattatcagcgccaatcatgcatttcatagcccaaagaagggcttccacttctgcgtgtagtggcgacaaactccttctttgattggaagctcccatggttggtggctctccatttggtgatgtacaataccatcatgttccagagaatttatcacgttctttccatgaaccatccacatagcatcaatatcttgaataaatgatatcaagtgagagatatctcacttgaggcctagtgtcaaaatttaagtaaccatgattttcagtataaagttcaatttgaggtaactgccacgaatgtgcctctttttccgtcaagcgtactatatgaggggtctttattcacattttttaaaaaaaatttgttccttgctttccaaatataccaaattatccatggttaggaagataagtcaaattcagaaggtattctctagaataagtgatccaaattcgcataagtagatgaatatgtaaaatttccttcaaccgaaggtatttctgatagtgcccatatttgccatgtagggtggcaaaggaaaagtgtatgattaattgttttttctacctcaccacatctgaaacaccctgtgtcatagttaattcctcttttctgcaacttgtttgtcaccggtacacaacccgctaaaatttgccacaagaattgacgtaatttgggaggacaatgtactttccgagtgttcgcttttaaacttttagtatctggaccaataaacttttagtatctgcttgtctttgtttgcttggaatataattgattatgagcaatggatacttagagtaatgatgattgtctttggtgattgtatttgtcttcttgtttcaatgtactcatacagatgccaaagggaatccttttagctttggatcgcttgtggagacactgaacaaaagaagaaggaaggagagttatgcgagctcttctaaatcaaccgttgcgcagcttcaagagcagttgtagctcaagatatctgaacaagaggagcataatgcaaaacgtgattaggagcactacgaatctcaatctcggatagccagtttggagaagctcgtcctcttcatgaaagaaaaagatcttgagttggctgcttatttgtcttctcattctacaaaacctgaaccatgcacacttccaaccaccacaaccagccaaccagccattacagttgcatgcaccccataagacaacaaattaggcacgatacccttattctccacttcagctactatttctaacacttcttttaaccattaaacttgatcttttgttgcttttgttgtttttgttgaaactcgtttaggatttgtgtatgactatgattttctgaatgtaaacatgattagtgttttaatgtaaacatgattaaggattattggtttttgaattcgatattaattaagtttattattccaaacataagaccaatttgtgactaaaccaaagcaacacatgtgaccaaaccaattataaaactgtgaccaaacttattcaaactatgtgaccattatgtgaccgacccattacaatagtgtgaccaatttgtgactaaatcaaattacaaaaaattgtaacaatgtggcacaatcgttgctaaaacgatactcttttgcgattaaagtataagcgtcttaacttagtcgcaagcataaaagactattttgcgactatattgtaatgtatgtacctatgtgtacatcgttgcagtttaatcgcatatctgcaacttcttggtctcgtcacatattcgtcatgtatttatgactaactttctgtgtccaaaatttgactctaataggcgaccattttgggactactatattttgcgacggttttttagcgactgtataatatcgtagttaagtagttgtaaaaaccttgtttgcgaccattttgggactaatatgggagttgcaaatggcaggttttgttgtagttatggtggtctcgggaattgagttggaatccaagaatcctccacactgagactcccgagaaccgactcttttaataagtcctttattaaccagagatctagtggaacaaatacgtctccatccataggatggggagtatgatcttatattttccaaaggattggatttgcgataatatctacctttgaaaaccttctcaaagagcgaatcaggaaccgtaatcatacgacataattgttttgctagtagtgccaagttaaaatcatctacatttcagaagcccagacctcctttcgatttactaatgcacaatttattccaagtcatccaatgcatacctctagaatcaccatttgcactccaccagaattttgcgagcgcactcgaaagtttcgaagtgattgttttcggtagtctgaagcacgacataatataggttggtaatgccccagctaccgatttaatcatcacctccttccctccttttaacaaaaactttgccgaccaaccatttatccgattctgtaatctatctcttacaaaggcaaaagaatttcgtttttgatccgcctagactttcgggtaacccgagataagagcccatgccaccaagattagtgatacccaaggttgattgtatctcagccttgagagaatcatctaccttgtgaccaaacttaaccgatgattttgtaaatttatttgttggccattaaaactgatatgagtaaagcatatgatagggtgaaataattttttattgaagagttattaaggaaaatgggtttttgtgaaaagtggatttcgtggataatgtgttgtatttcaacaatccagtatagggttctccttaatggacaacctaaaggattaatagtacctgagagaggactaagacaaggagatccattatctccttatttatttatcttatgtacggaggtgcttattgcaaatattcgaaaagcagaacaaagtaaattgattacgggtgttgtttgcagatgatagtctatttttttgcaaagctaataaagaggagtgcgaggtaattttgggaatcttttttttttttgtcatcagatattatttagggctcaaacgagccaatcttaaggaaagttgtttacataagtgatatgaagcgattcggtacgaatttttcgtgccaaatattccgccttgacatttgcattacgagaaattaaagataaagaaaaactaatgaattcttcgttgtcgctctgaaactcctccaaataagctgaaaatgctggccattcggttggggaagacaccatcttcaccaggtctgaacagtctataaaaaaagctacttcttggttgtcggccccaatcatacacttcattgcccagggtaaagcgtcaacttcggcatggagaggagaaagacttctacgcagattagcagctcccattgttgacgtccctccatttaatgatgtgcaaaaccaacctagacctgaaaacttttcgctttctttctatgaacggtccataaaacaacaaaagccagagtacacaatgtcttgtgagatatccctcacccggatttggtttcccgatcgatatgagactttgttttcagtattgaactctacttgagctacctgccacaattgagcctcattttctgctagacataacacgtctaacggatccttttcctacattttcaaatactattttattccttactttccaaatataccaaattatccatggatatgcggatgaatcaaattctgaatggattcttgagaataaatgatccaaatttgcataaatagaataagtgagaaaaaaccccgggatcgtaggaatctttgaaagaacccatatttgtttcggcggatcactaaagcaatatgaagcgccttcgggagttttcttataattatcttctttaattttttaaaacaaatttccatataatgtttttttgaataaaaaaaaatctgtttgatatatgttgaaatctgagactgttcaaataaccacgtgtcatgatcttgtgagttattaatttttaaaaccgtactttatacaataaaatatatatatatatatatatatatatatatatatatatatatatatgttaatcctacataaatttaataataaaatcaaatcattatatttgagtttgctgtttccaatttagaatatatatttttactatttaaaggagatttttattttgttgtattagtgggaaaaaactagtaatgttatttctgaacaaaaacttaaatatatgaaggtttttttaccatatatagcgaccatacttcaatcttaagtaaacaaactttttgaagtcacttctgaataaagtgtagttgtatttattgagaagcaagtacccgcgtttgagtagatgggagtgagagacaggttagagctaaaatcctcatctggttgttgagaatccttaagattcttgacgcacgtacgtacgacttttcctaaaaaacaatattaatatgagtttattacgttacaaaaaacattataattttattcaaatacatgttggctgaaaatagttttattaattggatagcagattcctttttgagtcttttattaatatagaaaacaaaactattaaaaatgatcaattgctttaaatgcatgaaaacgaagtacacgcgtttttgtagtacgcaagcaagatcagatgttttggtcttatttgtgactttcttatattcttattggtagatagaaaatattttatagcagatgtcgtataataaaaagttatatttcacgaatcctttgtatgagtgtctgtgtgtgttttttctgtgttagagaataaaaagattatcatcatcgtttctctcataagaggagtcgcgtgtacctttgcatgaactgattttcttctctgtttttcaatattggtcacttctgagttcgacacctgaattatcaggagtaaatgcatcttaatcttagtcacactcgaaataaaatgcacaagtagttaacgctttatttactacagtaaaacctctataaattaacaatgttgggactgtaaaaatttattaatttagaaagatattaatttatcgataaattaataattattaatttatagaaagattttataaattttgtaattttcttacaaaaattcgatataaaaattagttttttctttataatcaataatttttctaaaactaattacaagcaaaaaacaattcttaagtttaaaaaataatacaaactttttcgacgtaataataagattggaattaaactctacatataattaatagaaattgaagaaaaataatactagaatcatatttcaataaatattttacatataatattgatatatatatgtgtatatattataatattgatgtgaccatatatttatataggattttcaaaaaagttattatcttattaatttatcgatatgtatcaatttttatactggtcccaactcgggaatgaaagaatttattaaattatagagattattattctatagagtattaatttatagaggttttactataatatgattgataattcacttgtaacatccctaaaaacaagtacgtactcataatggtgatcgatcaatggtacatatatcacttattcacgtttataaaaatgtaatttgatccgctcttaatcaagcttttaaatgttcgaaaaatgataatgatatataccactagtttgctaaatcttagtagaaacgtgattaatcgactaaaattttcattttataattatgtattaaagaaattttcccaattatattcgttctatttttagttatctagtacttcttttgttcatttttgtttgattttctaaaaaaaatatttgtttcaaaagattgatttttttaggttttttatgcaacacttattaattattaataatgaattgtaaactttaataaaaataatgaaatatcattgcttaaagttataagaaattattaaacaccaaaataatacatttaaaatcaaatttaatatgttttcttaatatctgtatttttcctaaaaaataaaaaaataaaaacagaaaaagtatatactatacagctaatatatatatatatatatatatataatattaattaaatatttagcctagcatgcatttaatcttattaatagtcacacggccacacaaacatgattcattaatagtcacacgacgttacgaacattattcattgatagtcacacgaccacacaaacacctaaccatagctgctaacatgccatgtctagccagctacttctacaaacgttcatttagttaattaactgctatatttaacatctatatacaataagagctccaaaataaggtagtgatttataaacatcacgtgtacatttgaaattttgaagagtttagccatggaatcaaaacctcgaaaaaccttaattatttaccataccatgccaccaaatttccgtagcaattctcaatttttgttctctcaatcaaagttttctcataagttttgtagccgatttaacacataaatttggaaacttcctttaaaaaagaaacagtacatgtccagagaatgaattggcgacgtcacgtttggcctggtgcatctagtactcagaataagtatcttaaaaagggttagaaagtttgctttttgtgttaaaaagccaaataaaaagttcaaaagttatatgagactctaataaaaatgcaaaatgcagtctcgcaaaagattaatcagctgtattttttgtttacgtttatgattcaataatcttactttcaagaaaaaaattatttgcatcattattacacttcaacttcagctaaaaggctcttaggaaattgattgttcctaaacacaaattgtatctcttatgttattggttattgttcatactattacaaacttaaatatgatgcattatctatttttttatcaacaatatatatattatatgaattctaatgggatcatgatacaaacatcttaaatatatatatttaaacaagtgatcttaattaagatttaaccccgttaaatgatgttgtaacatctgttaaatcacaggtttgaagcgaccagttattcaaagatgaagaattttaaaccaaatttttttaattgacgtatttttattcaaaaaaaacccaaggattaaacgatcaaacaaaaatagatggttattatcgcaaattgttatttttgactgtaaaagagggatgcaacagcactaaaaaaaaagtagatggacttttgaaagacattaaagtttgatttaaatagtcaacgtaaagaagataagacaacagtctgtatgatgtagattgataatattgtttgttaaattaatgaacacgtacgtatgatttattcttatttcgttggtacttagtcgttttagctctctgctgtagcctagtatgaacttgttgatatcttctagttttcataaaacgaatgtccttaaataataaatagcacattgttggtaagagaattcactggattcaatttagtaaactaccgtaaaaagacataaacgcttgcattagattgatacatgttatgcgcatggaacatctcgggttaggtacaaaattctagtgtaatgaacaagccaacatgatttttaaaacataaaattgcagtatgatagtcttttaaaatgcaatatctagtggataatgtgaaaacattggttaatgttaattattatcagagccaaatgcagtattgtagtcttttaaattattaaataaccaaatattttttttttttttttttttggacaaaaacttgttttcattcacttaaatcaaaccaagtacaaagtaggataacacaaagatcataaagtttaaaatacaaataaaatagacattcctcaatgccaaaacatgatagataaggtgagacgacggtgaattc

SEQ ID NO: 546 - DNA, 81902 bp, Arabidopsis thaliana
aagcttagtagatatttattttctcctgatcattcaacatcaaaaatgaaaagtgtgtcttatgagaacaatttcttattttcttgaagaagtgtcatgattcgatttgtgagtctcatgcattattcaaaagttatacaattttgctagaaagagtcattttgcattttttttttttttacattgatatgattacctatgaggctatgacccatttctatatctttataattgatgtttattttaagtgatttgaaatgctctaacgatgaaattggtgatgaaaatgagagaatttaacccaattactggagatgatccattaaggtatattatcttcccttgtgtttactttagacaacgaaactatacgtgggaaaattttatgttaaaagttactataaaggtagtaacaaaacttataagatttcttccctttatagtatatttgaaaacctgactgactgagacatttttgttactataaagagaagaaaatatactagaaagctaaaacaagacattccatttcaaccaaaactataatctctactgatttaccttataactttttaccattctttgtcaactttaatagtcattttcacttttaagatgggttactttccaaaatttgaaaatctgactgagacgtttttgtgtgctttacatatacaaaaaaaactttagagcataagaacgactagaaaaaaaaaaaaaaaaactaaagtgagttcccacaaataacacaaaaatagaagaagcaataaaaaaaaaagagttacgttatagaaaagagttttcgtcaattattgtttccctggtgaaagagtaaaaagatgaaaaatcatattaacaataatagaagattacgataaaagcttaagatgggagagacctcatatgcataaagtgttcccatgccatttctatctctacatgttaaacctcattgctttcatcagcatctttctaccaaaccgatgaagtatgattgatatattgtgtgattcaaatctccaaattttgttttattgcatgattaaaaatatccccgaccttataatatacgtctaccttttgtttatgtccttgctgtccactatcaaaaataaaaaggaacatacagataggataacaaatacatcggaaactcaaaggaaatgagagaataaatacaaataaataatacttccaaattgtaaactctaatttaacaaggaaaaacattttctaaaaattatcatacgattaaaaaatattataagcattaaatagaaaaaaaaagtgtacgtgtgggtgtgggtcagaataattaaataattttgtacgtgtgggttttttagtcaaaagaatcaacaccgtctactttcactatagctaataatgtcgggacaatgtctcctaatagatcacctcccttagcttcctctacattatatattcaccattcttctttctttgttcctcaacagggctcacattctctatccaccaaaacttttcttctacttttctatctatatatctattgttgagctacaaagtgaaagtacttttacttgctatattgatcaccaagttatagcatttaaaaaaaatgttgtcaagcaaagttgttggcgactctcatggacaagactcatcctacttccttggatggcaagaatacgagaagaatcctttccacgagtcgtttaacactagtgggattgttcaaatgggtcttgctgaaaaccaggtttgtatcaatgaatctactaactattttaactcatagagaacaaaactagtatgtacacaatttccaaacttttgtttatcggttgttgtttccgttctttttgcagctttcttttgacctaatagagaaatggcttgaagagcatccagaagtcttgggtttgaagaaaaatgatgagtcggtgtttagacaattagctctgttccaagattaccatggcttgccagctttcaaggatgtaagtaacatattgggagtgtttaaacaaagtttcagtttagtttaactttaacggaaacaaataatcgatagggttttgatatttcgaattcaaaagatcgaaaattcgcgtgtggttatttttttatttattattattattctttttggattcggtttttcggatatataaaaagagagtaaacattataggagtagagtcaaactatgatactaaatattctatggttttacacaacaggccatggcgaagttcatggggaaaatcagagagaacaaagtgaaattcgatacgaacaagatggttcttacagctggatcaacctcggctaacgagactctaatgttctgtcttgctaatccaggagatgcctttcttatccctgcaccttattatccagggtacgtgtatatttttacactaacgtttctgaatatgttagtgttatttacaagagagactaaatttgttttttgttttttgtcatcatgaaggtttgatagagatctcaaatggaggacaggagtagagattgttcctatccattgcgtaagctcaaatgggtacaagataaccgaggatgcattagaagatgcctacgaacgagctctcaaacataacctaaatgttaaaggagttctcataaccaacccttcaaacccacttggaacctctaccacccgtgaagagcttgatcttcttctgaccttcacatcaaccaagaaaatccatatggttagcgatgagatctactcgggaacggttttcgactctcctgagttcaccagcgttctagaagtggctaaggacaagaacatgggtttagatggtaaaatccatgttgtttacagcttgtccaaagatctaggcctccccggatttcgtgttggcttgatttactcaaacaatgagaaagtggtgtcagccgcgactaaaatgtcgagttttggactcatttcttcccaaactcaacatttgctagccaatttgctgtctgatgaaagattcacgaccaactatttggaagagaacaagaagaggctgagagagagaaaggataggctggtttcgggtctaaaggaagcgggtatcagttgtttgaagagtaacgcaggtttgttctgttgggttgacttaagacacctcttgaaatccaacacttttgaggccgagcattctttatggacaaagattgtgtgtgaagttggtcttaacatctctccaggctcatcgtgtcattgcgatgaacctggttggtttagagtttgtttcgcgaatatgtcggaccaaacgatggaggttgctatggaccgtgttaaaggttttgttgacaacaataatggtggtaaacaaaagagaaccatgtgggatacaaggagaagatctcttatcaacaaatgggtctccaagctttcctctgttacttgtgaatcagaacgttgatggatttttctaagagtatctcgttgattgcttttcatattatcattgttttaatatggttttgtttttcactccaaatttggcgcaagccattatggagtttaggtctacaaaataaaggaaataagtactgttttttttttaatgggagggtttgtattgaagggtcctgtttttaatttgtttatttgagtaaccaaattgtattcttttattctttcatatattcatataatactgtaaacattaaataaaattaaatacaagaaaaaagcttaattccaacagccatctatgttgttaatttgtaggaattttcaatagaacatatatttgttggaatatgattgttggaaatctgtatttgtcacgaatttattagaaacgtttccatcgagtaattctatgaccaatttgttggatagtgtaatacccctgactatgattagtaatctgtgggacggtcgcgatcgtagaagtgcgacaaataaatcgtaaacgttttgttgacttttgaaataaatgacaaagtttttgttgacttgtcatttgagtcatgtcgttaagtaggttaacataaaaaatttaagacgttaatgtctcgtttatctcctccgtaaaaacaaaacaacgttgtttattgaagctcgttttgtctgttgaaacaaatttaaaccctaaatcctcaaatcgatttcattatttatgattttgaggccaaggtgggtctgtgattttgagataatgatatcgatttggagatttaaggtttatatttgtttcaagagacaaaacgacgtcgttttgtctcttcaataaacaacgttgttttgttctaacagatcaaataaacaagacattaacaccgtaaaaaaattctgttaacctatttaacgatatgactcaaatggcaagtcaacaaaaactttgtcatttgtttcgaaagtcaacaaaaactttacgatttatttgtcttccgtgaaattcaagattaaatcgtcccaaatttgaaacttagtgatttttttgacatttctcccaataatcatcaaacaaagaaaggttatagaaggagttcaagatcagtttagtagtgagttgagattttatcggctattgctacatatgaagaagactaggatcggctattatcggcaaaggcagttaaagctatcgaggaatttattaggactatcaagattattatcaaaagaattcttatgggcaatttggttgatggaaagatcaaattttccaaggaaaaataaaggaagtgcggaaggctagttttttattggaaaaaactagttttatcgagaaatagtaaatttaggccgagacaagcaagcggtgatcgaaaaggattaatgcgatacaactaagtttagtagagtatttaaatgatttagtcatttctttttagaggaatagttaatgatcattgtccgcatacgatggtcggagagttcttcggtacgggcgtgtaccgtgagcgagcggaatgaatggtcgttaaggccatgtcgtcgaggtacttgtggaataggcagctgagacatgagcttggagtgtgtggtttgtgtgccactacacgtttaggataggatcaagtttggataatgataagcttaagtatggatatgcataaaagtggataagataaggataagccttatccattgcttagcttgcacgccaagtaacttgggcgccaagtttcccacacttataaatacccacgagatttcacttgtagttcattaccatcccacaccaaaacctttagcttaaaccgttagatagctagttattccgtcagagtctgagtcgggtagaagttggtcgagtcgggagtcgtagtcgggtaataaggtacgtagttccgcccttagttttttcttctttttagaattgttttattaattttgttttaggtccgacgcttagatccatcgttagtacacgttggagatggctcggtcggatcaaacttattaggcagtcaagggtagaattttaatctctcgacaataaggcgaaggtgagtaccgtagcgtgtgtagtagcacacgactaggtttttcttttgggttaatgattttaggattgatgttgcatgtttatacttagtgtaaattatgcattacttgttgatagtcggatctacgtttttacgtaagatcggcttggttgtttgattagatcttgcattcatgcttgatttagtttaggatgaagtatttgtgtggttaggctagactttagtttagccattaggttgcttgattgttcgttggtgctaggatttattatcgattgtttgattcccgtagtatatccttattagcttgaatattgtttattcgtaataaaaattacgaattaaattgttagcaagcatgttaggttgtttgattgttgattgattgattgttgtttgttaatctttcttcggcttgattaacttttgtgtgtgaattgctggctagaaggttttactacgagtagtattaggttacattaggctcatagtaagtattgtggttagtcatttatatgactaaggtgtgacgatatcgtgattgtcccaatagctcggaatggttcactaccacccaagactgtccgacggggtagtaaaagttttaccgtaagggagttggtcccttgtagacggtttggattggggaagtgatgtgatcgttttagactttgtgtatagcggtcagagacattgccttgtggaaaataagcatcgtatagtataggtccgtaggatgaagagtagttagcatgctagtagtagttttggtagtttccgatgcatatactctgtaaagagtattcattgcttagttgtttgtattgcatgatttcttgtcgagtatactcaatcgaggttactcgtattgattgtttgattggggattgggattgagatttttgttatttgttagaaacccggactcattgggtaatctaaggattctactttgtcttacaagtaaccttagtttgggagacctaaagggaagaacggacgttggggaactggggtagaattgttgtctttgtaaaatttggatttgtaaattgattcgatttgagcattagatcatgtacatgggtgatttattttgggtatcactagcccagaaaatatattttaattgatcaaactatgaatttgggcctgatttgtatcagtggattgatacctctgataccccgtatcaggtgacatggcaccatacggttggtcagtattttcattcaaattagaagaaaaaaaatatttctttagtaatcttatgttttaatatattaattattgattttgcaaatttttttttttatatacttaactggtctaaccaatgtaaacattgataatgggtttttaatcaattaaacctaaagcactatcatgtcgttgtagtactgaaggttgtcaatccaaatgggtgtgatgctaacaatcaagatgtgatcagaagtcactaagtcaagccaagcaagaacaggttttggtgtgttctagcagtcctaagtgaacatgcagaaaacagaaaattaaacagaaacagtaaaacactcgaccaacacagctctttgcagagcactgggtgaggtcgagtgaaaggtcgagtaacagacagaaaataaaacacagatactcgactgcacagtctgttgccagacaacagggtggtcgagtaaccagaaagaattgcaaaaattaagtgacagataacaagatgcaataaacaacagtagagcaaacaaagaattcaattagataaagaattcccgaggatggggtaattgagtagtttcgtttcctcagtttacaggtgattgacatgctcaataaattaaccctagacaacaagttcattaaccaaatctaagtgccaccgcaaccgagactatcaagttaacctagtcccagactcaatcaccattgacgagagctaacctaacaggcattacgaatcaacaagttaaagccaaaacgctccctgcaacgaatcaacaagttaaagccaataccttggtgcagggtcacgaatctctggaattagtggttcggacatttcatcgaacaccttttgggcgcgaaaatgtatgggctcaaattccagttgatcagaaagcaataggcattaagaacaactaatccagaagggatctatcaatcaatactcaatcacctagcatactgagaattctacactactctaacccatactcagaaacctattcactactcaaacatcataaaagaaagcataaacgttgaacaagttgaaaacatgataacaacagtgtaacagcaggatgataatagaatgaacaacagtaaacaaaatcaagaacaaaagctgaatacttaattgataaagagaaatccggattacaaaaggtctagaacacaaggtctgcgaaataaaactagttaaaaactttgctgcgaaaatgtgaagtacatgctacttatagccaaatattccgaaaccctaatacttaaaacgacgaagtattgggacggattaagaactgtactcggcccatgtggtcgagtgggaggtcgagtgaatagctggagtcttcttttcttccttgtgctcgagtgtctggttgagtgcggaatgaagaaggctctgaagcttgtcatcgagtacgcagtcgagtggtggtgatggtgatactcgacttctaggtagagtgatgaggtcgagtagtggtctggcaatgaaggtgaagacactcggcctcgaggtcgagtgatgtgatcgagtgatggtcatgtgatgggatgaagacactcgacctcggggtcgagtgatgtggtgaagtagtgatgtcctctactcgaccagggggtcgagtgatcttttgagatcttgaagctcctactcgacctcgtggtcgagtggtttgacatgatcatgcccgcatcttccagatagctcgtcaacagctccaaatcacctgaaatcaacgcaaatatgcaacatgcatgcaaatctatcctaaacatgtaaagtgatgacaaatgatgagaaatggtataaaacagtgatgatatgatgctaaagtgatgacaaatggatgctcaaaacatgcaaaatacacacttatcaactcccccaaacttagtctttgcttgccctctagcaaacaatcaagaacaagctggaggtgaggtttgaaagcggggactcagagccaaagcactagataaaccagatgaaatcaatgtccaagttgaaagttctaagctgcaagatcgaattctacttaaaaacgttagccatgcctcattatcaatcaatccaactcatatgctcgacctacacatgttttcaaatctaccaatccgtttaacattcattagttctggaacgtgaatcaagcaatgcatcatcaataaactcatttggctaaggtaaaaggtcaagagacaaagatggtcccttatagaataggcttcaataataggggatctctcaagaaaaatgattaagctttagtagaatgctaaaggtaagtcccaagctatgcatacagagataagatcccatctacccagagtatatcaaatgaagctctaatggtaatcccatctccaatcccaatataagaacttaactctaccctttgcattcatgaatcttttaaacccttgttctaatcattcttttcttttctcttaactctaggagaagctttctcaacactttgatacatctagcggatttggatttctttaacaactaaggttcctgtttttaacattttaaaaccaagggcttttgcccatcttcaatagctaacaagaactctttcttttctttataaatcccaaaacctttactagactttttccgcttctttagcttactccacctagagtcctttaccttttctcatcaatgaatcaaccccttttttcttttaaacacatcccaacccaaagtataagcgcccacctagtcctatctagtccgaaaaatgcgaactagaactacatgagacactatctctgtcgttacgaacctaccactttctaccaagcttaatcggaataagacctcacaaacactcacaagtgatatagggattgaaagaaagtctaggtttgggtttgggttaactgctctaataaggagagtcagctacttggattaacaagagtgatcaaaatgaataagaaaatccaagtattttagggtatccatgagttcaaatttgatgcagacatgataattaaagatcagattcatgttcaaattgatagggaatggtatcagatcatgatagtgtggtcgaatagagcaatccaggcatggttcagttttatttcaaattcattgactacgcaacagacaactagcaacgagggcactgagtttatccggtgaatcaaaatgcttacaaggctatctcatcatcatcccctatgcatatgcaacaatcctaaatgaaacactcaagactcgatcctaaatgtaatgcaactacatgaacactctttttttgtgaaatcagtttctgaaatttttcattttttttttgtttttctatgccttagatgaatgcagactcaaaaatatatacaatgcaatacacacttcctgagccctcccccaaacttaaattacacaatccactgtgcgaataaacttggaagagagtactcaggacaaatccaatcacaaaaacaaaatgaagaaacaaatcacaacggatgatataatacaatggtgaagtgaggcgcttacctcagtcgaagaatgaacgtagttgctcatcaatggctgcttgtgattgctcccaggccatggacgaaccaccttgttctgtatcagctccagcaggtgggtactcgacatcatcagctctgtggcggccagcaccgctctcaggatacttaacctctttccttctgctgcggccagcaccgcggtcgcgtaaactacgagactgcagaagtcgtctgctcctgctgctagatcgagtgagtgtggtcctcctcttcctcccagattcacgaggctcgaatgatgaatgtctcgcatggacatgcggaatctcctgctctctaggctcaggcctgcgctgacttggctcgggcgcgtcatatctcctcgaaggcatgtccggagggagctgtccctacggaatagctgtagtggaagaggagcagctgatcttgtccttcagaaacctgatagccctgaggcacttagcgagtaacttatcctgtttcttgcaccacttctgcagcttgttgttgttcctgtgagcttcgctcaaactcttgctttccctcgctggaggtatgtgctcactaaaatgatacatactcgtgtcaaactccgcctcatctatatcgtctgtctcatcaacatcttctgttgtagctccttcggtgtgactgatctcatcagttggcggactgcccttgaaataaagatcttcaagtgcaggcttgaagtcaatgttcctgccctcgagaatcctagtagcatcaatgcaggggagaagaatgttggcaattctaatcgatgaatgctcgaacctatagcggtgaaagtcgccagccatgtcaaactccaagaactcacatctgcgcaaatgatccaagtccatcatcctcggtgctaaccctggttccttgagcgatactccacaagcttcgagaattggcgtcacaacgccacccacgcatagtgctcctctcaccttcttcttcccgttcgtcaacgcccacttcctgtatccacacagatggatcaatagaggcattagtggtggtgcgttgttgagatcgcctctcaagacattcttccccttcgtccgacggagaatccctataagcgcataatctatcatctccatgttcgtgttagacacggtgcctgtagactccttggagtaaaagacgttggcaaccgattgctgaaagtagcggatcacaggactccagatttggttgctcttgtaccgcgccgagtttagcggtagattgttgcctatagtggcccacaaatccttaagctcctctctgtcaaatctgggtttggttccctttccactagggaaaccaaacagttcttccaacttcttgatcgaaagctgataccgctgttcatccactaagaatgtcaagaagcctaaccccatggtatccagctcaaagtctgttagtgcctcatacatctccacctgcagcgtggaaagaaactcgattgtctcctccttataggcaggataaggataagacatgagtgtctccaggtgacacttctcgaacagatactgcacgtcctccagtaacctcagctgggctaaagtctcatagcacgaataccgcgttccccagaaatcatttatctcaaagaacctgatatactcctccactgtaacctcgtcaggtttgttcagcagcttcgtctcctttcgccatgactctggctcatactcagtttcgatatcctcatcaatcagctcatatctacttgacatcgccctctttcctctggcgatttcagctcttctctgattatgtcgggctgtagagcgttcgaattcatccctgaagctctggtaaacatgttgctctcttggtctagcggaccaggactcaacttcatccacattgtaatcagggtccatagaagattctccactgtagttgctcatgatgagacctgaaaacaaacaaaactcaaagataaacgttaatacgttagtaacagcaaaaccaaaaacacaaaccacacaaaccaaaaacaggtcgagtaaaccggtcgagtataccaaaaccggttttgatttatttatttttttcgttttgtggattgttgatcgagtggttttggacggccgagtgaagggatggagcttgagaggttaaaacgactaggctattaaggagctgtggccgagtgaatcgaacggcgaggttgagctgcttcctttgagaaagagcaggaggtcgagtagttgttgatggtgtgtagacgcgatcgagtgacaaagagatggagagatggtgtggcttggcgaagtcgagtgactgtgaaaggcaggagaggagcggtcgagtgaagttgagctcgcggaagagaagaaaaaggcggtgatggctggacttgagagaagtgaggagtcttgggcggagatgttgagtgaatgtattggagagtgagcaggcggtgaggagcggcgaggtgaagtgatacggcgaggtcgagtaacagctgggagatggcgatttgagctatgtagccgagtaaatgagagagcgggcggtggtcgagtaagagttgcggggtagagagatggtggatttttgtgtcttttggatgctagagtgggaagaagaagtcgagtatatgaagagagaagatgatggggtcgagtttattgagttatggaggagaaaacaaggtcgagtggtggtggattaaagatgatggcgttgaagtcgagtgatggggagaagaagaggatggatttcgttatcaccttgtagggagcgtgggagacatggctgcagcagtgggtccctcctctgtctctttgttataaatcattactctatcttgactaggaaaatctcaggaaatcccgaaatctgttgtagacttgatgaactctgataatactctgtagctcctgttggtcgagtaaggtgatgatttaaaatttttgggttttaaacatcactcgaccaatgtactagatctctaggccatctgtagagtaagagttttgaatttttactctaccttcacgttattcctctattcctgtgaaccacaaacacaactaaaacatatcaaagataacaagaaagtaaaaattatttacaaggatagtcatgggacttcctcccaagtgagcttgttttaactctctagcttgactcctcacacttatcaagaagaaaatgaactatagagaagatctgcataatcctctctgatatcatcatcatactcagcgttctccctggagaagtttgcagcagaatactcaattcccttctcttcaaaatatgcttctttctcttctagagggtaatctatctcttcagaccatcttgaagtgaacttctttctcgggatggtgtcaatcctgcctttaggttgagcttctttctacaactgattcagcttacttctacgttcctcaacagtgtgggctagcttctctatagtttcatcttgcttatcatacctctttttaaattctttcactctttcagtctcatattcttctcttgagatcactctatcatttccagaggttcttccatcttctgttgacccttgtggagttctgttgatgttaaactgcaacttgatgtgctttccaaggttgagacctattttcccttccttgacatctatcactgctcccactgaagctaagaagggtcttcccagtattaagggatccttatgctctacttccatatccagcaccacgaagtctgtaggcacttctactccattaatcatgactggtaggtctttcaacatgccgaagtgttttctagaagacctatctgcaaggatcaaagtcaggtcacaaggtttatactgaatgaactctaaccttcttgccatagagagtggcatcaagttgacagaggctccgagatcgcacagacaatcgctgaaagcaaattccccaatggaacatggtagagtgaaagatccaggatcttctaacttctcttgaacaatcctcttatcagcagctcgagatggagtggcatcactttcatcatctgaatcgtgatacatcttgatcctttccagtatcaaatttctcacaactttgtgaggatcaagaatcaggttgagaacttccatcagtggcatcactgcttcaatctcgtccagctgcttcgctgcaacagacttgtatctctccatccacgctttcctgaatgtccacggaagagcacgtaagggtagtggagtaggtttgaatcgttttaccattctctcgattatggcggccttctcttccgaggtggattgagtgagatggcgagaaccagcagaatggttgaattcaacaacagaggcttcaacctgagtagaagcctccccttcttgaacatcattgtccctagtgattaaatcaaggacatgtcgagttggcagctctcgatcatggcagatagtgatggcgtgagcagttgcatactcctttggattctgtatggactttcctggaagtcttgtgacttttggtgaaaaggtagatgctgattgtccttccaaatatctgactttggtattcaatgcctccactttggcattcaggtcattgtagctgcagtccaacttatggtgtaattcagataacttcttagcaatttccattgagctagatgcttgtccttgtagcagctgttttaccatctgtttcattttggcatcaggagcagcatgacattggttttgctgagttacaaacccaggtggtggtggcggctggtagttcccctggaattgctgcttaggaacgaaaccttgattgtagagaacaaaaggtttgttctgaccttgtttttgctgtggaagatacacctgatcctgaggattagcaacgttggtgctacggtaggagaggttgaggttgttggtttttgaagttgttataccctttgtagccactctggttgttgttgatgtagctgacttcttccaactggttaccctccccatcttggacttgatactgctcgtcatcaacaaggaagtgcacatgcttctgctggctaagaagaatcctgtccagcttgtcattcagggctttgatctccttcctgtgtttgtcatcagagtcagctgttcctctgacggtcctatcacagtcctcgttgtaattgccatctgattgagcgaggttctcaaccaattcccagccttcttcaacatccttgttctggaaattcccattgctggcagtatccagaagcattctgatgcgcggtaggactcctctgtaaagagtgctgagcagagaggctttagtaaagctatgatgagggcattggttggtgtaacccttgaaacgctcccatgcttcacagaagctttcaccagtcttctgtgagaaaccataaatctcatttctgagtcttgcagttctggcattggagaagaactttgatagaaaagccttcttgtaatcatcccacgtggtgattgagtcatgggacagattcttctcccagatgtgtgctttgtcgcccaaggagaatggaaacaaacggagcttgaatccgtcttcactgacaccattgatctttgtcaggttgcagagcctatcgaattcatctaggtggtcgagtggatcctccattggcagaccatggaatttgttcccttgaatcatcgagatgagaccgctcttaatctcgaagttgttgttctggatagcaggaggtgcaattcctttcctctgacggtgatcacgtggtgcatctccagcaccaatgttggcagggccattttgttgattctgttcttcagccatttcgagtggttgctgaggtacaaggttgactgtgtttctcctttctctgagtttgcgagctatgcggtcgatgtttttgttgaaaaggaggttctgattgcctgttgatcgagttcgcatacagtagaggtgtacctggatcaagaagacaacaagaaaaacacacagttagtaaccgaaaagaaaattgaaaaagagcttgatctaagcaagtctgaaatctcaaatgtaacaaacaaacacccaattggcaacggcgccaaattaataataggtttttattcaattaaaactaaagcactatcatgtcgttgtagtactgaaggttgtcaatccaaatgggtgtgatgctaacaatcaagatgtgatcagaagttactaagtcaagccaagcaataacaggttttggtgtgttctagcaatcccaagtgaacatgcagaaagcagaaaattaaacagaaacagtaaaacactcgaccaacacagctctttgcagagcactgggtgaggtcgagtgaaaggtcgagtaacagacagaaaataaaacacagatactcgactgcacagtctgttgccagacaactgggtggtcgagtatgaggtcgagtaaccagaaagaattacaaaaattaagcgacagataacaagatgcagtaaacaacagtagagcaaacaaagaattcaatcagataaagaattcccaaggatggggtaattgagtagtttcgtttcctcagtttacaggtgattgacatgctcaataaattaaccctagacaacaagttcattaaccaaatctaagtgccaccgcaaccgagactatcaagttaacctagtcccagactcaatcaccattgacgagagctaacctaacaagcattacgaatcaacaagttaaagccaaaacgctccctgcaaccaataccttggtgcagggtcacgaatctctggaattagtggttcagaaatttcatcgaacactttttgggtgcggaaatgtctgggctcaaattcgagttgatcagaaagcaataggcattaagaacaactaatcgagaagggatctatcaatcaatactcaatcacctagcatactgagaattctacactactctaacccatcctcagaaacctattcactactcagacatcataacagaaagcattaacgttgaacaagttgaaaacatgataacaacagtgtaacagcaggatgataagagaatgaacaacagtaaatgaaatcaagaacaaaagctgaatactgaatactgaattgattaagagaaatccggattacaaaaggtatagaacacaaggtctgcggaataaaactagataaaaactttgctgcgaaaatgtgaagtacatgctacttatagccaaatattccgaaaccctaatacttaaaacgacgaagtattaggacggattaagaactgtactcgacccatgtggtcgagtgggaggtcgagtgaatagctggagtcttcttttcttccttgtgctcgagtgtctggttgagtgcggaatgaagaaggctttgaagcttgtcatcgagtatgcagtcgagtggtggtgatggtgatactcgacttccaggtagagtgatgaggtcgagtagtggtctggcaataaaggtgaagacactcggcctcggggtcgagtgatgtgatcgagtgatggtcaggtgatgggatgaagacactcgacctcggggtcgactgatgtggtgaagtagtgatgtcctctactcgaccagggggtcgagttatctgttaagatcttgaagctcctactcgacctcgtggtcgagtggtttgacatgatcaggcccgcatcttccagatagctcgtcaacagctccaaatcacctgaaatcaacgcaaatatgcaacatgcatacaaatctatcctaaacatgtaaagtgataacaaatgatgagattgtataaaacagtgatgatatgatgttaaagtgatgacaaacggatgctcaaaacatgcaaaatacacacttatcaaacatatttagtaggagtatcataaaaaatctctgataataaacaaatattataaataatactaaaaaatacttatgatactatatgagtatcccccatacatgctcttaggctcgggtacccaatccattgtaagtgttatattttttattgaataaagaagattttctttaaaagccttgtttacttctgatattagtcttgtatggactaacacaacttacggacctggtatgggttgaaaagccttaggtcgtgttcgtaaggaacgatattcgcggatgagctgactttggtaactgatgtgttttgagaactcggtcggatcgtctacagacgtcgcaagtaacacttccggattcgttcttagtcctagaacggttcgggggcgttacagatagttctgatatttttttgttggacatttgttggaatttaccgtgaagtttctaacgaattgttccaacctatattttgttggaatgtcattgataatttgccacaaatattcaacaattctgaaggtttgtttatgggaaactactaataacatatttgttgcaactttgttaaaaaatatttttggaaacgtgtgagaaattaccgacgccttatttgttggaacttcatagaaatttcatgataatttaattgttgaaaatttattgatattttttcttgtaaatttgtgaaaaatttctgatgatttagttgttagaattttatcataaattaagcgttgaaaatatgttgatatctacttaacatttttgaagtacattttaaggaatccaattgggtcggattttttatttgattttgacccgcaaatcttcaattagatcttccataattggttttattaccattttctacaaaaacaaataactaaaaacgaaattaatttaattaccaaatttaatatatataatatctctaaactaaccatatttgttatttaccttaactaattttctaaaacattttttatctaatttaaacataactatataattcttctttcaaatttatttgatcttatatttaatttattttgaatttatatcaaatattaatagttattaaaatattatatttttctgtatatgatgtaattcaaattttttaaaatagacatatattttcaatcgatgaagaaataatttgtgtacaatgaagaaataatatttttacatttaagttttttttcgtaatataccatcctatgttattatccacccaaacccgtcccacaatataacctcatcccgtgaaattaaacataattttgtcatttatatatatatttaaaatatttataaaatttgaaacatcaaaataaatttaatatcgatatgaatattgttttatggaatttttaaactattacaattaaacatataatttatagaattttttaaaaataatctacagattctataatgaatatgtaaacgatattatactttacagatctttttgtaacttcaccttaattatgatagaccttgcaaatcaataaaggcaacaaaaatagacactaaaaaaatctcaacaataaatctaaacaataaatatatatatatatatatatatatatatatataactatatatatatatatagttgaacaggttttctaaaatatatgtttatacaaaattatatgtttataaaaaatcacataaatatcttcgggattcaaattttaataattagttgaacaggttttctaaaatatatcaaaaccaaatatattgaagataaaatatacaaataagaaatatattaatttaacaaaatattaaaaaagaaatcgtgttattttttgttcaaagaattcaatataaaatcttcaaaacgatccgatattgattcttactaggatttaacccgcggtttaccgcatgcaatcgtattatttggttcttatactaaatattttataaatttgatatcctatacttataaatatatttttttgaatcaaacataactaaataattattgggatttttgttttggttgttatttagtgttaagaagaatgtgttaaaaaatgtgtattaattagttatgtgtctgtaattttagtgaaagtaaagtatttacaaaaatgtaagattcacaaaattggtgtaatattttttatgattataagtgtttttttttaaactatttgacaggttatacacttttttggcaaaaaaagaccatatgaatattgtaacaatcttgtaaagaaagcataaaatctttaggaatggtttaaattttaatgattggttaaatttagattaatactgaatattgtgtagatagttatgaatagattagattgaagagaataagtttagttggtgatgaagactcgatttgtcgattttgtaaaccatttgtggaatatgcttttgtttgtcgaatatgcttataattaagtgaataagtttgtggattttctagtgattagtgaagaatcgtaatatatgatttggatattattgattattgatttcgtgattgaatatagtgtttttagggatggaatgtgatcatatattgatttgaaaaacgacatagattctttatttttgttgaacggtttagattgaagggaattaattttattgaacggtttagattgaatcggatcatatacagtttaggagattgttaagaccaaattatcctaaatgattttgaatagcgagaaaaaattccaaaattgaaatcaaaattgaggccaaattagaccaaatttcaatttgtacttcctttttaataataaagggattagattgaaattgttaaaatttcaatatagtatacaatttttcagattagattaaaattgtaaattgagtagaagtatcttaaataaaaatattattaaaaagaaaaagaacaatttgatttttagttatcacatgacggatttatatggcgagatgggtttagaggagacgagtttacatggtaggacgagtttggatgagacgagtttatttggtgctatgagtttagatgggacaaatttggataccacggtgtactcctagaattaacaattaaattacaactatataatactaaagaaaacaaacaataataacataataaatacaattttacttttaaaattttagttccaaaaaatacataaattcaacattatagtaaagtgttaatcttctttgacacctctaaatgttattcttctttgacacatttaaatgtgtaattttaatacaaagttactaaattacatatgttccacagaaaaatttgaaaataccaagagtttaaattatttaactttttaagaaacaaattatgaataaaaataaaatattatcccgtggcacggtctatcacaagtcaaatcctagaagataaaataacacatattcgacttactaatatcataattatgactcaatcaaaagcgtatacaaccttatcgatagttattaatcaacacaaacaacaacaaacaacaaattctattttatgatagagaaaaagaaataaaatatttaatccgcggtataccgtgggacatatcctagtattctaataagtttccaacaaaatgtctcatgaaccatttatcaactttttgttggaatatatttttaggtaattttaaatgaaaatattataaaaatatgaaataaataaattataaataagaaaaataaaaataaataataaaaataaaaatcataataaataaacattttaaaatctcaaaacacttaaacatccaaacataatattgaaaataatcctaaatgcttaaagttttaatgaaaccaaattactaattgaattcaaagacaaccattggtgttcattgttgttctcatggaaggtggaacttcatttgcaaacttgttctgcatcatagtaatccaaaaatcaacatctttaaacttcagcagcattccctcaatttcttggtccgatttctggagcttttcttgagtctcaagatacatttcttcataatttggagatgcatcaacagtaggatcagctaccagaattgaaccatagccaaatttcttgcctttcttcacttgaacttcctggcatttcaaaattgcatgttacaattcatataagaaaaaagtattataaacataaagtatggttaaaaaaacacacatgaagtataattgaaaaaataatagaagtttcagcattttgtgtaagacgcaaaagacagactatgacacgacaaacgactaaaaactaagggacttaaaacaccaaaaacgcaacatatcaacggttagtgtccaaagtgtcaccatcgtcactgtctctttgactgagaatttggtgctccatgtttcgacattttttggcgataaactagcttttttgcacataaaaaagacactcaaaccttcttgaaatgcaatgcaagatccttcgagcagttccatccatcaaactgaaaactgggagttattccagcactatgctacataatccaagggagtgacctaattagagaggaaaatctaaagatcaaactcaagtctgattgagaaatcaaacaaattttaaattcaataaggattattgaacatcagtctatgctacacttaaattcttgacgttcaacaccgacctaattcttctatgttcaaccattctataagctattcaaacttgtgtaagttaaatcaacaacatatatctaaattcctccagcaatttgaaatgcaatcagtttcaagtcagcaactggcaaaacggtgaaaacaacgaaacacgatttcaacgccgatgaagaggcaaaaacagaacatacttgacaaaaaccttaagaacacaacaaaaacccaccgaaatcagaaagtcacaccagtaaatcgcagatctaaaccaaacccgacaacatgctttactcacaataacaatcccttaaagtagagagtaaaaatcagcaattagctcagctaaaagatcccaaactcactttaacaaatcaaagcttaacggtgtctgattaataaacgaaggtcttcgtactcgatttaaagaatcataccctgaaatagatgtcgaggcaccatcaccaccaagaacatctacaatggaaacagaaaacgaaccaatggctattgagtcaattacagcttagttcaattcaaacctaatctcgacagctctgttgtgcggcatcgcaaaacccgacaggtaagcttaaaaaaaacagagacccaaccaaaacagtgaaagcaaatcgtagatggaactaatatctcagaacgacaaaaaactatgtcttcaaacaactcacaagcataaaaacattgttcacgagaaacagagagctattccaaacataagaccaccactaaaaataaccgaagtaaattaaaaaaacatagttctactcatgatcatcagaatctgatgagtcgcttgaccgacttgaattgtcagaatcttcaaattcctctgcattgtcatcaccacctacactcacatcatcaagatttgtgagattttcaacatccaccaatatagtgtttttagggatggaatatgatcatattttgatttaaaaaacgacatagattctttatttttgttgaacggtttagattgaagggaattaattttattgaacggtttagattgaatcggatcatataaagtttaggagattgttaagaccaaattactcttaatgattttgaatagtgaagaacaaaatccaaaattgaaatcaaaattgaggccaaattagacaaaattttaatttgtacttcctttttaataataaagggattagattgaaattgttaaaatttcaatatagtatacaatttttctgattagattgaaattgtaaattgactagaagtatcttaaataaaaatattattaaaaagaaaaagaacaatttgatttttagttatcacatgacggatttatatggcgagatgggtttagaggagacgagtttacatggtaggacgagtttggatgagacgagtttatatggtgctatgagtttagataggacaaatttggataccacagtgtactcctaaaattaacaatcgaattacaactatataatactaaagaaaacaaacaataataacataataaatacaattttacttttaaaattttagttacaaaaaatacataaaatcaacattatagtaaagtgttaatcttctttgacacctctaaatgttattcttctttgacacatttaaatgtgtaattttaatacaaagttactaaattacatatgttccacggtaaaatttgaaaacaccaagagtttaaattatttaacttttaaaaaaacaaattatgaataaaaaataaaatattatcccgtggcacggtctaccacaagtcaaatcttagaagataaaataacacatattcgacttactaatatcataattatgactcaataaaaagcgtatacaatcttatcgatagttattacacaaacaacaacaaacgacaaattctattttgtgataaagaaaaagaaataaaatatttaacccgcggtatatcgtgggacatatcctagtattctagtaagtttctaacaaaatgtctcatgaaccatttatcaactttttgttggaataaatttttaggtaattttaaatgaaaatattataaaaatatgaaataaataaattataaataagaaaaataaaaatcataataaataaacattttaaaatctcaaaacacttaaacattcaaacagaatattgaaaacaatcctaaatgcttacagttttaatgaaaccaaattactaattgaattcaaagacaaccattggtgtacattgttgttctcatggaaggtggaacttcatttgcaaacttgttctgcatcatagtaatccaaaaatcaacagcattccctcaatcacttgatccgatttctggagcttttcttgagtcttaagatacatttcttcataatttggagatgcatcaacagtaggatcagctaccagaattgaaccatagccaaatttcttgcctttcttcacttgaacttcctggaatttcaaaattgcatgttacaattcatataagaaaaaagtattataaacataaagtatggttacaaaaaaacacataagtataattaaaaaataatagaagtttcagcattttgtgtaagacgcaaaagacagactatgacacgacaaacgactaaaaactaagggacttaaaacaccaaaaacgcaacatatcaacggttagtgtccaaagtgtcaccatcgtcattgtctctttgactgagaatttggtgctccatgtttcgacattttttggcgatcaactagcttttttgcacataaaaaagacactcaaaccttcttgaaatgcaatgcaagatccttcaagcagttccatccatcaaactgaaaactgggagttattccagcactatgctacataattcaagggagtgacctaattagagaggaaaatctaaagatcaacctcaagtctgattgagaaatcaaacaaagtttaaattcaataaggattattgaacatcagtctatgctacacttaaattcttgacgttcaacaccgacctaattcttctatgttcaacaattctataagctattcaaacttgtgtaagttaaatcaacaacatatatctaaatcctccagcaatttgaaatgcaatcagtttcaagtcaggaactgacaaaacggtgaaaacaacgaaacacgatttcaacgccgatgaagaggcaaaaacagaacatacttgacaaaaatcttaagaacacaacaaaaacccacagaaataagaaagtcacaccagtaaatctcatatcgaaaccaatcccgacaacatgctttactcacaataacaatcccttaaagtagagagtaaaaatcagcaattagcttagctaaaagatcccaaactcactttaacaaatcaaagttaacggtgtctgattaataaacgaaggccttcgtactcgatttaaacaatcataccctgaaatagatgtcgaggcaccatcaccaccaagaacttcttcaatggaaacagaaaacaaaccaatggctattgagtcaattacagcttagttcaattcaaacctaatctcgacggctctgttgtgcggcatcgcaaaacccgacaagtaagcttataaaaaaatagagacccaaccaaaacaatgaaagcaaatcatagatggaactaatatctcagaacgacaaaaaaactatgtcttcaaacaactcacaagcataaaaacattgttcacgagaaacatagagctaatccaaacataagaccaccacaaaaaaataacccaagtaaattaaaaaaacatagttctactcatgatcatcagaatctgatgagtcgcttgaccgacttgatttgtcagaatcttcaaattcctctgcattgtcatcaccacctacactcacatcatcaagatttgtgagattttcaacatccatcaatatagtgttttcaagagagtgttaaaccaccctaacatagtctacatagttttgttgcatcggatcgtggtccttcactccatctactcttcttcttggattaatatgtgtagctgtgatccacgaatcatggatgcgtttaactctaagatatggaatatagcacacttgatcgacttgggatgcaagaacaaatggatcatacttattcagttttttcgaagagttaatctctgtaacgccaaatttagtaaatcgaacaccacgttcccttgtaggatcataacactgacacttgaaaagcacacattttatgagtctaggatattcgacatctaaaatgtcttctatcacaccatagtattcttcatccattgtacgcacaacaattccatggttgacggtctgtctattgtttgaggcagtccttctcttaactacatatccacgagtacaatatattggcgatgaactcgtctcagaaagtgatcctcctactaactctcgaagtcacgttggaattggctcacccaaagaagacccggatttaacctgcaaatatgaattaacagtttagcaacttagaacaatccaataaaaaataaaacaggaagatttcaactcacatagtattttagccacttcggaaattcttcttctttcatgatttctatttcgttatcacttttctgcggatgtgagatcttgatattttggacatacacaaaccacaaaaaaatctgctcaaaaaaaaaaatatatagagaattaaaatacctctcatatggtaatacttctttgcagttacgaagtatatagttatgtacatggttgtattcttcatctgtcaaccaaaccgactgttgttttccgctaaaccgcccaacttctgtaaatatttttgggatatcggtgtggtaagaaggtttcttcccgccatcatcatagcggtctggttttctagcttttgtttgaacattaggtgaaaagtagtacaaagaaaaatatgaattctcttcatttatactctgcgccacgatagaaccctcgaccttgctcagatttttcactttattttttagatggaacatgaacctttcaaatggatacatccacttaaactgaacaggtccacctagcgctacttcccaaggaagatgaaccggaagatgttttataacatcaaaaaacgatggtggaatattttttctaaattgcataagattaaaggaatgttcttatctagaagagctatgccatcgactgtgagggatcttaaagaaaggtctctgaaaaatgtacttatccctgcagtaattttatatatttattagtaaacctgtaaatatgttttcggaatatataaaagtaaaataataattaaagtaactgtacataccagctattgcttgatgaacatttttgggtaaaagttcagcaaatgcgaaaggaagcaaacgttgcataaaaacatggtaatcatgactcttcattcgtgacagtttgccgttgttattatctatgcaatgcgagagactagatgcataaccatcaagaaattaacactattgattatccaatcaaatagtgcttttttccctttgcatctaatttgaagattggaattggaccttttccattgtccataacatatagctcaggacgctcgcatatatcacgaaggcgagtcaggacactattgataacatcggaggcgagtcatcactcaccattttgctttttctgaacacattcctacttcgcctatatggatgattctttggtaagagccatcgatgacaatcaaaccaacaagatttgttttcatgctaagctgaaattcatctgtagtatcctaacagtagggacacgatagccttccatgtgttatccacctagataacatttcatatgctggaaaatcactaatcgtccacatcagagcagcacacatcacgaaattgttccttagagaaacatcatatgcaactacaccctcggaccacaatatttgtaactcatgaattaacggttataagaatacatcaagtgatcgcctaggatgttcaggtccatgaacaagaatgcttaggaacaaaaattctcgtttcatacatagagaatgcaggaagattatagggtgttaagattaccggccagagtgagtatttgcgtcaagactttccgaatggattaaaaccattcgtgcataatcccaaatacacgttcctatgctcatttgcaaagtctttatacatcgaattgaaatgttttcatgcttcagcataagaaggatgcaaaatattcccttccgttgaatgttctgcatgccatatcataggacctgccgtgcgttcagattggtataacctcttcaacctatctgttattggcaaataccacatacgcttgaaagatactcgacttttttcatttgtaacctgaaatcttggcttctgacaaaatgtacaggcatccagatttgcggtatctctccaaaatatcatgtagttatcaacacacacatctatcatctggaaggataacccaagtgaagataccaatttttgtattttatagtaagtaccaggtgccaagtttggttcaggcagtaaatccttcacgaaatcagctattgcgtcaacacaatcttccaacaaattatactctgtttttatattcatcttccttgttgcagcttgtaaacgagagtgactctctttacagccatcataaatcggtttcttcgctgcatctaacatatcaaaaaacttttttgcttgtaagtttggttcttcaattccactttcagtcgtttcgcgaaacgcatatgttaccatatgtattacactggttggatctctagttatattctcttcctcttcattactattattatctccaagttccaacccatgattttcatcatcttcattactatttgttaaagtttcaaaatctttcccatgagaaaactacatgtaatatccaggcgtaaatcctctactataagtgctttcaaatagaatctactcgaaattttttctcattaccacaagtagaacaaggacaatacatcttattttgttaattctccagtaccttcatctatataattatacatctactcacgatttttgttttttggtcctatcattgaaaacagttttcaattttttttcagatgtaaatcttcacagaaaaaaaaggagaagaagaatcatatttaacttaaatttttttattttatttttttattttctcttatttcttttaattttcgtttttattttttgtccatttttgcaacaaatattttgtcattaacttgttagaaataaatttccataaaaaattagtttctaacaaatattttgttaataatttccaataatttaataattattgctaatttgcaacaatatcatatttgtaggaaaattctaacaattttcgtacgatgtttgtgacaaatttatcataaccaaatttttttagaaatttgcaataaatattcaataaaaaagtatttgttgcaaatttataggatatcggttataatattttaacaaaatacgattattggaaggatttattggaatatcacatattttcttgtagtgattatttgtttttttattcgtacatggaaagctctgttgattagtaggttgataggaaaaacgaaagtattcacaaactaaaaagaaaatacctaggaaattgccaaaatgaccatgaaacaattatgttttctgaacaccaaaattacaatgagaaacttgcaatatattatgaagccaaagaacagctaaagtaaaacaaatgttgagacaataaaatttattacataaatccattttttgttggttttcttgtgattttacattaacctttttctctatttttgtcattaaaagtttaaaactcataacatatttaatcaaaagaaaactaattacatatacataattgttaaaaactgtaacgcaaatatatttaatactattttattttctagaagatgaaagacttaaagagagaataatttgctttttcttatgcttcttatttctcttcgcacaatacaacatatatatatataagatcaataacttggtgatcaagttattaattgataagggataagataaactttacttttattggggacaaagttaatgagacgtggagagagttatgatggataattatccatattttcaacactcccccttaattatccctcattttttatgaagtacgcactgcttcgttaacccattgggataaaaatcatgacaatggaaaaagagtacagtgacgtgaactctccctcgaaaagacttcacaagtctcgtaagtgacgcattccaatactttgaacatgctttctaaatgtagaagttggaagcgcgtttgtgaatatatctgttgcattgtcacttgaacgaatgtattgaacgtcgacttccttattcttctcgagttcttgagtgtaggagaagaatcgtggaggtatatgtttcgctttgtcactcttgatatatccttctttgatttgagcaacacatgcaacattatcttcatatattcttgttggctctcttttgatgactaatccgcttgcttcttgaatatggttagtcatggatctaaaccaaacacattctctacatgcttcaggaagagcaattatttctgcgtagtttgatgaagtggcgactatagtctgcttttgagaacgccacgagattgcagttcctccaatggtaaaaacatatctgttttgtgatctagacttatgaaggtccgatagataccctgcatctgcaaaactaaccagaccaaactcggattttctaggataatataatcctaaatcaatagtacctcgaagataacggaagatgtgttttatctcattccaatgccttcgagtaggggatgaattgtaccttgcaagcaaattagtagcaaaagcaatatctggtcttatacaatttgcaagatacataagtcgcaccgatggaactcatataaggtacttcgggaccaagaaaatcttcgttatcctcacaaggtctaaatggatcgttttcaacatttaacgatctattgaccattggagtacttacaggattcgctttatccatatcaaagcgctttaaaatatttattgtataattggattgatgcacaaatataccgtcttggaaatgcttaatttgtagcccaagacaaaattttgtctttccaagatcattcattttgaacttttctttcatatgagttcgtgcatcatcaatcttctttggagttccaaatatatttaggcatcaacataaacaacaatgatcacagtttccgaagcgtattttttaatgaaaacgcaagggcagatttcattattcacataccttttcttaagtagataatcacttaaacgattataccacatgcatccggattgtttcaatccgtaaagtaattgatgtattttgaccgcatatatatccttagactttgatgagtctaatgcctcaagaatttaatccttccgggattttcatatatatatatatatatcattatcaagagatccatataaataagatgtcactacatccataaggtacatatctaaattattagattctgaaaggctcattaattacgagaatgtaattgcatccatgaccggagaatatgtttcttcataatcaactccttgtcttggataaaaaccttttgcaacaagccggactttatatcgtgtgatcccatctttcttatttattttctgcacgaatacccacttgtgcccaacaggttttactttcttagaatgatgatccatatccaaacacattagatgcagtgacaataggtccaaaaacatttcttttattaagggagtgcaactcaacttgcatggcattttctcatttctcccagtcgggccgtttctggcactcggataatgtgtttggatatggatcatcattctcatgatcgatctctttagataaagaaaagaagaatattctattttcatcatcaatatcatctctatcccatatgattccatcatgggcatagttaatggaaatctcatacttttcttcatcgtcccgaggacttggttcttcttgaagaaccttttcattttcttctcccattttttttttccgggaatttttatattttgaaccaatgggcctcccacgctttaattgaaccttaggttcattaattttgcttccatctaattccagctctctaggaatttcaactcttgatggggcatttgtagtggagatatatgactttgccaccttttttgtatcggggaacgaatttggtaattgattttccatattttgtagatgtacactcttttctacttccagctcacgttgcttcgtggggggatcaagatattttaatgatggtgcgcaccattgtatatctttatgcatatgcatttgatgaattcctccccctaaaagtgagaattcatcttcattaaaatggcaatcggcaaaacgtgccgtaaacaaatcatcagtttgtggttcaagataccttattatactcggtgatacataaccgacatatatctccaatctcctttggggccccatttttgttctctgtggcggtgctctaggcacatataccgcacattcaaaaatacggagatgggataagtttggtacttgaccataagtcatttgtaaaggggattattcattatctgcgtttggtctaatctgaaccaaagccgaagcatgcaatatagcatgaccctatatagaaattgggagttttgttctcaatattaacggtcttgcaatgagttgcaaccgtttaattaaagatttggccatgccattttgtgtatgaacatgagggaccggatgctctacatcgattcccatcgatacaaaatagtcattaaaggcttgtgaagtaaattctccaacattatcaagcctgactttttttatggcataatcagaaaattgtgcctttaacatgattatttgggcaatgaatcttgcgaaagccgtgtttcgtgtagtcaaaagacatacatgtgaccatatctagtagatacgtcaattaataccataaaatattgaaacggcgcgcacggtgggtggattggcccacatatatcaccatgaattctcgacaagaatttaggtctttcattcccaattttggttggcgatagccttattatgagttttccttgagaacatgttttacacatgaaaactctccagatttaaatattttcttttttttcaatggatggccattagaattttgcacagttttttgcatcatgactgaaccaggatgtccaagtctttcatgcgatatcttaaatgtactagtaaactcacacgagtgattgtcactcgagttgactgtaacatttgatgcgattatatttatatttgtggcaatataatccggaggatagcattggcaattcttctaatatatattgcctctcggattttgtgcaaagatattcaatgccatttttattcatagtctctagatgatatctataacctcggatatctttgaaacttatcaagtttctatgagacttaggagaatataatgcatcatttactttaaaatgagttccccttggtattgtaaaattgggttcaccaaaacctaatattatctttacatggccatttatagtactcacacttctagcggagtcatttatttcgacagataaaaaatactttttatctttaaagatagtgtgcgtagaagcactgtccgccagacatctatcttcatcctcagtttcgtagtttgacattttctgggataaaatatttattcattaaaactttgacatagacttatttatatgtcatcatatattacaataaaacattattacagaaaataagagcatctataatgtttgtcatatataacatgattatacatatagctataatatattacattaatattctcgttgtcatgattaatggagaaaatatgccatatcaagatgactatcatcatcttggcttttaaaggaaggtcctggctgaaataatccgtcctgtttttttttttttcaaacataattaaatattctcataaatatttaataaaaccaaccaataaagcaacatttaaaccgcaagtcaaaaatactattttatgaataaataaataattcaaccgacaaaactaagtatgactaacaatcctaacacaaccctaaccgaattccaataaccaaaacactaaaaataaatcaaacgagttcctaaatcatcctcttttccttgccaatattccacgatcatactttatttttacttgtaccaaaaggaaagagatgcgtaagtattatcacaaatacttaatgaggcgatcctcccatctacgagctatacacaaaatcaaataaaagggtataatcacaaatacaacataaacgaaccagtcattgaacaattcacccaaaaacacattcaccacacctacatatcatcacacaaaacaaatcatacaacccaattgctcagataagctcatggtcaagcactcaccttaacaaattgattgtaacaacaattaaacccaggagagactctccttgcgtttgaaacagtccagaaaagtcctacaacaagtcacacaaccaaaagcaaacttaaagcaaacttaaagcaaaatcaaaaataaacagtctcaaagacaaaaccctaaaacaaaaatcaaccgttaactatcaaatccatccggtgaaacgctagcgtttgacgccacgaagcttcccaaacaatctcgtgccgataggaagccagatgagaccacgatctcagttacaatctccgttggtcctaattcgtgtctcagaaaacgtgtctcacgaaactacgaataactcaacgaatttaaatccaaaagtattttttgtaaaatggagaatgaagataaaagacttgaaaataactctaccaaattttgttacctttgacaatgatttgatatgacgaaactatttcctcccaaaccctaacgattctggtccttctccttccctctgttttcctcctttacaaaacgaaaagtggctaactataaccctaatttcgagtttccttcttttatatgcacactccagggttttcattaacccaaccgattaaaccgagcgatttaaatacaaacactaaccgttggccacgacctctcacacgaccacgaccacgacctcgcaaaagtctgggtccttgccaattatcatcaccggatgtagcaacattcacttctaaaattggagctgatccaggtgggagagataaatgattcatcatcacgagctcattattttgctcagcaaccgaaaggacttgcatcaactcagaataacgagtataccctttggcccggaatagttgttgaaagattacatttccaggatgaaaggcggagagcgttttttcaatcatatcatagttgctcactttttcaccacataatatcatcctgggggtgattccgaacatggtggaattataatcaccaacacttttgtaatccaaaaaccggagatttagccattcatgtttatcttttgacaaaattacatatttttgatgatcgaaacgatcttgaagtgattcccatatatccacaggatcttctctcgtgatgtattcattttttgaattatcgtagagatggtggcgtaaaaatactatagctttagctttgctctcatctgatgttgtttcagatgcatctatggtgctaagaagcccatttgatcttagatgcatcttaacatcagatgcccatgtcatctaacttatgccagatacatcaagggcaacgacatcgagcttagctagatttgacatgattatctatataaataaataatcatttaattactaagccatttatggtattttaattaggcatacctattattcgattaaggagaagacatagtcgcatactccaaaaataacatacatataattttatatgaataaataaaaataaatttagtataatttaaatgttacctcaaaagatgcttgaatagacgatcggtcggttaaacaatcacccgaagagacgatcataatgataacgtattaaaaactataacgcaaatatatttaatattattttattctatagaagatgagagatataaagagagaataatttgctttttcttattcttcttatttctcttagcacaatacaacatgttgatcaagtttttaattgataaggataagataaactttacttttcttgggaacaaagctaatgaaacgtggtaaaaaagttatgatggataattatccatattttcaacaataatcacctagttctgtaattttactaccgacacttatataagcatttgggcttgatggcccatcatcttcttctcagcaaattttaatggctggttctggaatcaaaaccttgtggtttaaggaagggagctttttattttatttttagttttggggctaaaggaagggagcaaagcccaagtctattattatgtataaatataatatttaaattttaaataataaataataaaacatttattccttagtgtatctccagaatttgcaattatgacatacatgttgagaagtacgattttggttcttgaattaaattgggtattacttaagttaaactgaattcagattatgttagtatattgatcctagatgtttatgggtttttggagttatctatttagtgtcttttgatattcaatgattcatggtattatgttattttagtttttgtttattgtagaaaatagatataatttatgtgcaagtcatcgtataagttgatggaaaaaaaagcatagtgagtggtcctaaagtagtgggtgaggttaaaatcattgacttcagaatctgcttgaatgagtatatcaggaaggggtaaagatgagtgtatcatctcaacaacaagattttatcactccattatatacctggcttgttgggatcgatatctttctatggagtggatagagtatacaatatgtttagttatatatttcacaacaattcaaccaatgaaaaaaagctaccgaattccaagagtctacaaaaataataaaataaaataaataaaaactgaaagcaacaaataaaagtaaacaatttagtttttcttaaataacatttattaaaaacagagggagtagtaaaattaaattataaatcgctataacttttttcaaaaattacttttattccataacttgttcaagaaatgtttcacatgaaatctactattgcaccgcaggttaaatcatagttcatcgtaatattattgcaaagtaaaaaaacgtatttgcaatcacgccttaaatatgatttcccaacttttttagaaaatattttacattcaaactatcggtcaaaccataatcttctttgtaactatttacaaaagaaaaactaaaaataaagatattctccaaatatactatctactttaccaccattattttgccaacaaaataatttatcaaaagaagtagtccacaagctttagcccacaaaggaaattaggttcataaatatattcttagcaagagaatctgctagcccattagagaattaacatttttagtgtaacgctatgaccgttggataccagtgggccccatgtcttctttcgagcccatgggcccactcttgtccaacggtcggtacgctacgtctggaagactttaaaaacttgttaccggccctacaaatcaccacatgatcttttgccatgttttgtcctcactcgcatagttcctacaatcatttctcggaagatcacacatcctgaaaccactacaaaaaaagtcttcatcgttagcacaaaccatctgctatcgtatgtaatacacagcgaattcacaaatgctatgtttgcggcagctatagtaggtgtcacccctttgacaacatcgttttgtacgctatggtatatgttgttacgatatcaacgatataacgccattatagagttttgatatagcactttaatttctcgttataaattactaagctttctaatttcgtgtcataataccctcacctaacaggacaactaattattgctctctaatataagttttgtagctttgtgttttatgctatcatatataatttttttacaatgacatcgaagtattgctatagtaaacagaattagtgcgtttaattatgctgtaatataatctactatagttgaaaacaacaaccaatttttgctataatatccaatctcaaagaactatcttttgtgattaattctaacctgttttgcataacataaacatacaacataacataagtcttaatagttgttatattataaataagtctgattccaatccaagagacaccattcaaaagttaaacataatcatccaaaacaagtttaagcaaagccaaatacataagaacacaagtctgattccaaatttcataatagaagtagattagtctagtcttaacctaatcagaaaactagctaatctggaccatagattgttcactctctgcaataatcaacaatgtctcatatcagttcctgcataaaaccaaagcacaagcatcacaacaatttcaaaacttaccctagattctgcaaagtcagtaggtcaccatcttatcctttggccatgcaattgatgaaccaagtgaatctctcatatactcgatttcatctgatggcctccagactgctgcatcatctacattcactacatctacccaaactctagctgcattctctcccaaacgaacatggtgtaccttttgatctgggtctattgaatgcactcgtcctgcaccaaccacccgcttctttccacttatatccattaccttgcacttatgattagccttcaaaccttcagatgttttttggcggtgacatgttgcattataaaccaggattaaacgcatgtagaaattttattagtcaatatgtcaaaccaaagacaaacttaccggagatctccgtagaggggtttgtgatgctagctgagttttcttcacaggagactttggaactactgttggttgcttctcaccaagagattttgcaattgttcctgcagattctgaacccttggctgcagatacctgaatagaagaattatgacctgactttccttttgttgctccattttgttgcttatcaccaagagatttctctgttgctccattttgttgacttgttgctgctgactttccttttgaggctgatcctgttggataagttgattgagaactctgaagaggagctttctgaactgctgaatctgtggtgttttcataggaaactttgtgggcaggccatgctacaaaagactgtaaacagtcctcaaggtatgtcacatccatcgttggcctccatatgaacgtctcaggttgaagtattacatccacaaatactttcactgcagcaggtccgagaggaagcccattaactaatgcagattggtcttttgtctgccaacgtccttctgcaacaataacgtcattggaagacaaatccagtagtttccacttgtttccataagtgggtcttggtccctgtcaaacacattaaaccaatgtcttagtatgactctgaatatattagtatgactctgaatatataacattttacctgtgcaatgtcttctggattgagcttctcctctaggctaacacacatagcaacaggccaagctatcatctaaccaacaactttctccataatttccatgttaactgcgggtctccaaaggtatgcttctggtacaatcgcagtgtcaatcaatactttaacatttgtaggacctaagcgacttccattgactatctcatccggatcagaagatataatacaaccctcagcaacggttgcatcagtaccagcccaatccatcaagatacacttaggttgtgatccttggtccacactctgtataaggaatcaataggctattatcatctaattatgtaccaagagatcaaaagtatcaaataaaagtgacctactcttgcagctgaggtttcaccaacttcagctgattgtctttgtaccaaaaaaaaaacaaagtcaaatatatgtactaaccgattgattagctttatgtataagtaaacaagtgtttacatggttctttatcttgtcaattacttcttgtaactcattgaccttctgctggagctggtcctgtttctgttgcatttcagccatacatttgctttttacttggaaacaagctagtttggtcttgttcatatttcttcccatcgcccttagtctaccacgattgtcaggccctaagagttggctaagtgaatcttgtgcttcattcgtcccatttgattgaggaccactgctaacaatctcagctgcctttttctgcaaaccatcacacacaatcacaaaccagtccacacaatcactggctaacctattgcctatcacattcatttcaaaaccatcacaaaccagtccaatttatgttccatcactaacctatccaatttaacaaaccatcactaacctaacaatcatcacaaaccaaactgtcacaacttccaaactataacatactcacaattttttcagccgcatttgtattcactggtgttccatctttcttggtccgtgacttaacccaaacctttagcctcgtcacttcagttgggtctgcattaccagttttctgaaaaacacaacatgccaatattagtagcaagctaagtgttttaaaatttcaaagcaataaaaaacataacctaacaggcacataagattaccatatcttctgcaagtctaaccatccctctgcgactacaagtgtgaggaatctggttgcgccttctctccttgtagctatcgcttataacctaacaatgattgttaattagtaactttctacatagtaaatatacttagttaaaacaactccctcaacataccttaaattcagggctagttttgctcttcacaaattttctccactggttttaggtctcagattcatcctctgctggtttgtctttgcttctctaaacttagttacttgccttgatttccaggatctccacaaacatcccatttgcttaagcactgcaaccttttgatactcctcatctagttcaaaccttgccttcaatcaattacagaaaaagtgattattgctgtgataaggaaagatagtcaaatattacaaaaaaataaaaagtgaagtgttacctggacagatttccagagaagtgtcctgatttcttcacctatttttgtccagcgatcaattgtgatagggacgtgttcacggatcaatgcgcctgcatataatgctaacttaactgagcctttaccaataggctctcccatcatggtgtaatccactctcactctggcatttggatccttagcaatatctttcatcctagttggtccacgctgcctcttggtcttaggttgaacagcttcttcatctcccgataattcaagcttgccttcaggttcttctgcttcgttttctgtctttccattgatgtcttcatcagcttctttttctgtctctccattgatgtattcatcagcttctttttctgtctctccattgatgtcttcatcagcttctttttctgtctctccattgatgtcttcatcagcttctttttctgtctctccatcagtttgttctacagctgttggctcaattgtacccacatactccacctcatcattgcatttcttagcagcagcttttttaggttgtcttccacgctttttcttctgttgtcccattgtaaatcacctgagaaaaaatgataaaattaaatcagcactcaaagcagacacacaattaacactaaaaacagacagacaatcaacaaattaaacacaacagacagacaatcaacaaacacaacagacagacaatcaacaaacaaagttaaaacaaagttctacatttcaaacataaatcccttcacaatcacttctctcattctctgttacttccaagtcaacatcgatgtcaactgttgttggcaatggcgcaatgtcaagagtaacatcgtcactctctttctctctaaatcttctcgacggacctctcattgcaacatgccaagatgatgagtcatcttcacgtagcaaaaacacttgttttgcctaagaagccataatatacggatcccttaaaaaggagacttgattattattcaaattaactagtgtaaacccttcttcttccttagctccattgccctttactgcccagttgcaacgaaataaaggaacatagaagacattatagtccaacagtataatgtctgttatgcagccataatactgcaccaaatccaccacttgttccttatcctttgcactagacctacaaactgctgtggcttcatagaaaacaccactattctgtgttttcctgtcaactgttcttgtgtgaaatcgttgcccattcactatgtaaccagtaaatgatcttgcgcaacaacgtggaccataagccagccatttcagtgtttcaccatgagtacttgaatcaagatgtatctatcaaagaaaaatagaaaaagtcaggctcttatatctattgctagcccgttctttaagctaaattactaagtgaaagacaaatactagcctgttctttaagccaagatgcaaaattttgagtgtgcatactccataacagagacgcatcacgtctgcatctcccgttagtgttttgtagaagctgcaggtgctcactagtaaacagagaaaacaaaattcagaatcagcattcatagaagcagaaagtgaaaagcaatatagaaaagtaatagaaagagagatagattgtaacttactctacataaggttcgacgacagccatattctggatcacagccaaatgagctatttttctctccatttctgtaagactaataaaggtgcctgcagagataggacgccctccaaggatagagttgttctcaaactcagtatttctatctgccttttcctgaacttttgttgtcttcttaaaaaattcactatagaactggatgcactcttcagctaagtaacattcagcaatacacccttcaggtcttgttgtgtttctcacaaaatctttgaggactttcatatatctctcaaaagggtacatccatctgaaatgaactggtccccctaaccgagcttctctccctaaatgaactgtcaagtgctccatgatgtcaaagaaactgggaggaaaaaacctttcaaacagacaaagggtttcaacaatctcagcttccatttccaaaagctgctccatatcaatcactctctgacataagtgattgaaaaatttgcataagcgtccaattgctaccctaggacctttaggtaacaaccctctcaaagctattggaagaagctgctgcattaagacgtgataatcatgtgatttcaatcctgttaccttacagtcttctaaagatacacctcttgctatgtctgaacaatagccatctggtcctttaaaatcaaatagacgtttgcagaatagcttcttctctgacttggagagagaccaaagtgctgcaggaaggtatgtccttttccctttggtttgcggatgcaagtccttccttataccaagcacctcgagatctttgcgagcattgagaccatcctttgacttcccacaatgcaacaatgttgatacaatagatgcagccacatttctctccacatgcatgacgtctaagttatgccttactggtaggtcctgcaaaacagacaaacaaaatgcattagacattttccctttgtttcaatctaaacaataaaacatatttcaagaaaagagaacagacctgccaataagatagcctgaaaaatattgaccttttcttccatcttgataactcttcctcatctacttctgcctcttcttcctcatcctcctccgagtcactagatagatcatcactatctgatcctgatttaacagactccggttgtttcctcttccttgtagattgtttgaaattcccaaaattattttggaaattttttaagttatgagaaatttccaaaccacttagtattctactctttctccgatgttcagctttaccatcaaaccaagacttcttatttctaaacctatgtgatggtggcagacccattctatgtcccatatagacatgttttctgctgaatttcaatcacatgctttctgtatgtttaccacataaaggacacgccatttttcccttcacgttacaacccgcaagattcccataagcaggaaaatcactaatcgtccaaaagcagcatagctttgagagtaaatgatgatttactgaaaccatcatatgtcaattccccattgtcccacagatggcataaatcatctataagtggttttaagtatacatcaatactatttccaggctgttgtggacccggaatcaacaatgtcagcatgatgttctccttcttcatgcataagtcaggaggcagattgtagtttacaagcaaaacaggccagcaactataccttgtgtttttcatgttgaatggattaaacccatctgtggaaagaccaagcctcaagttcctttcctctgatgcaaataaagggtattttgcattcatctgatcccatgttactgaatcaacagggtggcggagctttccatctgtgcttttgttgtgaaaatgccaccttaaatccctagccatttcctcagatctgaacattcttttgaggcgtgggattattggaaagtaccgcaacactttctgtggaacacctttctttacttcaccagtatgcatgtttgtcttccatcgtgaagcattgcatttaggacaattctggagcttcttgtatttctttctgaataggcagcagtcattaacacatgcatgaatcttctgatagcccatatcaaaggatttcaaaaactttttcacctcatacagtgatgtgtgtagcacattatcctctggtagcatctccgacaatgtctctagaagatcgttgaaactcttgtcagaccagccatttttggtcttcagtctaaacagagacacaatcgcggacaacttgctatggttaacacaacttggatatagaggtgtctcagcatctgcaagctttgcaaggaactcgtcttctttcttgtcgtcacgttctgcaatctcgcccaattgaaccatagcatcaaactcttcgtccaaatactctgcagcctgatacaactcaactacttcatcattccactgactgactttgctttcactttcaccaccagacaccaattctccatgatgataccagtcacaccgcctcttataagcctcatccattcctcttgtcacaagatgatcaacaactacacagcctgagtgacgatctatgttacgacaatcaatgcaaggacatacaatcatatcatctcccaaagccgcagccacatcccgtacaaacttgatagcccctctctcataagtaggatcagctctttgttgcagaagtagaaagagagaaaaaaagaagtaaactccccaaaacccttactgaaacctaaggaatataattataattataattatattccttacttaccaagatgcacccaatccttggccaccattctatgtgctaaccgtaacataaattaacctttagtaacctaagcagcataccatattgtgtaaagaaaagaatctcttgaataagcaatcacacaataagtagacaacattcacaaataaattcaaacttataaacgtaatcaatcaaagcaattcaggttttaagtacatgctactcgattatagtagcaggttttaaacaaatgtaactcaaaagaatcttcaatataaacaaacacaaaatacaacatttacaaatcactctatcaaaacaattcagtagataagtacagttactagattatattagcatgttttaaaataaatgaaactgaaaagaattcttctaagtaaacaatcacagaacaagcagacaacattcacaaataactcaaacttatatactaactatgacaaaagaaaacaattcacaaaagagagacaatgatactaacctttcctgtgaaaagagagaattgataagcttccaaatgtccattgattcgctcagcaacgcttacaaattaaacaaaatatagtgaatgagcaaaatgttttatattcaagaaagtgaatcaatgatagtttgacataacaaaataactaaatcgatgagacaataacaacacgattcagacaacagacgaagcttaatcaatctgacaatgaaattctcaagttttatcactcaataaaaaatcaaacattacagagccaaaatccaaaatttgcaactctaatgcccaaataaatacacaatttcgaatgcaaaattgttcacaagcacctagagcagttcaggttaccattactaagacgaaattcatatgaattcgcaataaacaaaggcatgcaaagtagagaaaattttaagaatcgataaagaaaacagatctagggtaacgaattctaaaatcacacaaacatcggttattgagtctcagagattgatggaaacagatctagggtaacgaattgagtggcaaaggagaaaaaaacaacatagaaaatgacttgccttcgattcgatctcgaagtggacagatatagagcggattgagtgccggcggaggttccagttgcacggagagctttcacggcggcgacggagaggcaacggagggtttaatcggtggccggaatagtgagttcgtcggacagacggctgaggactgagagagttttctttcttagggttttcgaaaagttgctttgtgtttggttttttttctcgaaaatgactaagtgttatttggcggaataagtattttgtgttcccgctcattaaaactttatatcagcgtttataaagtgctgtaatattaaaactatattttagcgtttatcaactgctgtaatataataacgaaaattacatgacatcttcaatagcaattgagtaatccgtgctataatggtatgctatcaatgaagactttttttgtagtgaactactctagcccaaacatgcttaactgtagagttttctcaagacgtttgaccgaaaagataagtgcaattcggtgacatagatggccaaatcaattcttaaacctctctgcatgcactatcatattcttgaaactggggtgttacaatccacccccattaagaccattaccaatggtcatctctatatttttctctattttagaggtgactctattctagaggcattgtactccaatggtcacatctaaaataaagttttttcaaaagtagagaaaaaaatagagatgaataatagattactctatttctaaagataaagaataaacatccaggagtttggtgaattagaccatcacctactttattggcaaacaatggctaatactgaatagctcactttatttccagaatcagagacagatttccaggagtttggtgaattagaccatcgccctcttgtgacaaacatctcaacctataaggaagagagacatggtttcttcagctatgacaatcgcctcactcataaagagggtttcaaagacattgtgcttaacaactggaacagatacaatggggtcgatgataatcatgttcccttaatggagaagctcactcattgtagaaaggttatctcaacatggaagcaacaaaataagatcaatgcagcaaagtgaatcaaaatcattcagcataagctggatagagcgattgcaactggtggctctactttgatagaggaagacatatgaaaactgatcttaatcaagcctatatagatgaggagatctattggaagactaagagtagaagtcgatggctaaacacattagagtaatctctaggatagtcaggtagttaagattaggttagatcccttctggattcgttggccctaatggttatttcactcacttcagtttggaattcgatcctaggtattccagcgtccaaaaattgttcaaatggatgcatgatctacgaattccagagatttgtacactctagcccaagtgattggatgtttgattctaggtacccatttcagagctttgcgataagttctccttgatataaccctatttttactgcttttagttatgatttaggtataggttttagagtctatttttatttctatagtcttttctagtcctttacaggtctttacacgtttgggattcatttggagataatggagcattctggaggaaaacaaaaaatttatgttgcagaaaaaatccgaagactaatatatatgtatatatatatatatatatcatcgttgtttgacgagaaggaaaaataaagaaaacattgagaaaccctaaggcttaacagtgggatcgtagccaccgcctctgagtaaccaaacaaacgacgtcgtggtgagttttatttactagatcaaagaaaagggaaagagctcatgggtggtggtgcaggaagccgagactaattgtgacaccgttgtgtcatgttgacgtgttgatttcatcaagagatgagatagagagattaaacaccatcagagaaagagaacttgatttaagagagagtgaattggcttgaggagaaagagaaagatgatcgaagagaagtaaacggagtagtggagaaggcgagacgctttggatgagaaaggatcgtcaccaccgcaatggaggaagatggagagaaagatatctggtacatgtcattaaggagaaatgagatgaaacagatcttagtaaaatcagagaatgggcaaagcaaagaaggaagaagatgaagagaaaatagtagcttcaagttgaggttatacaaggatgtttcccgtcataccaaagagaatgagttattaaatacgatatatctgcaaagatcacgttgccatgaagccatatcaactggcagagtttcaatcgggtttatattcgagaagttatgagtgtttcttcctgggcaagtaactgtagaagttgtccaaatctgtgttaagtataaatcaagaacaatgtgtgactactgttttcatcatgcgttttcccggtggaccagaaggaattagatcacgattaagatgtctatggaaagatcttgattcaaggaactcatagtagctaacagcttgtccatcggatttaagctccatccgaaattgaccttagaagtttgtccagaatcatcacaagttgcagaaacctaaatatcagttctgatgcagcattttcagaagaacgtgagacatcacgtgatgtccgatcgggatgaaactttgtgaagacgttcatgttactactagctacatatgcaacggtggtattacgtttctaacggttagttctcgacttataggtatgtttccgagacagatttatatggagtaaatcatgacgactttttattgttttattgggaaattgagcttggcttgagctgaatctttgtaagagctttcattaatcatggattcaggtcttcaggtcttggttgaaggagaaccaagttagagcttaacagcatgcggtcgcagttgagatgataagtttgtctaaatgaggaagaaggagaattgtgttgtcatcttctactaggctaaggtgaggctggtatttgcgaagcatggtatcattttcttttgttatgcttcttgacgcatgatatgtaggcttagatctgattgtataggattagattacatgatgatatgactttatgattgttgagtatgatgtttgataatgtgatgttatgtatgatattataagtatgtttatgttaagtataagtatgtatgtatgatgattacgtatgtttgtatgaacgactggggagaatcgagctgtgggtcgtggtctccctataatgtggacagtgatgggccgacgtgttacatgctggtcaagaaaggctgacgagcccgggatgcatgggagtgtctgagccacgagggccagcctccactcatgaggttctagttgtcacgaggataactggacctaaagatacgtatgcatgtgctatttatggatttatggataagttgattattataaatgtgttattaatagttaaagcatgttaggttgattgcttgtgtctaagtttatatgttatgatgatggttgtacagctttagaaagtgttctatgtttcagtgagcaaagttgattcccctcactgagtattctttactcaccccttttttccccttttttctcaggttactaagcgtgatgagttagttatgtgcaatattttgttcgtgtaagaagtttaaagaaaacattttggcaagatcagatgaataacatgtcgttttagcctatatggcgggacgggtgttacatttggtatcagagccggttaaggccactccggttccgacccggagggtcagatttttaaaaacgaatttaaaaaaaaaaagattttgaatgattaattatgtgtattgcttgaacttgatgattgatttctttgattgcgttgagtaatcttttgttgattgagttttacatatctgcttagttctttttgggaagacttaattgcatttcttttgatactggaattgtaatttggattctcatgttttcttcgctttagtatggtgttaaaaagtgtcaagctgtaagaatcagtgttcaagatagcaatgaaaagctaaagagtaaggttatcgagaaaggatatggaagaaagtattatcggagaataagagcttagagatatttaaggtaagacggatggaaaccatctaattcatagacatgtaaatatgttaaattatcaatgatggggaaggagccgtagaaactattgaaaaaaggaatgggaaggaaaccaaggtcaagtgcctcagcacatgtgagcctgtacgaacatgttgaatgatagttagtttggaggtcttgtttgcctaagtagttgttttgttcgcaatccttctactttgggctctaatagtaatcagtgcttatgcgctagagttcgatggagatggacaagttatatgttcttttaagcagtcatcaaagtagtgcaacggaaggacacacgtggttagaaaacaagtgttgatttgttaaaaacagtaagctaaggttttaatgaaaggtcgttggctagtataccgtaaatgtggatgtggtgtttgctagagctccaagtaaataattttatatgcaaaggagtaaccgccaaaattcgaggacgaatttcatttaagtgggggagattgtaacaccccactccctcattcgatgggctactttattttggaaatatgagacagcccatttagagtccaaagacatatatatatcatcgttttttgacgagaaggaaaaataaagaaaacattgagaaaccctaaggcttaatagtgggatcgcagccaccgcctccgagtaaccaaacagacgacgtcgtggtgagttttatttattggatgaaagaaaagggaaagagctcatgggtggtggtggaggaagccgagactaattgtgacaccgttgggtcatgttgacgtgttgacttcatcgagatatgtgagagagagagattaaacaccatcagagaaagagaacttgatttaagagagagtgaattggcttgaggagaaagagaaagatgatcgaagagaagtaaacggagtagtggagaaggcgagacgctttggatgagaacatatcgtcaccagcgcaatggaggaagatggagagaaagatatttggttcatgtcattaaggagaagtgagatgaagcagatcttagtaaaatcagagaatgggcaaagcaaagaaggaagaagatgaagagaaaatagtagcttcaagttgaggttatacaaggatgtttcccgtcataccatagagaatgagtttctaaataagacatatctgcaaagatcacgttgccagcgggatgaaactttttgaagacgttcatgttactactggctacatattcaacggtgggattacgtttctaacggttagttctcgacttataggtatgtttccaagacaaatttgtatgaagtaaatcatgacgagtttttattgttttattgggaaattgagcttggcttgagctgaatctttgtaagagctttcattaatcatggattcaggtctttaggtcttggttgaaggagaaccaagttagagcttaagagcatgcggtcgtagttgagatgataagtttgtctaaatgagtaggaaggagaattgtgttgtcatcttctactaggctaaggtgagggtggtatttgtgaagcatggtatcattttcttttgttatgcttcttgacgcatgatatgtagacttggatctgattgtataggattagattacatgatgatatgactttatgattgttaagtatgatgtttgataatgtgaagttaagtatgatattataagtatgtttatgttaagtataagtatgtatgtatgatgattacgtatgtttgtatgaaagactggggagaatcgagctatgggccgtacgtggtctccctagaatgtggacagtgatgggccgacgtgttacatgctggtcaagaaaggctgacgagcccgggatgcatgggagtgtctgagccacgagggccagcctccactcatgaggttctagttgtcacgaggatgactggacctaaagttacttatgtatgtgctatttaaggatttatggataagttgattattataaatgtgttattagtagttaaagcatgttaggttgattgcttgtatctaagtttatatgttatgatgatggttgtacagctttagaaagtgttctatgtttcagtgagcaaagttgattcccctcactgagtattctttactcacccctttttccccttttttctctggttactaagcgtgatgagttagttatgtgcaatattttgttcgtgtgagaagtttaaagaaaacattttggcaagatcagatgaataacatgtcgttttagcctatatggcgggacgggtgttacatttggtatcagagccggttaaggccactccggttccgacccggagggtcagatttttaaaaacgaatttaaaaataaaaagattttgaatgattaattatgtgtattgcttgaacttgatgattgatttctttgattgcgttgagtaatcttttgttgattgagttttacatatctgcttagttctttttgggaagacttaattgcatttcttttgatactggaaatgtaatttggattctcatgttttcttagctttagtatggtgttaaaaagtgtcaacctgtaagaatcagtgttcaagatagcaatgaaaagctaaagagtaaggttatcgagaaaggaaatggaagaaagtattatcggagaataagagcttagagatatttaaggtacgacggatggaaaccatctaattcgtagacatgtaaatatgttaaattatcaatgatggggaaggagccgtagaaactattgaaaaaaaggaatgggaaggaaaccaaggtcaagtgcctcagcacatgtgagcctgtacgaacatgttgaatgatagttagtttggaggtcttgtttgcctaagtagttgttttgttcgcaatccttctactttgggctctaatagtgatcagtgcttatgcgctagagttcgatggagatggacaagttatatgttcttttaagcagtcatcaaagtagtgcaacggaaggacacacgtggttagaaaacaagtgttgattttttaaaaacagtaagctgaggttttaatgaaaggttgtcggctagtataccgtaagcgtgtggagttagttatgtgcaatattttgttcgtgtgagaagtttaaagaaaatggtttggcaagatcagataaataacatgccgttttggcatatatggcgggacgggtgttacatcaggcatccatttgaaagtcttttagacgctcgatgcctatggtcgaacttccacattagccagcgaaaaccgcatagatgccaacgaatccagaagggatctaacctatcttaactacctgactatcctagagattaccctaatctaatccatcctcaagaaccctaatccctactcaagcaacatactcaagaacacaaacccagaaattactgaaatcatactaaaatgtagatgtaaacaagctaaacaactctactcaaagaactaaatgcaaaaacgaaatagattaagaataattaaggttttaagattcaagaatacgaagaaaaactaagagataaaagctagatcctttggacaaacccaaaagtgatctatttatactaaaatgttgaaaaccctagattcactagaagacaaaagaattgaggcggtttggacgattgcttgatcttgaggattgagttatcactcggtgtcatcaaacaagctaacattcaagatccttctagaatcattcatgtactataacatgataaatcgaccattctttttatatatattttttaaatggtgttctttctctccccaagacttaggccatgaacgttttgttgtttttaattagttttcagtttctggttttttgaattttggtttttgggttttgatttttgtagtttttgatttttattgtagattttagtttttgcaaaatcctgaatggaaatttatttagtttttagtttttatcaccaggtttttagttttagattaaaaagtttgaatgaattggtaaattgtgaaaataacatatttaaaaaataaaaataaaataaaataaataaatgtcatgtgaattgttttaaaaacccacaaaacttggtttttagattatatgaagaaatcggtaaaatctactaaaatctggttttcctactttttagaaaatctactttttgcagaattatgaatggataattatttactttttgaaaatcaaaatccaaaaacaactccaaaagctacaactattcaaggccttattctttttttagagagtaaacaaagggaaactcgcatactcgatcgacaccctcgcatttttccaacctttgtaattgatcattccaaataatgtttaataatggggtcataggaaacatttctatccctatacactatttgaaaatcttgtcaatctctcattttctcttatttttattataaggggcgcgtaacactttttctttatcacattggtctcaatatcatgtatgaataaagagtcaaggtctatgaatactaaccgtttgaagaggtaaaaggaagagtagtgaaattagctcctgccttagtggttgagttggaaactaggatatcctcaagtctgttggtttgccatctaaattttccaatagtaggattgagtcgaacctacaacagtcatcaaccaggcaataatcaagagaaatatacatcatatttcctaactaaattaaacaaaagcgtttttttctttttctttagtatgagaaatgactcactaaactgaaaaacgaaaataataaaaatcaaaaataaagtaagaacctcccagacttaaacgacattttccctagtggcattcaaatccgaagagagagggaaaaataaaataaaaataaaagaaaaaccagaaaaatcaaaccaatgcgttgcctcccactaagcgcttgttttgagtcaataccttgacttaacggagttcaggatgtgggtagagtggtggaggacttgtgttgcaacctccccttccaaggcggtgtgtaaactgatctggactggacagctgcaggtgtcgatcgacacagatggttgtatcgatcgacactcgcctcatttcctgcaagaataacaaaagaaacaagattttgaggaactcaaggcttgttaacttgtgaagctgacttcgaagaatcttatgaattaatcgaaggtaaaacaggaaaaaggatagaggagaacttatcatagaggtctgaaatgggtttgggttgtagagagtttgcagaatcttttgtctgtgaaacctgagggtgtcgatcgacaggaagggtggtgttctcttcagcccacaccacttgaagacctatgtgataagttctcttctatctcttctcatgctttaccttcgattaattccttagattctttgaagtttacttcacaagataacaagcctagagttcctcgaaagcttgtttctcctgttgttcttgcaggtgacgagatgagtgtcgatcgacacacccctgagtgtcgatcgacacctgcagctgccccaaccagattcgtttacacaccgccttggaaggcgaggaggcaacaataatcctccaccaccccacccacattctgaactccgccaagtcaagctattgactcaaaacaagcgcttagtgggaggcaacccactggtttactttttctttccctttcttttattttctttcgtttttgatttatttttcccgctttttctggatttgaatgccactggggacagtgtcgtttaaatctgggggtggttcttactaatgatgcttctatttttgattcttattatttttagtttttcagtttattgagtcatataaaaaaaaaaaaaaaaaaaaaaacgttttgtttagtttagttaggaatcatgatctatatttctcttgtttattggaaaatctagatggcaaaccaacagacttgaggatatcctagtttccaactcaaccactaaggctggagctaatctcactgctcttccttttacctcttcaaacggttagtattcatagatcttgactccttgttcatacaagatattgagaccaatgtgataaaaagaatatgttcttctccccttataaaatggaaaaaatataatgagagatggagacgactttcagatagtgtacaggggtaggaatgtttcctatgaccccattattatacattatttggaatgatcaactacaaaggttagaaaaatgccgagggtgtcgatccagtttgcgagttcccctttgtttactctttaaaaagaataagtatcaggaagagaaagaacaccaaaaaaggaaaaaaatatagaaagaatggccaatttatcatggtatagtacatgaatgagtctagaaggatcttgaatgttggtttgtttgatgagacccaagtgatgaaagcctgttggatatagttgtggaacttaggtatggaatctagaatgttgtgtaagcttctagagaagtacatgttggttaggatttgattagacttgttaagcatatggacttagtttggatgatcatgacaataggctagagaatgttgggagttcctttgttttcaaaacctcttccactggttcgacttttgtgttttgcttgagggcaagcaaaagctaagtctgggggagttgatatatcctggttttcactaattttatctatgatttaggtataggatcttgagtccttatgttatttctcgaggctttttagtgtcttttcaggtactctatgcagtgggacaacaatggagataaggagacattttcgagcaagagctaaggaaaaggaagctaaggacgattttggattcaggaatcagcgaggagtgtcgatcgacacactcttggtgtcgatcgacaccagtttcggcccagcaaaagttctagacgcttttgagtttacagaagaggaaattttccccagaagatttctctatttgcattattagtccatggacgtttttagggtttatatacaatgtttatacctaagtttttatcatccagtttttatcatcaagtttctttcaggttctattgaagcttttgcaaaccctgttactgagagacttaagctatgcatcgattgtttttagagattcatacagttcttaatacagtgaagagatcccttcttttcccttctatattttctgtgtttatgctttcatactcaaatatgttgcttgtttcaatcaatatgtctcaataatctgcttgttaggaatagggtttctcattagggattcatatggtttgctaggttatctgaagaatcggcctatctactaacatgaataatcgaacttgttaataatgcatatttatgttgataatttctcggcttctccggttattcttagcaatagatatagggagtttcgcggaacgccaccggttcttccataattagagtttgagtttgagaatggttcgataacaacctagctttcattcgatcgactaaccaacagtttcctgagaataccctgttcctacctctttatttaatcgtttacaaccaaatcatcttgctgttttcttactttgttctcttttattttcactcataccctgctagcttaatctcgacattcaactcactgtttgaataaaagaactctgtgaattcgatcttaaaatactgaaattatctcttatttgagagagtagttctaggtaatttgaaccatatccctctatcccttctctttttattgaccttaggcaacatgatggtactgatgtcccgtgtcagcagtttagcttcattagagctaattccattgtcaacaaggcgcttgacatactttttgagtggagcagaggatgtctcagtgtatccttaggaagtgaggtgaggatcttttcaatgatagttgtgcacttagcagggtggaactcctacttagaatgacgcttccttagataaggaaaatgaggagtgtaggcatattcgagctgcatcgggattctcacctcatatggtgcagtccagacccagtgtcgatcgagaaaaggtgtgtgtcgatcgacactatcgtaagggatcgtctctgaaaacagtgttccatagggtgtcgatcgacaatggtaggtgtcggtcgacaccagctctgcagctgcaagctccaactcgtctttagtgtccaattcctcccagatatcatctccatctctgacaaagatggcattacagctcttcctagggttaacatcacggtttccaagaagaaaaccttcttgttgcttgatggattgtgcaatttgagctacctgtacatctagcttcttcatgtgagagctcagattgtcgatcttcccattaagatctatgtagacagcatccaacttgccattaaactcaacaacaagcctggagtttctctcaagaatctgctcaagtatggattccattcggctctctgatgagggtggaggggggcctagtaagctgaattaccataagtcctctagaagttgctctgagcaaatgtcttctggaaggcaggctttggaatgtagctcaaggaactctggtttcgtgtaaacctgttgccactgaagttgccctgtacctgcccaaactttttgtagccctatccatctatgtagaaaaatccctcttctgactcattctcaggctcaatggtctcatcctcggctgaaaagtagacatgcttcttccatgtaagcaagttttgaaccgaatcgagcttagcatgtacctctgccatctgattttctgaaacatctcctgcaatcttcttcctctcaaagtcagcattcttagtactcttgctgcaagctaggttctctatcaaggcggttgcatcgctgcatcgagagccatctgatatctccaatctactcctctgaaaaaggtaccaagaagttgtacctcactgaagccatgatgcagccagtccctttgatactccttgaaacaaacctaagcggctttgaaagcttcagctggaccttgggtgaaggtagacagcttgtttctcagctcctcagacttagcatcatcatagaagttgttcaacaatgctatcttgatgcttctccaagtcttgagggaacgtggttttagttgtttcagccaagaagcggcttgcccagcaagtgagtaagttaagagcttgcacagtaggtagtgctctgagactccattagccttgatgctcagaacgaggttctcaaaatgctcgatatggtttattggctgctcatgagacaagccatggaagggatgctggccaactaaagcaaaatagccaggtttcagcacataatcgttcctctggaaaggtgggggtacaatcgctgatcgattagcatagaacaggtcgagcctgttgaaatccccaagattacgacgtggttccgcagctggaggaatagctgtaggaatctggggttgatgtcgatcgacaccaaagttggtgtcgctcgacatcgagccttgttacgtctctggcagctaattgcgcactaagccgcgcctaatcctcattggcgtcatcagggtggatgagtccatgattatccaatctctgaccagcctgattgtaggcttgctcatcctcatctctcaaaactccttcctcatcaagtttgatgactctgtcagccattgctaatctcagagttttgcggttggtgcgtttaagttttcccaagtcaagaatagacaagttgatcagctccttctgttgtgtgcttcttgtttgtctaggcatacacctaaacacacaaaaaagagaaaacaagaaacgcgtgagtaacaaaatcaaagtaaaaactagacgaaatctctaaactaaactcaatggtgattcccaagaacttttgcaacggcgccaaatttgatatgcttcagattgccttaaacctactctttcaaataagagatcggttgtagtatttaaggatcaaatttcctcaaagttcttttgttcacataatgaattgaatgtcatgattaagctagcagagaatggttgaaataaacaatatacatagtaagaaaataacagattgattttatgtgaaacgattaaaataaatagctaggcgtagggtattctcaggaaactattggttcgtagatctaatgaaagttaggttgttatagaaccattcttaaactcaaactctaattatggaataacctatggctttccgcgaaactcactatgcctatagctaagaataaaaggagaagtcgagagatcttatacctagaaatgcattctaaccgaattaaattgttaaccttagtagataggccgattcttattatactataaaccaagctcatcaaagaatagatccaactacaaatacctatggtgggtatttctattgtatgtattcaagttctaattaattactctagatctaacattaaaaacaactaaagatgaagaatttctatagataacctaacatgggggcgatctactaaaccatatgaatcgctaatgagaaactctattcctaacaagcaaactactcatacatattgattgaaacaagcaacatatttatatagaaagcataaacacagcaaataagattagagtatgaaaggatctcttcactgtattgagaactgaatgaatctctgaagaacaagggaagaatagcttatatctctcaactcatttattatacgagcttcaaaatacaaactcaaactcagatcatctagatcgcgagctaaatgagctacttcgagaggtaatgcaaataaatgaaaaaaattatattttctaaaattgttatgtaaattaaatattttttaagatatatttctatttttataaaatatatatatatttatatatatatatatatatatagatatatgttttcattgttgacattttgtgtatattattaatatttattttctgaaattgttatgtaacttactccctccgtcccataaaaatgaattttctaaaaaaaaaatttgtcccacttagatagaagttttatatttccaatgtaaatttttagaactgtttgcctgttttacccttattagataattagataaataataattattattttaaatagtataaagaggttcaaattgtcattatacattattttttaaagaatgtgaaatttctaaaaaatccttcttcatgggacagagggagtatatattttcctgaatatatttttatttttgatagaaaaatatatatatatatatatacgttgattgttgactttttgtatatactagatgagtactcgcactacgtgcgggcttatgtattacaatttacaaattgttttatataatgtctgttcatataaagtaaagttgaatgcatcggttttgaacataaatatgatttgtaattgtttttgaaaagtccaactatattagttcatctgaaaaacgaatgtgtttaagttgttttttattgttgttttagattctcagtttttttaaaaatattttatatatccttatttttttggttatatgtttagattgtgagacggtgaaattttaaaaaatttccttcttacactaaaaatataacatgtctttattaaccatgtctctgcatattcaatctaaacatatttaacttgaggttcttggaaagtttagttaagttcttgtcataatcttatatcctacgtattagttataaagatagctcctcaaacatcttttaaattactggttttcttagcataaatctcgaaaagcttagatatattgaatctgcatattcatttagtttctttcataataatcgtctaatttttaggcaaggaatatatgtagcatgtttgaattttatgatcattttagccacttaagtggatctcaaaatgaaagaggatattttgaattaaaaaaatgtaaaaagagagatggttcaaattctgattaattatatcttcctatttaagttgttatgttgaattaattactatttatgtattacttattttatgaagtctaggtggcaagctctcatgtgctgatgtgtcaagttgtggaagagagttagcctcctttcatatatatgattacttcaagaaaaccaagctcatgagctagttcatgttcattaaagctcgctcgtataacacgtgagattaaactcatttattaaatgatccttaaaaatagaactggcgctcatgaataaccgagccgagttgagccagctcatgagctatcagctcattttgacacccctagtctaaacaataacctctaaaactatatatgccctataaaacgttatggggcaaatttccacttctgtaaacttgaaagcgtcatggacttttctgggctgaaaccaagagtgtgtcgatcgacactctcaccgaatctggaactgaaagtccttaccttccttttccttagctcttcctccaaaatgtctcctcatctccattgttgccccattgcatagaatatctaagactctaaaaaactcgagaaataacataaagactcaaaattctaaatctaaaacatagttaaaatcagtaaaaacaaggttatatcaggtcacatgatgaatattttcaaccaaagagttcactatgaatacagcttctctctagacaccgcaagtaatggaaactttgctaagaagaagattgaggaagcttgtttttttattagcaacatggctgctagcgtaaacaacaaccgtcttgacacctccctaagagaagaaggagaaactacttaaccctcaaggtttggcgaactcataggtttgatgagcatcgctgtaaaaactttcaaggaagttttagctcttattctaaggaaggagtgcctattgcaggagttctagaatctacatcatcatgtgtaaggtataagaatttcaatacccttagtttaggcattatgtgaactacctagcagcggatgtagaactgccacaatactttggttacaaaaagaagaagttcttacgagaggttaggagatactattgggatgtaccctatatttacaagaaatgctcgaacggtttattcagaagatgcattcttgaagaagaagttgagggagttctccacgggtgccatggctcttactatgctggtcactttgcaaccttcaaaaccattttcaaaatgttacaggcaggattttggtggcccaatatgttcaaagacgccaattccttcatagccagatgcgacatttgccaaagaatgggaaacataagcaagaggaatgagatgtcccaaaacttcatagtagaagtagaagttttggacgtgtagggaatcaattccatgggaccattccctaagtcaggtactcacgaatacattcttgttgcgattgactatgtttctaaatgggtggaagccataccaagcgccaccaatgatgctagcgtggtagtaaagttgtttaaaaacatcatattcccaaggtttggagtcccaatagttgtgataagtgatggaggaagttgatatacctctatttttactgtttttagctatgatttaggtatacgttttagaatctttttgttatttctagagttctttttcgagtcttttcgggtacttaaaagaaagagacaagaatggagattataaggcattttgagcaaaagctgaagaaactaagctgaaggacgaatttagttccagatcgagtcgagagtgttgatcgacacactcatggtgtcgattgacaccacttgcagcccagcaaaactccaagacggtttagagtttgaagaattggaagtttgcccataagattattttttatttaaattattaattcctacacgtttttggagacttaaactttattctaagcttttaatcgttggagactaagctattaatacacttgaagaccctgtttttagagtttcatcaaatatttcaatacgttacaatgaagagatattttctaaactcttttcttcttctaattactttatgcgtttttactcaaaacatgttatatctttctatgatcatgtctgagtagtctgcttgtaaggattatggtttctcattagggttataaatgatttaatagatttccaacctgctaggatatctgtaggattcttcatctttattactcttaatgctagttgatatggatcaaattaaccctaatactctgtcaaattaagaggtcagtttgcagcattttgggattgaattgacaaagatcttttgttcacctaataggtataagtcttcagaattaaactagacaataagtacaaaaataaaaagaaaacaaaacaagcaaatagcagattggatggataaaaatttagataataaaaatttagataataaaaacgtcaagcttagggtatttttaggatatagatgattagtcgatcaacatccatgaattccagacgcagcaaatcaacaagccgtagaacctcgtcatactcttggagattccatcaggcctgacatgttctatgttaatcgatcggcaattgtaacccccccccccaccccaccccacccctttcaagaggaacgactatgagttcaagcctgactactttgctttagttggctagcatcctttccatggcttatttcacgaacaaccaatagaccacatcgagtgctttgaagatctagtgttgagcatcaaggctaatagagtctctgaagactacctcctgtgcaagttcttcccatcctcacttgctggagaagccaattcttggcttaagcaactgaaagctggttcgctaaccacttggagaagcatcaacattactttcttgaacaacttcaacgataatgcttattctgaagagctgtgcaataagctttctaccttcactcaaggacctgaagaagctttcaaggttgtctgggttcgcctcaaagagtattaaagagattcctcgcatcatggcttcaacgaggtacaacgtctaggtaccttctttagaggagtcgattggagataccagatgactctagattcaacaagcaatggtaacttcaacaccaagtaccctgcaaatgctacaacttttatagagaatctcgccaatagcaatagtaccaagaatgtagacttcaagaggaagaaaattgcaagagctggttcaggaaaccagatggttgaggtaaaagctaagcttgattcaatccatagcttactcacagggaaaaagcacgtccactttgctgcagaagcagagacgatagagcctgagtctaagtcagaggaaggcgtattctacattgatggtcaggaatacatgaagtttggtccgtcgtagggcaactacaatggtaatcattttggaagcaaccaaaattcttcgggttttactccaaatcctgcttttcataagacatatccatagagtaacttcacccggattaatggtaacttcacccggatttatgatcgaattcacatagttattttgttcacacaataggtgtaagtattgaaaattaaactagacaataagtacgacaataaaaagaaaacaaaacaagcaaatagcagattggatgcatataaatttagataataaaaatgtcaagcttatggtattctgaggaaatagcttattagtcgatcgacacccacgaattccagacgcagctaatcagctaccagtagagtaccccccctccccccttctagaggaacacatatgagtttaagtttgactactttgctttagtttatcagcatccttttccattgcttatttcacgaacagccaatggaccacatcgagcgctttgaagatctagtgctgaacatcatagctaatggagtctctaaagactacctaatgtgcaagctcttcctcacttcctggggaagccacttcttggcttaagcaactgaaagctggttcgcttaccacctcgagaagcatcaacattgctttcttgaaaaacctctatgatgatgctaagtctgaagagctgcgctatatgctttttaccttcactcaaggacctgaagaagctttcaaggctgtctaggtttgcctcaaagagtattaaagagactgcccgcatcatggcttcatcaaggtacaacttctatgaaccttctttagaggagtagattggagatactagatggctctagattcaacgaacaatggtaacttcaataccttgtaccctgcagatgctacagctttgatagagaatctcgctagtagcaataataccttcgagaggaagaagatttcaggagctatttcaggaaatcagatggctgaggtaaatgctaagcttgattcagtccatagcttactcacattgaagaagcacgtccactttgctgcagaagcagagacgatagagcctgagtctaagttagaggaaggcgtattctacattgatggtcaggaatacatgaagtttggtccgtcgtagggcaactacaatggtaatcattttggaagcaaccagaattctttgggttttactccaaagcctgcttttcataagacatatccatagagtaacttcacccaaatttatcaagcccttccccccttccacccaatgttgagagtaagctggaataaatgcttgagcagattctagaaggagagtccaagttgattgtggacttcaatgggaagtttgatgccatctacactgatctgaatggcaagactgacaatttgagctcacacatgaagaagctcgatgtttaggtaactcaaactactcaatctgttaagagacaagagggttttcttcctcaaacaacatatgtcaatccaaggaagagctgcaatgtgatcttggtcagagaaggacacaatgtttgggaaaaactcaatacagaagacgagatggaacttgctggtatcaatcgacacctactagtgtcgaacgacaccatatggtcatttgtgtgacgaatctgctaatgaagctttctcgaatagagaacgtgagcatcgattgacaatcaaagctagtgtcgactatcaccatcagggtgtggatcaacaccaaacccataccaagcctacgtcaacattcaacaatgtagacttgtcatcaattaagagagatggattgacgaaagcatagagtgtcgatcgacatactccaagtgtcgatcaacaatgggtatgagctgcaccttatgaggttttcattccaacgaagccagagtcagtttacactcctaaagttctgtatctgaagaagcgtcgatctaaaaggatgtacatgataaaaagtgtagagccataatagagaagatcatgactactattccgaaggatgcttaggagtattcatctactcaacttctatgatacgttaaacgtttagtcaacaatggaatcaacttcgaggaagcgaatttgctaaccaaagacatgagttccattttgttgaaaaaggttaagaaggacaagacaaagaaggtattgttttctgagcatgtaaggtccattatcgattgtcagatcacaaaaaacctgcctgatccagggagttttgtcctcagttgctcaatatcatcggaagtgttcagccactccctatgcaatctgggatgaagcatcaacttgatgcccatgtttgttgctgtgagactaggcatgactacctaccggccaacacatataactcttcccttcgcggatcgttccaaacgagtccatgaaggtttcctcgggatctttctagtgaaagttggcaattgcaacattcctacttattttgtagtcttggcctatgacgaagaactcaaggatcctctaatcttgggtagagctttcctagatacacaaaatatttggaaaacaaacattttttacaatacaaatatcagattgcatttttgttagttattattcatactaaatgatttagaaagaaataagtacatgctaaagttaattgaccaaaaaacatttgttaattttccttttggttagtaaaattaaaatttaattttttagatttacacatagtatatgtaaattttttcttttgtgagtttttctatttttttaagagagaacaaaaagtttactcttttccaagacatgtcaacatctgatcgacagacttgacatatggcataatcgtatgagttactaactttaaaatccatactttatataataagatttctttcttgttttagttttatttatttctttaagagaaaaactggtcaacttttttccaacacatgtaaacatctgattgatagacttgacatgtgacacaatcctatgattcatattttatataataaggttaatgatgtcttattggcttagcccaataatacgatgatggatacccgaatcaaaacaaatcgagctttgacgaaatacaactttgtgttctccgccgaaaaagacttcgaattgtatccctcacccaactctcatgtgtcaacaacatctttgattcctttttggatcatcgcctatgtgcctccatttttgggtttatctcaattttgatcaactttttaaggtaagcttcaagcttcttttctcaatttaatttcaaattgaattatagatgtttactccaattgtttcatggcatcaaattttactccgttttggttattatgattacatcaatttccattttcgattatcatttgttatttgattgaatcaatcttttggtacaacatctccgcgaggctcttctcgattagagaaaccaatgcattttagaatttatcatttgttttggtcatagaaaacccaatctctatattattgcttcatttgtttttttttctgtgccacttaattttgggtaactataattgtttttttcgttttggtcggttcatatgccactatcgagttaaattttgttttatgaacttctcatttctcttaggagctattagtgggggtgtttgtaacatcctagtttcaagaatacggtaatgcatgctttaaaaaaattgatttgatgtcaacaaagtacacttatattttcggtcaaatatccggaaagaactccacaattaaaatgtgctaatgttggagcaatttcagaataggtgattttcgaagaagtgattttccaaaccgtgtaagagaggaaacaatatggagaaagatcacatagttatttgtagtttcattacacaagcctttaaagccttatggtagtggaccggacgtcggatacggatgagcccacaaaccaagagagaatgtggggcccaccaaggatgatggtcggggtgttacaatcctaatgaaaatgttcgcataagaagctgttaagacaagtatattgtctaaacgatggaggagtgtggaagtcccttagtccaatggttaaccaagggttcattaatacttctacactatgtctagggctcgagtttcagagaacacgatttcttgcagattaatggtacaaagcttatcggaggtccggaattccacatgcagagtcgttcgtagtggtctaaagtgcggggagagcatgttcatcacaaggatgtcgtacatctagaaccgaattatgaattagaggaagccaagtgtttaaaaaaggttttaaaatatttacaagggattttaaaagagttttaaaacatttacaaggtattttaaaagggttttaaaatatttacaagggattttcaagggctttaaaatatttacaaaggttttttatagatttttatagggtttaaaagtattttgaaaaatttacaagagattttaaaagggttttaaaagatttataagagatttttaaagggtttaaaagggttctaaaagatgtacaagggtttttaaaagatttataatgaatttacaagaagatcttttaaaaactcttgtaaatctttttaaaaccttttaaaatcccttgtaaatcttttaaaacccttgtaaaatctcttgtaaatctatttcccgccaaaacaaatttacaaggatttttaaatgcattttttggctgagaaaaaatttgttaaggaaaaaattttggcgggaatttttttttcggctggaattttttttttgcgggaaaaaggtattgcggaatttgttttttgcggaaaaaataacttttttggtgtcaaaaatttagcggaaaaatttcagttttcaattacatgtttctattagatgaaggtaatttggtcattctgttcaaaggaagaggtatttttaaaaatggacaacataaaagggtattgcttcaaaagggtagtaaaaaaaagatagttttgcaaatcttccaaataaaactgtttatatgtcatattaaacaaatttactgtttatattaaataattatctttcaagagtcaagacatatttgttatatcataaaattgtaaaggtgtttatgtttctactatagttaattgtctactgcaacatgagatcataaagttttgttagaaatgatgataaaagggaagatagtgatatgatataaaaagatgatttgtgaatatgtatatataaatatatcaaactacttcgttataaacataatggctaattcttctaatacaatttaataatactttcaattaatattttcaaatttgtgagatatgttacaaaccaaatttcaattgaagaaaaataaagtaatttgcattcaagataaaattaaataggaaatttgtgatatgttaaaaaacaattgtgttatggtatcattaaaatacaatgacatttattttttgctttcaattttttggtttacctttaggcccgagcataatagccgaatccgaagaaccgacccgaccccgacccaaaaaaccttatccgaacccataattttcaaaatacccgaacgggtctatacttcaaaactcgaaaaaactgaacccaaactcgaatatgtacccaaacatatctcaaatataagtatataccatgtcaagtattcagtagttgaatcaacattgttgacaaaacaaatcctcgtggaagaggtggaggagagaccatcacaatgttcttttgaaaatctcttagttgtaggtgaacttttatttttctacgtgtgtgttcaaaacttagttattaaaaaccttagagagctttgggattattactttaaccgagggaagagagactcttttttttttcttttttgtcaagcaacttgatttcaatcattcaacggaaacaagtttactgataagtgtgtattttgcatgtttttagcatccatttgtcatcattttagtatcatatcatcactgttttataccatttcacatcatttgtcatcactttgcatgtttaggatagttttacatgcatgttgcatgtttgcgttgatttcaggtgatttggagctgttgacgagctatctggaagaagcggaccagatcacgacaaaccactcgaccaagaggtcgagtaggagcttcaagatctcaagagactattcgacccccaggtcgagcagaggacatcaccacttcacttcaccactcgaccacgtggtcgagtgccctcatcaccaccactcgacctcttcactcaacctggaagtcgagtatcttctgacaccactcgatcacatcactcgacccccaggtcgagtgccttcaccttcactgccagaccactactcgacctcatcactctacctagaggtcgagtatcgccatcacaccactcgactacatacttgatgacaagctttagagccttcttcattccgccctcaaccagacactcgagcaccaggaagaaaagaagactccagctattcactcgacctctcactcgaccacctaggtcgagtatagttcttaacccgtccaaatacttcgtcgttttgagtattagggtttcgggatatttggctataagtagcatgtacttctcattttcgcagacaataagtgtttttacctagttttatttccgcagaccttgtgttctagactttttgtaatccggatttctctttatctattcagtattcagtattcagtttctgtacttgatttcgtttactattgttcattctgttatcatcctgctgttacattgttgttatcatgttttcaatttgttcaacgtttatgctttctgttatgatgtctgagtagtgaataggtttctgaggatgggttagtgtagtgtaaaattctcagtatgctaggtgattgagtattgattgatagatcccttctggattagttgttcttaatgcctattgatttctgatcaactggaatttgaacccagacatttccgcgcccaaaaggtgttcgatgaaatgtctgaaccactaattccagagattcgtgaccctgtaccaaggtattggttgcagggagcgttttggctttaacttgttgattcgtaatgcctgttaggttagctctcgtcaatggtgattgagtctgggactaggttagcttgagagtctctgttgcggtggcacttagatttggttaatgaacttgttgtctagggttaatttattgagcatgtcaatcacttgtaaactgaggaaacgaaactactcaattatcccatccttaggaattctttatctgattgattttattgtttactctactgctgtgtactgcatcctgtcatctgttgcttagtttctgcaattctttactgttactcgacctgatactcgaccacccagttgtctggcaacagactgtgcagtcgagtatccctgtttcatttcctgtctgttactcgacctgtcactcgacctcacccagtgctctgcaaagagctgtgttagtcgagtgttttactgtttctgtttgattttctgttttctgcatgttcacttaggactgctagaacacaccaaaacctgttatgcttggcttgacttagtgacttttgatcacatcttgattgttagcatcacacctatttggattgacaacctaaaatactacaacgacatgatagtgctttaggtttaattgatcttaaaaacctattataaatttggcgccgttgccaattgggtgtttgtttgttacatttaagatttcagacttgcttagatcaagttctttttcaattttctttttagttactaactgtgtgttcttcttgttgtcttcttgatccaggtacacctcttctgtatgcgaactcgatcaacaggcaaccagaacctccttttcaccgacaacatcaaccgcacagcccgcgaaatcagaaaaaagagaaccacagtcaaccctgtacctcagcaaccactcgttatggctgaagaacagaatcaacaaaatggccctaccaacattggtgctggagatgcaccacgtgatcaccgtcagaggaagggaattgcacctcctgctatccagaacaacaatttcgagattaagagtggtctcatctcgatgattcaggggaacaaattccatggtttgccaatggaggatccactcgaccaccttgatgaattcgataggctctgcaacctaacaaagatcaatggtgtcagtgaagacggatttaagctccgtttgttcccattctccttgggcgacaaagcacacatctgggagaagaatctgccccatgactcaatcaccacctgggatgattgtaagaaggcttttctatcaaagttcttctccaatgccagaactgcaagacttagaaatgagatttttggtttctcatagaagactggtgaaagcttctgtgaagcatgggagcgtttcaagggttacaccaaccaatgccctcatcatggctttactaaagcctctctgctcagcactctttacagaggagtcctaccacgcatcagaatgcttctggataccgccagcaatgggaatttccagaacaaggatgttgaagaaggctgggaattggttgagaaccttgctcaatcagatggcaattacaacgaagactgtgataggaccgtcagaggaacagctgactctgatgacaaacacaggaaggagatcaaagcgttgaatgacaagctggacatgattcttcttagccagtagaagcatgtgcacttccttgttgatgacgagcagtatcaagtccaagatagggagggtaaccagttggaagaagtcagctacatcaacaacaaccagggtggctacaaaggatacaacaacttcaaaactaacaatcccaacctctcctaccgcagcaccaacgttgctaatcctcaggatcaggtgtatcctccacagcaacaacaaggtcagaacaaaccttttgttccctacaaccaaggtttcgttcctaagcagcaattctaggggaattaccagcaaccaccaccaccttggtttgcacctcagcaaaaccaaggtcctgttgctcctgatgctgaaatgaaacagatggtccagcagctgctacagggacaagcatctagctcaatggaaatggctaagaaattatctgaattgcaccataagctggactgcagctacaatgacctgaatgccaaagtggaggcattgaataccaaagtcagatacttggaaggccaatcagcatctacctctacaccaaaagttacaggacttccagggaagtccatacagaatccaaaagagtatgcaactgctcacgccatcaccatttgccatgatcgagagctgccaactcgacctgaccctgatttcgtcactggagacagtgatgttcaagaaggggaggcttgtactcaggttgaagtctctgttgttgaattcaaccattccgctggttctcgccatctcactcaatccacctcggaagagaaggccgccataatcgagagaatggtaaaacgattcaaacctactccactaccctcacgtgctcttccgtggacattcaggaaagcgtggatggacagatacaagtctattgcagcgaagcagttggacgagattgaagcagtgatgccactaatggaagttcttaacctgattcatgatcctcacaaagatgtgagaaatttaatactggaaaggatcaagatgtatcacgattcggatgatgaaagtgatgccactccatctcgagctgttgataagaggattgttcaagagaagttagaagatcctggatctttcactctaccatgttccattggggaatttgctttcagcgattgtctgtacgatctcggagcctctgttagcttgatgccactctctgtggcaagaaggttagagtttattcattataaaccttgcgacctgactttgatccttgcggataggtcttctagaaaacccttcggcatgctgaaagacctaccattcatgattaatggagtagaagtgcctacagacttcatggtgctggatatggaagtagagcataaggatcccttaatactgggaagaccattcttagcttcagtgggagcagtgatagatgtcagggaagggaaaataagtctcaaccttggaaagcatatcaagttgcagtttggcatcaacaaaactccacaagggtcaactgaagatggaagaacctctggaaatgatagagcgatctcaggagaaggatatgagactgaaagagtgaaagaacttaaaaagaggtctgataagcaagatgaaactatagagaagctagcccacactattgaggaacttaggagtaagctaaatcagatgcagaaggaagctcaacctaaaggcaggattaacactattccgagaaaataattcacttcaagatgatctcaagagacagattaccctccagaagagaaggaagcctattttgaagaaaggggaattgagtattctgctgcagacctctccagggaggacactaagcatgatgatggtatcagagaggattatgctgaccctctctacagttcattttcttcttgataactgtgaggagtcaagctagagacttaaaacaagctcacttgggaggaagtcccatgactatccttgtaaataatttttacttttttgttattttttgatttgttttggttgtgtttgtggttctcaggaagaaaggagtaacgtgaaggtagagtaaaaattcaaaacttttactctactgatggcgtagagatcgagtatattggtcgagtacgagtgatgtttaaaaacctaaaaaaattttaatcatcgttttactcgaccaacagaagctacagagtcttccaggaagtttatcaagagacaagaagcagccattgtcttcctggaggttttctagtgaacagagaagagacaagaagacactatgggatccgccgctgacgcccatgtctcccatgcacaccaccaaaagacaagaaatctaacttctcttcgcttagctactcgacctcttcaccttatcctatcttcaccttctactcgacctcgacgccatcaccatccccacacctattaaactcgaccccattccccccttattcatcacaaccaacaaacccatcctcatcaaagccacatacactcgacctcttcgccacttgaccgagctccccgttcgcataaacactcgacttcttctccatcatcatccgtccaaagcagcactcgacctcaccatctttcttaaccacgcactcgaccgcttctctctcgcctcttcaccaccgtctcgagctaccactcgaccgctcctcgccatcaccacctctcaatcgtctcaacttcacttgaccgcttcacgccatctctttcaagctcgtctctcatcaccaaacactcgattcacatcaccttctcttccgtccaagcctcatcattcgccctgaaggaatcaccgccgcagctcatccccaatccacttgctactcgaccgccactcatcaccattgtcatcctcacaaccttcactcgacctctccactaccacaaccactcgaccgcttcacaccgccgtcttctcttcttccgcgagctccactttactcgatccccaatcaccatcttcttcatcgcttaatcactcgacttccccaagttcactcgattcaactccaatcctcgtcgttttcaccactcaagctccacagcttcactcggctgtcaataaccactcgaccaagcaaaatcactcgatcaaccgaaaaaaaaaaattaaaaaccgacgatttactctattaaatcactcgaccggttcacttggttggtttgtgtttttggtttgttgttactaacgtattaacatttatttttgagttttgtccattttaaggtttcatcatgagtaactacatcggagaatcctctatggaccctgattacaatgtagatgaagctgagtcctggtccgctagaccgagagagcaacatgtttaccagagcttcagggatgaattcgaacgctctacagcccgacgtaatcagagaagagctgaaatcgccagaggaaagagggcgatgtcaagtagatatgagctgattgatgaggatatcgagactgagtatgagccagagtcatggcgcagggagacgaagctgctgaacaaatccgacgaggttacagtggaggagtatatcagattcttcgagatgaatgatttctggggaacgaggtatccgtgttatgagactttagcccagctagggttactagaggacgtgcagcatttgttcgagaagtgtcatttggagacactcatgtcttacccttaccctgcctataaggaggagacaatcgagtttctttccacgctgcaagtggaggtgtatgaagcactcacagactttgagctggataccatgggattaggcttcttgacgttctcagtgaatgaacagcggtatcagcttttgatcaagaagttagaagaactgtttggtttccctagtggaaagggaaccaaacccagatttgacagaggagcttaaggatttgtgggccactatagggaacaatctaccgctaaactcggcgcggtctaagagcaaccaaatccgaagtcctgtgatccgctactttcagcgatcagtcaccaacgtcttttactccatggagtctacaggcaccgtgtctaacacggacatggagatgatagattatgcacttacagggattctccgccggacgaaggggaagaatgtcttgagaggcgatctcaacaacgcaccaccagtaatgcctctgttgatccatctgtgtggatacaggaagtgggcgttgacaaacgggaagaagaaggtgagaggagcagtatgcgtgggtggcgttgtgacgccaattctggaagcttgtggagtcccgctcaaggaaccaggtttagcaccgaggatgatggacttggatcatttgcgcaaatgtgagttcttggagtttgacatggctggcgactttcaccgctacaggttcgagcattcatcgattagaatcgccaacattcttctcccctgcattgacgctactaggattcttgagggcaggaacattgacttcaagcctgcgcttgaagatctttatttcgagggtagtccgccaaccgaggagtttagtcacaccgaaggagctacaacagaagatgttgatgagacggatgatatagatgaggcggagtttgacacgagcatgtatcatttcagtgagcatatacctcctgcgagggaaagcaagagtttgagcgaagctcacaggaacaacagcaagctgcagaagtggtgaaagaaataggacaagctactcgccaagtgcttaagggctatcaagtttctgaaggacaagctcaactgctcctcttccactacagctattccgcagggacatctccctcaggacatgccttcgaggagatatgacgcgcccgagccaagtcggcgcaggcctgagcctagagagcaggagatttcgcatgtccctgcgaggcattcatcatttgagcctcgtgaatctgggaggaagaggaggaccacactcactcgatctagcagtaggagcggacgacttctgcagtctcgtagtttacgcgaccgcggtgctggccgcaacagaggagagaggtcgagtttcctcagagctgtgctggccgccacaaagctgatgaggtcgagtacccacctgctggagctgatacagaacaaggcggttcgtctatggcctaggagcaatcgcaggcagccattgacgagcaactacgttcattcttcgactgaggtaagtgcctcacctcaccattgtattataccgtatgttgtgatttgtttcttcattttttgtttctgtgattggatttgtcctgagtactctcttccaagtttattcacacaatggactgtgtgatttaagtttgggggagggctcaggaagtgtgtgttgcattgtgtataattttgagtctgcattcatctaaggcatagaaaaaaccaaaaaaatttgaaaaatttcagaaaatgatttcataaaaaaaagagtgttcatgtagttgcatcacagttaggatcgagtctagagtgtttcatttaggattgttgcatatgcataggggatgatgatgagatagccttgtaagcattttgattcaccggataaactcagtgtcctcgttgctagttgtctgttgcgtagtcaatgaatttgaaataaaactgaaccatgcctagattgctctactcgaccacactgtcatgatcttataccattccctatcaatttgaacctgaatctgatctttaattatcatgtctgcatcaaatttgaactcatggataccctaaaatacttggattctcttattcattttgatcactcttgttaatccaagtagctgactctccttattagagcagttaacccaaacccaaacctagactttctttcaagccctatatcacttttgagtgtttgtgaggtcttattccgattaagcttggtagaaagtgttaggttcgtaacgatagagatagtgtctcatgtagttctagttcgcatttttcggactagataggactaagtgggcgtttatactttgggttgggatgtgtttaaaagaaaaaaaagggggttgattcaatgataagaaaaggtagaagactctaggtgaagtaagctaaagaagcagaaaaagtctagtaaaggttttgggatttgtaaagaaaagaaagagttcttgttagctattggagatgggcaaaagcccttggctttaaaatgttaaaaacaggaaccttagttgttaaagaaatccaaatccgctagatgtaacaaagtgttgagaaagcttctcctagagttaagagaaaagaaaagaatgattagaaaaagtgcttaaaagattcatgaatgaaaagggtagagtttagttcttgtattgggattggaggtgggattaccattagagcttcatttgatgtactctgggtagatgggatcttatctctgtatgcatagcttgggacttacatttagcattctactaaagctt

SEQ ID NO: 547 - DNA, 110826 bp, Arabidopsis thaliana
aagctttcaaggttgtctgggttcgcctcaaagagtattaaagagattcctcgcatcatggcttcaacgaggtacaacgtctaggtaccttctttagaggagtcgattggagataccagatgactctagattcaacaagcaatggtaacttcaacaccaagtaccctgcaaatgctacaacttttatagagaatctcgccaatagcaatagtaccaagaatgtagacttcaagaggaagaaaattgcaagagctggttcaggaaaccagatggttgaggtaaaagctaagcttgattcaatccatagcttactcacagggaaaaagcacgtccactttgctgcagaagcagagacgatagagcctgagtctaagtcagaggaaggcgtattctacattgatggtcaggaatacatgaagtttggtccgtcgtagggcaactacaatggtaatcattttggaagcaaccaaaattcttcgggttttactccaaatcctgcttttcataagacatatccatagagtaacttcacccggattaatggtaacttcacccggatttatgatcgaattcacatagttattttgttcacacaataggtgtaagtattgaaaattaaactagacaataagtacgacaataaaaagaaaacaaaacaagcaaatagcagattggatgcatataaatttagataataaaaatgtcaagcttatggtattctgaggaaatagcttattagtcgatcgacacccacgaattccagacgcagctaatcagctaccagtagagtaccccccctccccccttctagaggaacacatatgagtttaagtttgactactttgctttagtttatcagcatccttttccattgcttatttcacgaacagccaatggaccacatcgagcgctttgaagatctagtgctgaacatcatagctaatggagtctctaaagactacctaatgtgcaagctcttcctcacttcctggggaagccacttcttggcttaagcaactgaaagctggttcgcttaccacctcgagaagcatcaacattgctttcttgaaaaacctctatgatgatgctaagtctgaagagctgcgctatatgctttttaccttcactcaaggacctgaagaagctttcaaggctgtctaggtttgcctcaaagagtattaaagagactgcccgcatcatggcttcatcaaggtacaacttctatgaaccttctttagaggagtagattggagatactagatggctctagattcaacgaacaatggtaacttcaataccttgtaccctgcagatgctacagctttgatagagaatctcgctagtagcaataataccttcgagaggaagaagatttcaggagctatttcaggaaatcagatggctgaggtaaatgctaagcttgattcagtccatagcttactcacattgaagaagcacgtccactttgctgcagaagcagagacgatagagcctgagtctaagttagaggaaggcgtattctacattgatggtcaggaatacatgaagtttggtccgtcgtagggcaactacaatggtaatcattttggaagcaaccagaattctttgggttttactccaaagcctgcttttcataagacatatccatagagtaacttcacccaaatttatcaagcccttccccccttccacccaatgttgagagtaagctggaataaatgcttgagcagattctagaaggagagtccaagttgattgtggacttcaatgggaagtttgatgccatctacactgatctgaatggcaagactgacaatttgagctcacacatgaagaagctcgatgtttaggtaactcaaactactcaatctgttaagagacaagagggttttcttcctcaaacaacatatgtcaatccaaggaagagctgcaatgtgatcttggtcagagaaggacacaatgtttgggaaaaactcaatacagaagacgagatggaacttgctggtatcaatcgacacctactagtgtcgaacgacaccatatggtcatttgtgtgacgaatctgctaatgaagctttctcgaatagagaacgtgagcatcgattgacaatcaaagctagtgtcgactatcaccatcagggtgtggatcaacaccaaacccataccaagcctacgtcaacattcaacaatgtagacttgtcatcaattaagagagatggattgacgaaagcatagagtgtcgatcgacatactccaagtgtcgatcaacaatgggtatgagctgcaccttatgaggttttcattccaacgaagccagagtcagtttacactcctaaagttctgtatctgaagaagcgtcgatctaaaaggatgtacatgataaaaagtgtagagccataatagagaagatcatgactactattccgaaggatgcttaggagtattcatctactcaacttctatgatacgttaaacgtttagtcaacaatggaatcaacttcgaggaagcgaatttgctaaccaaagacatgagttccattttgttgaaaaaggttaagaaggacaagacaaagaaggtattgttttctgagcatgtaaggtccattatcgattgtcagatcacaaaaaacctgcctgatccagggagttttgtcctcagttgctcaatatcatcggaagtgttcagccactccctatgcaatctgggatgaagcatcaacttgatgcccatgtttgttgctgtgagactaggcatgactacctaccggccaacacatataactcttcccttcgcggatcgttccaaacgagtccatgaaggtttcctcgggatctttctagtgaaagttggcaattgcaacattcctacttattttgtagtcttggcctatgacgaagaactcaaggatcctctaatcttgggtagagctttcctagatacacaaaatatttggaaaacaaacattttttacaatacaaatatcagattgcatttttgttagttattattcatactaaatgatttagaaagaaataagtacatgctaaagttaattgaccaaaaaacatttgttaattttccttttggttagtaaaattaaaatttaattttttagatttacacatagtatatgtaaattttttcttttgtgagtttttctatttttttaagagagaacaaaaagtttactcttttccaagacatgtcaacatctgatcgacagacttgacatatggcataatcgtatgagttactaactttaaaatccatactttatataataagatttctttcttgttttagttttatttatttctttaagagaaaaactggtcaacttttttccaacacatgtaaacatctgattgatagacttgacatgtgacacaatcctatgattcatattttatataataaggttaatgatgtcttattggcttagcccaataatacgatgatggatacccgaatcaaaacaaatcgagctttgacgaaatacaactttgtgttctccgccgaaaaagacttcgaattgtatccctcacccaactctcatgtgtcaacaacatctttgattcctttttggatcatcgcctatgtgcctccatttttgggtttatctcaattttgatcaactttttaaggtaagcttcaagcttcttttctcaatttaatttcaaattgaattatagatgtttactccaattgtttcatggcatcaaattttactccgttttggttattatgattacatcaatttccattttcgattatcatttgttatttgattgaatcaatcttttggtacaacatctccgcgaggctcttctcgattagagaaaccaatgcattttagaatttatcatttgttttggtcatagaaaacccaatctctatattattgcttcatttgtttttttttctgtgccacttaattttgggtaactataattgtttttttcgttttggtcggttcatatgccactatcgagttaaattttgttttatgaacttctcatttctcttaggagctattagtgggggtgtttgtaacatcctagtttcaagaatacggtaatgcatgctttaaaaaaattgatttgatgtcaacaaagtacacttatattttcggtcaaatatccggaaagaactccacaattaaaatgtgctaatgttggagcaatttcagaataggtgattttcgaagaagtgattttccaaaccgtgtaagagaggaaacaatatggagaaagatcacatagttatttgtagtttcattacacaagcctttaaagccttatggtagtggaccggacgtcggatacggatgagcccacaaaccaagagagaatgtggggcccaccaaggatgatggtcggggtgttacaatcctaatgaaaatgttcgcataagaagctgttaagacaagtatattgtctaaacgatggaggagtgtggaagtcccttagtccaatggttaaccaagggttcattaatacttctacactatgtctagggctcgagtttcagagaacacgatttcttgcagattaatggtacaaagcttatcggaggtccggaattccacatgcagagtcgttcgtagtggtctaaagtgcggggagagcatgttcatcacaaggatgtcgtacatctagaaccgaattatgaattagaggaagccaagtgtttaaaaaaggttttaaaatatttacaagggattttaaaagagttttaaaacatttacaaggtattttaaaagggttttaaaatatttacaagggattttcaagggctttaaaatatttacaaaggttttttatagatttttatagggtttaaaagtattttgaaaaatttacaagagattttaaaagggttttaaaagatttataagagatttttaaagggtttaaaagggttctaaaagatgtacaagggtttttaaaagatttataatgaatttacaagaagatcttttaaaaactcttgtaaatctttttaaaaccttttaaaatcccttgtaaatcttttaaaacccttgtaaaatctcttgtaaatctatttcccgccaaaacaaatttacaaggatttttaaatgcattttttggctgagaaaaaatttgttaaggaaaaaattttggcgggaatttttttttcggctggaattttttttttgcgggaaaaaggtattgcggaatttgttttttgcggaaaaaataacttttttggtgtcaaaaatttagcggaaaaatttcagttttcaattacatgtttctattagatgaaggtaatttggtcattctgttcaaaggaagaggtatttttaaaaatggacaacataaaagggtattgcttcaaaagggtagtaaaaaaaagatagttttgcaaatcttccaaataaaactgtttatatgtcatattaaacaaatttactgtttatattaaataattatctttcaagagtcaagacatatttgttatatcataaaattgtaaaggtgtttatgtttctactatagttaattgtctactgcaacatgagatcataaagttttgttagaaatgatgataaaagggaagatagtgatatgatataaaaagatgatttgtgaatatgtatatataaatatatcaaactacttcgttataaacataatggctaattcttctaatacaatttaataatactttcaattaatattttcaaatttgtgagatatgttacaaaccaaatttcaattgaagaaaaataaagtaatttgcattcaagataaaattaaataggaaatttgtgatatgttaaaaaacaattgtgttatggtatcattaaaatacaatgacatttattttttgctttcaattttttggtttacctttaggcccgagcataatagccgaatccgaagaaccgacccgaccccgacccaaaaaaccttatccgaacccataattttcaaaatacccgaacgggtctatacttcaaaactcgaaaaaactgaacccaaactcgaatatgtacccaaacatatctcaaatataagtatataccatgtcaagtattcagtagttgaatcaacattgttgacaaaacaaatcctcgtggaagaggtggaggagagaccatcacaatgttcttttgaaaatctcttagttgtaggtgaacttttatttttctacgtgtgtgttcaaaacttagttattaaaaaccttagagagctttgggattattactttaaccgagggaagagagactcttttttttttcttttttgtcaagcaacttgatttcaatcattcaacggaaacaagtttactgataagtgtgtattttgcatgtttttagcatccatttgtcatcattttagtatcatatcatcactgttttataccatttcacatcatttgtcatcactttgcatgtttaggatagttttacatgcatgttgcatgtttgcgttgatttcaggtgatttggagctgttgacgagctatctggaagaagcggaccagatcacgacaaaccactcgaccaagaggtcgagtaggagcttcaagatctcaagagactattcgacccccaggtcgagcagaggacatcaccacttcacttcaccactcgaccacgtggtcgagtgccctcatcaccaccactcgacctcttcactcaacctggaagtcgagtatcttctgacaccactcgatcacatcactcgacccccaggtcgagtgccttcaccttcactgccagaccactactcgacctcatcactctacctagaggtcgagtatcgccatcacaccactcgactacatacttgatgacaagctttagagccttcttcattccgccctcaaccagacactcgagcaccaggaagaaaagaagactccagctattcactcgacctctcactcgaccacctaggtcgagtatagttcttaacccgtccaaatacttcgtcgttttgagtattagggtttcgggatatttggctataagtagcatgtacttctcattttcgcagacaataagtgtttttacctagttttatttccgcagaccttgtgttctagactttttgtaatccggatttctctttatctattcagtattcagtattcagtttctgtacttgatttcgtttactattgttcattctgttatcatcctgctgttacattgttgttatcatgttttcaatttgttcaacgtttatgctttctgttatgatgtctgagtagtgaataggtttctgaggatgggttagtgtagtgtaaaattctcagtatgctaggtgattgagtattgattgatagatcccttctggattagttgttcttaatgcctattgatttctgatcaactggaatttgaacccagacatttccgcgcccaaaaggtgttcgatgaaatgtctgaaccactaattccagagattcgtgaccctgtaccaaggtattggttgcagggagcgttttggctttaacttgttgattcgtaatgcctgttaggttagctctcgtcaatggtgattgagtctgggactaggttagcttgagagtctctgttgcggtggcacttagatttggttaatgaacttgttgtctagggttaatttattgagcatgtcaatcacttgtaaactgaggaaacgaaactactcaattatcccatccttaggaattctttatctgattgattttattgtttactctactgctgtgtactgcatcctgtcatctgttgcttagtttctgcaattctttactgttactcgacctgatactcgaccacccagttgtctggcaacagactgtgcagtcgagtatccctgtttcatttcctgtctgttactcgacctgtcactcgacctcacccagtgctctgcaaagagctgtgttagtcgagtgttttactgtttctgtttgattttctgttttctgcatgttcacttaggactgctagaacacaccaaaacctgttatgcttggcttgacttagtgacttttgatcacatcttgattgttagcatcacacctatttggattgacaacctaaaatactacaacgacatgatagtgctttaggtttaattgatcttaaaaacctattataaatttggcgccgttgccaattgggtgtttgtttgttacatttaagatttcagacttgcttagatcaagttctttttcaattttctttttagttactaactgtgtgttcttcttgttgtcttcttgatccaggtacacctcttctgtatgcgaactcgatcaacaggcaaccagaacctccttttcaccgacaacatcaaccgcacagcccgcgaaatcagaaaaaagagaaccacagtcaaccctgtacctcagcaaccactcgttatggctgaagaacagaatcaacaaaatggccctaccaacattggtgctggagatgcaccacgtgatcaccgtcagaggaagggaattgcacctcctgctatccagaacaacaatttcgagattaagagtggtctcatctcgatgattcaggggaacaaattccatggtttgccaatggaggatccactcgaccaccttgatgaattcgataggctctgcaacctaacaaagatcaatggtgtcagtgaagacggatttaagctccgtttgttcccattctccttgggcgacaaagcacacatctgggagaagaatctgccccatgactcaatcaccacctgggatgattgtaagaaggcttttctatcaaagttcttctccaatgccagaactgcaagacttagaaatgagatttttggtttctcatagaagactggtgaaagcttctgtgaagcatgggagcgtttcaagggttacaccaaccaatgccctcatcatggctttactaaagcctctctgctcagcactctttacagaggagtcctaccacgcatcagaatgcttctggataccgccagcaatgggaatttccagaacaaggatgttgaagaaggctgggaattggttgagaaccttgctcaatcagatggcaattacaacgaagactgtgataggaccgtcagaggaacagctgactctgatgacaaacacaggaaggagatcaaagcgttgaatgacaagctggacatgattcttcttagccagtagaagcatgtgcacttccttgttgatgacgagcagtatcaagtccaagatagggagggtaaccagttggaagaagtcagctacatcaacaacaaccagggtggctacaaaggatacaacaacttcaaaactaacaatcccaacctctcctaccgcagcaccaacgttgctaatcctcaggatcaggtgtatcctccacagcaacaacaaggtcagaacaaaccttttgttccctacaaccaaggtttcgttcctaagcagcaattctaggggaattaccagcaaccaccaccaccttggtttgcacctcagcaaaaccaaggtcctgttgctcctgatgctgaaatgaaacagatggtccagcagctgctacagggacaagcatctagctcaatggaaatggctaagaaattatctgaattgcaccataagctggactgcagctacaatgacctgaatgccaaagtggaggcattgaataccaaagtcagatacttggaaggccaatcagcatctacctctacaccaaaagttacaggacttccagggaagtccatacagaatccaaaagagtatgcaactgctcacgccatcaccatttgccatgatcgagagctgccaactcgacctgaccctgatttcgtcactggagacagtgatgttcaagaaggggaggcttgtactcaggttgaagtctctgttgttgaattcaaccattccgctggttctcgccatctcactcaatccacctcggaagagaaggccgccataatcgagagaatggtaaaacgattcaaacctactccactaccctcacgtgctcttccgtggacattcaggaaagcgtggatggacagatacaagtctattgcagcgaagcagttggacgagattgaagcagtgatgccactaatggaagttcttaacctgattcatgatcctcacaaagatgtgagaaatttaatactggaaaggatcaagatgtatcacgattcggatgatgaaagtgatgccactccatctcgagctgttgataagaggattgttcaagagaagttagaagatcctggatctttcactctaccatgttccattggggaatttgctttcagcgattgtctgtacgatctcggagcctctgttagcttgatgccactctctgtggcaagaaggttagagtttattcattataaaccttgcgacctgactttgatccttgcggataggtcttctagaaaacccttcggcatgctgaaagacctaccattcatgattaatggagtagaagtgcctacagacttcatggtgctggatatggaagtagagcataaggatcccttaatactgggaagaccattcttagcttcagtgggagcagtgatagatgtcagggaagggaaaataagtctcaaccttggaaagcatatcaagttgcagtttggcatcaacaaaactccacaagggtcaactgaagatggaagaacctctggaaatgatagagcgatctcaggagaaggatatgagactgaaagagtgaaagaacttaaaaagaggtctgataagcaagatgaaactatagagaagctagcccacactattgaggaacttaggagtaagctaaatcagatgcagaaggaagctcaacctaaaggcaggattaacactattccgagaaaataattcacttcaagatgatctcaagagacagattaccctccagaagagaaggaagcctattttgaagaaaggggaattgagtattctgctgcagacctctccagggaggacactaagcatgatgatggtatcagagaggattatgctgaccctctctacagttcattttcttcttgataactgtgaggagtcaagctagagacttaaaacaagctcacttgggaggaagtcccatgactatccttgtaaataatttttacttttttgttattttttgatttgttttggttgtgtttgtggttctcaggaagaaaggagtaacgtgaaggtagagtaaaaattcaaaacttttactctactgatggcgtagagatcgagtatattggtcgagtacgagtgatgtttaaaaacctaaaaaaattttaatcatcgttttactcgaccaacagaagctacagagtcttccaggaagtttatcaagagacaagaagcagccattgtcttcctggaggttttctagtgaacagagaagagacaagaagacactatgggatccgccgctgacgcccatgtctcccatgcacaccaccaaaagacaagaaatctaacttctcttcgcttagctactcgacctcttcaccttatcctatcttcaccttctactcgacctcgacgccatcaccatccccacacctattaaactcgaccccattccccccttattcatcacaaccaacaaacccatcctcatcaaagccacatacactcgacctcttcgccacttgaccgagctccccgttcgcataaacactcgacttcttctccatcatcatccgtccaaagcagcactcgacctcaccatctttcttaaccacgcactcgaccgcttctctctcgcctcttcaccaccgtctcgagctaccactcgaccgctcctcgccatcaccacctctcaatcgtctcaacttcacttgaccgcttcacgccatctctttcaagctcgtctctcatcaccaaacactcgattcacatcaccttctcttccgtccaagcctcatcattcgccctgaaggaatcaccgccgcagctcatccccaatccacttgctactcgaccgccactcatcaccattgtcatcctcacaaccttcactcgacctctccactaccacaaccactcgaccgcttcacaccgccgtcttctcttcttccgcgagctccactttactcgatccccaatcaccatcttcttcatcgcttaatcactcgacttccccaagttcactcgattcaactccaatcctcgtcgttttcaccactcaagctccacagcttcactcggctgtcaataaccactcgaccaagcaaaatcactcgatcaaccgaaaaaaaaaaattaaaaaccgacgatttactctattaaatcactcgaccggttcacttggttggtttgtgtttttggtttgttgttactaacgtattaacatttatttttgagttttgtccattttaaggtttcatcatgagtaactacatcggagaatcctctatggaccctgattacaatgtagatgaagctgagtcctggtccgctagaccgagagagcaacatgtttaccagagcttcagggatgaattcgaacgctctacagcccgacgtaatcagagaagagctgaaatcgccagaggaaagagggcgatgtcaagtagatatgagctgattgatgaggatatcgagactgagtatgagccagagtcatggcgcagggagacgaagctgctgaacaaatccgacgaggttacagtggaggagtatatcagattcttcgagatgaatgatttctggggaacgaggtatccgtgttatgagactttagcccagctagggttactagaggacgtgcagcatttgttcgagaagtgtcatttggagacactcatgtcttacccttaccctgcctataaggaggagacaatcgagtttctttccacgctgcaagtggaggtgtatgaagcactcacagactttgagctggataccatgggattaggcttcttgacgttctcagtgaatgaacagcggtatcagcttttgatcaagaagttagaagaactgtttggtttccctagtggaaagggaaccaaacccagatttgacagaggagcttaaggatttgtgggccactatagggaacaatctaccgctaaactcggcgcggtctaagagcaaccaaatccgaagtcctgtgatccgctactttcagcgatcagtcaccaacgtcttttactccatggagtctacaggcaccgtgtctaacacggacatggagatgatagattatgcacttacagggattctccgccggacgaaggggaagaatgtcttgagaggcgatctcaacaacgcaccaccagtaatgcctctgttgatccatctgtgtggatacaggaagtgggcgttgacaaacgggaagaagaaggtgagaggagcagtatgcgtgggtggcgttgtgacgccaattctggaagcttgtggagtcccgctcaaggaaccaggtttagcaccgaggatgatggacttggatcatttgcgcaaatgtgagttcttggagtttgacatggctggcgactttcaccgctacaggttcgagcattcatcgattagaatcgccaacattcttctcccctgcattgacgctactaggattcttgagggcaggaacattgacttcaagcctgcgcttgaagatctttatttcgagggtagtccgccaaccgaggagtttagtcacaccgaaggagctacaacagaagatgttgatgagacggatgatatagatgaggcggagtttgacacgagcatgtatcatttcagtgagcatatacctcctgcgagggaaagcaagagtttgagcgaagctcacaggaacaacagcaagctgcagaagtggtgaaagaaataggacaagctactcgccaagtgcttaagggctatcaagtttctgaaggacaagctcaactgctcctcttccactacagctattccgcagggacatctccctcaggacatgccttcgaggagatatgacgcgcccgagccaagtcggcgcaggcctgagcctagagagcaggagatttcgcatgtccctgcgaggcattcatcatttgagcctcgtgaatctgggaggaagaggaggaccacactcactcgatctagcagtaggagcggacgacttctgcagtctcgtagtttacgcgaccgcggtgctggccgcaacagaggagagaggtcgagtttcctcagagctgtgctggccgccacaaagctgatgaggtcgagtacccacctgctggagctgatacagaacaaggcggttcgtctatggcctaggagcaatcgcaggcagccattgacgagcaactacgttcattcttcgactgaggtaagtgcctcacctcaccattgtattataccgtatgttgtgatttgtttcttcattttttgtttctgtgattggatttgtcctgagtactctcttccaagtttattcacacaatggactgtgtgatttaagtttgggggagggctcaggaagtgtgtgttgcattgtgtataattttgagtctgcattcatctaaggcatagaaaaaaccaaaaaaatttgaaaaatttcagaaaatgatttcataaaaaaaagagtgttcatgtagttgcatcacagttaggatcgagtctagagtgtttcatttaggattgttgcatatgcataggggatgatgatgagatagccttgtaagcattttgattcaccggataaactcagtgtcctcgttgctagttgtctgttgcgtagtcaatgaatttgaaataaaactgaaccatgcctagattgctctactcgaccacactgtcatgatcttataccattccctatcaatttgaacctgaatctgatctttaattatcatgtctgcatcaaatttgaactcatggataccctaaaatacttggattctcttattcattttgatcactcttgttaatccaagtagctgactctccttattagagcagttaacccaaacccaaacctagactttctttcaagccctatatcacttttgagtgtttgtgaggtcttattccgattaagcttggtagaaagtgttaggttcgtaacgatagagatagtgtctcatgtagttctagttcgcatttttcggactagataggactaagtgggcgtttatactttgggttgggatgtgtttaaaagaaaaaaaagggggttgattcaatgataagaaaaggtagaagactctaggtgaagtaagctaaagaagcagaaaaagtctagtaaaggttttgggatttgtaaagaaaagaaagagttcttgttagctattggagatgggcaaaagcccttggctttaaaatgttaaaaacaggaaccttagttgttaaagaaatccaaatccgctagatgtaacaaagtgttgagaaagcttctcctagagttaagagaaaagaaaagaatgattagaaaaagtgcttaaaagattcatgaatgaaaagggtagagtttagttcttgtattgggattggaggtgggattaccattagagcttcatttgatgtactctgggtagatgggatcttatctctgtatgcatagcttgggacttacatttagcattctactaaagcttaatcatttttttgagagatcccctgttactaaagcctattctgtaagggaccatctttgtctcttgaccttttaccttagccaaatgagttctttgatgatgcattgcttgattcacgttccagaactaatgaatgttaaagggattggtagatttgaaaacttgtgtaggtcgagcatatgagtcggattgattgattgatgaggcatggctaacgtttttaagtagaattcgatcttgcagcttagaactttcaacttggacattgatttcatctagtctatctggtgctttggctctgagtccccgctttcaaacctcacttccagcttgttcttgattgtttgcttgagggcaagcaaagactaagtttgggggagttgataagtgtgtattttgcatgttttgagcatccatttgtcatcattttagcatcatatcatcactgttttataccatttcacatcatttgtcatcactttgcatgtttaggatagttttgcatgcatgttgcatgtttgcgttgatttcaggtgatgtggagctgttgacaagctatctggaagaagcggacctgatcacgacaaaccactcgaccaagaggtcgagtaggagcttcaagatctcaagagaccactcgacccccaggtcgagcagaggacatcaccacttcacttcaccactcgaccacgtggtcgagtgccctcatcaccaccactcgacctcttcactcaacctggaagtcgagtatcttctgacaccactcgatcacatcactcgacccccaggtcgagtgccttcaccttcactgccagaccactactcaacctcatcactctacctagaggtcgagtatcgccatcacaccactcgactgcatactcgatgacaagcttcagagccttcttcattccgccctcaaccagacactcgagcacaaggaagaaaagaagactctagctattcactcgacctctcactcgaccacctgggtcgagtacagttcttaacccgtccaaatacttcgtcgttttgagtattagggtttcaggatatttggctataagtagcatgtacttctcattttcgcagacaagaagtttttttacctagttttatttccgcagaccttgtgttctagactttttgtaatccagatttctctttatctattcaatattcagtattcagtttctgtacttgatttcgtttactgttgttcattctgttatcatcctgctgttacattgttgttatcatgttttcaatttgttcaacgtttatgctttctgttatgatgtctgagtagtgaataggtttctgaggatgggttagtgtagtgtagaattctcagtatgctagttgattgagtattgattgatagatcccttctggattagttgttcttaatgcctattgctttctgatcaactggaatttgagcccagacatttccgcgcccaaaaggtgttcgatgaaatgtctgaaccactaattccagagattcgtgaccctgtaccaaggtattggttgcagggagcgttttggctttaacttgttgattcgtaatgcctgttaggttagctctcgtcaatggtgattgagtctgggactaggttagcttgagagtctctgttgcggtggcacttagatttggttaatgaacttgttgtctagggttaatttattgagcatgtcaatcacttgtaaactgaggaaacgaaactactcaattatcccatccttaggaattctttatctgattgattttattgtttagtctactgctctgtactgcatcctgtcatctgttgcttagtttctgcaattctttactgttactcgacctgatactcgaccacccagctgtctggcaacagactgtgcagtcgagtatccctgtttcagttcctgtttgttactcgacctgtcactcgacctcccccagtgctctgcaaagagctgtgttggtcgagtgttttactttttctgtttgattttctgttttctgcatgttcactaaggactgctagaacacaccaaaacctgttatgcttggcttgacttagtgacttctgatcacatcttgattgttagcatcacacccatttggattgacaaccttcagtactacaacgacatgatagtgctttaggattaattgatcttaaaaacctattatcatttacaaatactgaagcatacaaggatagaaatgcttaaaacaaggtagcaacaacaagcaaaggttaagataaaagctacacaaagatagctagtagaaatcaacaaagagtccatgagagcttgagggccagacctagatggcagcttggcacaagggatatcacaggttgttgaagagtcatctatcgacaaagcgttagacgaggcaatggtcacagtcattagacaaagtgacgttgagagacggtccctagccgagatactcgtagacacgggaagagctacatgagttagctcatcggtagagagattggtgactatggtactatagtcgggtgtggttggagataacagagtgagaaagaattggtaatcaccgctccttggagacggaatcataatgcctttctttctcaaaagtcgagtttcttgaataagatacttagggttgatggttggcacttgatacatcttgaaattcagaggaaacaagggtggaattgtgaagaagctccggtaatcctctttccttggaagcgggatcataatgccggttttcttcgagcttagccttttaaagtggtgaataacaccatcgttttccttactggggaaagactttggggacaggttggattcgcatatggaagttgcagtagctctatgcgaaatcatgatccaacacagtgaggtaaatggggttgtggggtacttaagatcagataatggcttgcggtaagggattagataacatacgatcagactttcgcggtaagggattagataacatacgatcagacttttgcaatgaaacaaaagaaacaatcgagctaatctatcaaccaggtttcgtgaaaaataattgcaatcccaatctaaatccatcactaccatcacatgaaagcgtccactgctctctgtcaatgagaatgagttcaataaaattggccttcacataacataattaagatcagaccttggccttagaagaggtgggcttaatccagcagagatcctcatgggcttcaaaaggttgggtaatgggctgaagggagagcataaataacttgggctaggcccaaagcgagagactcttttttgaagctttttctctgtttgtttttctcttattgtaataaaaggttttagcttctgaattggtttttagctctatcacttctctcctttgatgttgcagtttagatcctcttcacagtcagtcttctctagactgaaagacctcaacttatatcttcctgaactttatccaaattgatatatgattaagaacaccaccatcaaaccatgtccttgttgctttaacgattcacagaccaaacacactttaatcccttttcacttcacctcttgtgaaaaatctttcacatatttctttttcacggtgtctctttccatcctcttatgattttgttttgtctaatcaatacgtgccttaattttcaaactttccacttgctccatactttttcttcgaaaatcccttattttccttgttagtaaaaccttttatcaagctcatcgaggggtagcttagttaagtcaatatctctatcctattactatgtcgttttaatccttagattgtttatttaaactatgatgtctcatcattaggtttttatcttatgaaatatcaattaatcaaaattttctaaatctctctatctcttcttctccgccattaaccgcacatttctcttctttctggttaagtttattcttcgataggcttcagaacttatcatcatcatctttttatttagtctctcttgttctctgaaaacatttatcgaaggatcaattaaacttaacaatcatcttctttctcaatttcttctgatacctcatctctatcttctaattctcatcttaattctgctatttctttgataagtctatttcgtgcttatcaagattcatgttttggatacagtacttcatccacaaataaaaggaacgctgataaatctggttttatggttccgagtcactagagagggtctggatttattgggactactaataacttggaaaggattggtgggaatggaacggtgaggctgaatcaaaggatttaatttgttgggggcttggagcttggtaactgattcttcaatttaagtttgggtatagtgagtagacttcaactaaaatgcttttgcgaaaagaatttgggattgattcgcatatttaataatgatatgtaaacattggaagttcgggacttagtagtgagattccttcatcatttaataattttgtgaacttagaagaattttgggcacttgtttattgcccttgagttaaggtttttttttctaaattaagcaaaaataagtcacttaacaagagaacataaatgtgtctgtaaaaacttaagtgctgatttgttaatttgtgatatatgttcttagagcaaatcctacactatgagatgctctctaatgatgttacttgttcagtgtctaggttatctacttatctcatttaaatataggactgagctataggttttagatcgttggatacataaaagagacttttctgctttatcgaaaaactattttgtaaacgctgatagaatgttttgactggttttggttttgatttatttctgtttgtgcttctcgctctttacacatgtatttgattgtattctgatggttctgatctctttaaaataagaatcgagttccaaaagccttactgtgtttgtttaccttattaattctcctatcttcgtttattagtggattctttatacttttaactcacatgattctttaccaacttgtatgaaagtgttggtagtgccacgaacaggttttgcaagtctttgaactattaatttaattcactttttttatcaaggaactaagagttttattgtaatcagaaacatgatctggttcatcctcttatttgtttctaatgattagagcaaagaacaaagatttggtactttaattgaaaaactataaaattgattactccatttggacttgttgccgtcatggacttgttgggttactatcatttttgtcatttatttgggctggttgccgtcatgggcttctagcaagtgaaaatttaattaactcaatagattagtaacaatgaattttgtaacaaataacttgagatgcccgctaaaaggctctccacgtgtttttcattctgaagttgcctcgtcttaccgtggtcatttcattatgcgaaaaagtcatggtaaataatcattacatttacccacatttcgattcatttatctgatagcaaattattttaaatttaaattaatcttggatgcctcattaatatgcgtaatagaggaagaggaaacaaagggacgatcatctttttttttgtaaaccctagtttgctttcactggctactctaacttttctcttctcttgtgtcatttctcaatattgctctcaccaccggcgatttactcgcctctctcacaaatcctccatctctaaccttgtcttgatcatattctttccatctccgacgctctctctcgaactgaccaccgtaccctctcaatccagtttaaacgatctgtctctctcgtcatcactccatctccgacgttttctcagccttctactccttcatctttaaggtaagtgtgagttttcgaaacccagattttcttcttttcgattattaagttcttatttatttttcaaagataaattttgcatgtggtttcttaataagaggtatttgttttgaaatataagatttttaatatttgaattttggaagagtttgagatcttttatagaaacctagtgtacttaaaaaaaaaacaatttctttaaaaaaatttcagtttaaacaacgatattttaccttactgtttttgtttcttttttccctactaactatactcgttttctcgatgtatcttgtgcaagatgattcctaacagtggttccggctctggaggttatggatctgatggttctggctgtggtggatgtggtaatggtcgtgaaattggtggacgtggtaatggccgtggagatggtcgcagtggtgacagtggagatggccacggtggtgatcatggagatgaccgtggaattggtggtggttaccgtggaagaggaagaattctggccgcagttatgggacgtggcagtggcaatagaaggggtagccataggaaaatcaacattgacgccttgctatctcaagaagtaaggacattgatgccgcttccccacccggatagaccagatggaactttgtggtacgtatgaatgtctttcttgtatatatatgagataagaaaagtgattgtgtgcatggtgttattaacttgagtaggacagaaaatatgatttggttcaccgattgaatattcaaagaacttgtgaaattgtatataattgtgttcactgatttggatcaagataataattgtgtttttagtttttatatatatgacataagcaaattgattgtttgttatttacttaagtagaccaaaaattgtgaattggtatacatttacttgagtagagtagaaaatgtgagtaaaacagaacttgtgagagtgttctttttaaccctaaacgacattttctatatttaactaaatttttttatgaaacaaaacttatttgtctatttgtgaaacaaaacttatttgtgtgtctaatttgttaattttctggatttaaggtttggtgtcgataatggtcctcacgtgcagttgtagctacaataagaagacactttgatggtccatggttcaacatatcaacttttccccatcatgctatactccaatgatgggggacttcattgtaagtttgatatatttttccaaatacttcataaaacttactttatcttctaatttgtaaactaaattgtttgttctcctttcgcagaaatctttctattgggatccaattctttgaatgatgtgtatcacctctagtatcatgtagttgttgtatgctttagagacatgatctttaaggctaaatcttcaaggaataaacctgattggataagtgcagacacatgggaggctatgttggagtattggagcataaatggagctaagaagagaagcaagacagcctctgccaatcgaccctcctaccgtgacggtttgggccacatcgacacaaagcaggtgctagatcttatgaacactccgaaacctaatcataagtgaatccaaatttattacatttttgttatcttgttaataagtaaacgtatccataatgtgttctacaggttttctacaacggcgagggaagttgttgagccttctatgctcccaatccttagggagactcatcgtaaagcggatggcacatacatggatgagaaggcaaaggccttggatgaagaaattcagagacattgcgacaagatcatgctctataaactctgatgatccttctactgatagcaccaattccacagtcctgacttgtcttgacgaagacgagatattctacaagataaaaactttaattattcatgtgcttagaatttgataaatatgcttagaatatgataatattgataaaacagaatgggcttgaatggtttgagataaatattggtaaaacataattattcacttggactcatatttatgtttgactggttattaaaagtacaatgtcgttgattctcatcctcctcgccctttgaaaacggaagaaaaatacaaagagttatcacttgacatgttattccagcatagagggtcaagccgattttgggatgatgctaaattgataaaatatgtggatcaaagtgatcatgattatattcaacgcaactatctctcaaaaacaagtaaaccggatcatcttatttggagttaatttttcacggtaactatacagtccgctcgggctattggttactaactcatgacccgttagacagcattcctacaatggataaaccccatggttcagtggaactaaaaatcaaaatctggaacttgccaatcatgccaaagctaaaacattttctatggcgaatactgtctagaggtataccaacaatggaacgcctaaccacgaggggaatgcgcatagaccctggatgcccacgatgtcgaagagagaatgaatcaataaattacacacttttcatttttccttttgcaacaatggcttgtcgtctagctgattcacaaatctatgggagcaccttaatttctgacaacattgaagacaacatttcaaaaatcctactacttctccaaaataacacgataacagattctcagaaacttattccattctggttgctttagaaaatctggaaagcacgaaacaacgtggtgtttaacaattttagagaaagtccatcaataacagtgctaagggctcaggctgaaacgaaagaattgtttaacgctactcaaactcaagtcccaagaagataacataagcgaaagaatgcaacaaagaatactacatggataaatccacagatgccatacataaaatgcaatttcgatgttagttttaatgtgaaggacctaaaggcaacaggaggttggattctcataaaccacaatgggacacctgaacattggggctcgatgatactagaccatacaagcacaccgctagaggcagaaacaaaggcgttattggcaacacttcgacaaacttggatttgaggctatatacctgtcatcatggaaggagattgtcaaactttgataaacctagttactaactctacttcccattgttcgttagcgaatctactaacaactattcagttttgggcagcaaaattctatagcatccagtataaattcatcaagaaggagggtaataagatagagcatgatttggcaaaattttgttgtatttcatcttgcttttattctaattctggaactcattcctagttggcttcaccaacatccctgtaacaactctatttaatcaatgaaattgctttgacataaaaaaaaaaggggtattgttgttgattggttttcttgagaagtgattaaaaattatagctcaaatatttcactagttaaacaacgttcatatacttttgcccatttattgggttccttgtgtataattattgagcatttgtttgtttttgaatgattgtgctattttatcgtattacaattaagtgatttaaaaactgaagttgtttatatggtgcaaacctattctgattgatgtctttgatttcttacacgttctaacacctcaaaatagaagaatatttggtgttggaggaattagtacatgcgagcgaggtgaaagctcagtaactggtgctttgggtagaatcactcttgaacgtcaagtcataaccttgcaagagcagctagcatctattttgaagtccatgaaacaatacatggcaaatggtgcatcaaactttgccttgacacagcgaagacaagaaactgacgcttcggtaaccattccagaatgtgctaacaacaacatggagactcaagatgctgatcatgaccaagatggagttgacatcgacccacctatcttgatcctgatggtgaggagtatgaagatgtgctgggttttaagtcttgtactctcttttggattactttccttctctttttatgcttttgagacttgtttaattaagcttttcatccaattaaggtttgaagacttgaacgatttagcttttcacttacggtttcaagacttaaatgtatgtaaatattattgtattttgatgtttgatattattctattataatgaattaaaattttactttatgtgtgaatgatgcatttttattttgcctcaggcttttacctgaaagataacacgactacttcaagtgcacaaccaatcggagtaatattttaggatcaaatccacatggagtgtagctcaaggtagaattcaagttagacgacctggccaagacaaacaaaagagggggtttggagtatgcaatgcaaataagtaaagagtgcaatgaatgtaaaagaatgcaatgaagaaaacaatgaaagaaagcaatgggaaagcgagtgtaagcgataagatgaaggcattaggttctctagggtttcttcgggtatcttggttctacaataaaaggttagaatcaagtttaggtgataagatggttaggtttgttttcttccaagttctcggacatacgaaactcattcatgtttggctaaccttatggtgtataggccgagaaccaactaatctccttatactccgttactcaactaaccctatggtgactaggctgagagcaagcaacgacacatagattgacacattaagttcaattttcactctagtccataaagccctataactcaactatcgcatgttataacaccatattcattcattgttaggttaaaacgaattacacaagattctaccaagtataaaacgcctaagataatgtactaggtggcgtgctggacatacatgcattaagatcaaactcaactagaaagaatagtgtaaacgatcaaataaaaccatagaaatcgccaacgtaaacaagatctaatatccccatgaatccccttcgaaaccccatcaaacccaaaaagagatctactcacacatactcaaagaacacaacatcatatgaataagagattgcatataagaatatgggttttgtaaaaggggttagagatcttctttggaaatccaaaggttatgattcttcttcctttaacaagtagagaatagagaagagaagaagagaaaagagaaagcaatgaagacaaaaatgaggatcttcaagggacgatgacttggtagcttggatcgacgaggtggaaatccaatggacttgagagtcttgtcgaaggtggcgacaaagggaggctgctctatttcgtggtggagataagattttcccgaatcttagttttgtgtcgatcgacactcgattgatctcgaactaaattcgtccttcagattagtttattcagttttttctccataatgcctccttatctcctttcttgtcccattcgtctaagtatctgaaaagactctaaaaagaactataaaaataacaaaaagactcttaaacctatacctaaatcatagctaaaaacagtacaaatagaggtatatcaaatcccctaggtttagcttttgcttgccctcaagcaaaacacaaaagccgaacccgtggaaaaggtttgagtatttttaaattataataatatatatattaagatatttattccaaaaaaagaaaaaaaaattaaatatgtaaatttttcaaaaaacatatgtggaatagaataaatttatattcttattttgttaatctttttcttttttaacaaaaaaaacacatagtaacaaaaaagtatgttcgatttaccatatatttttcagtataaataataacatgatgcatctcattctatcataattttctaagtatatagcagaaacagttagggttggtcactattattgattaatataaatattaattgagtcgtcggtaacagttagggttggttacttttcttaatggcgcctctttcttttttttttcatcgcttttgccattatgggcacttctctcttagtcgcgttgtttctgctcaatctattcgatgagccgtaaaacatatgtttttgtatgatgttatagatgatctaatgttgtttacgtagaagtttatgctctttcatatcagttataaatcgtttgaccttgattgaggtaaattttgggtttaaagaagaaggatcgacgataagcacacatgttttattagctatacacttcgctagtaatgttcaatttggtagcattaagaattttggtttgaacaatttctaattgtgtggatcttaaatcgagtatatgtctgaaattgtcaacaattgagtgcatgtggtggctatgctggtcttaaattgcacaaatcttagaaaaacataggcaatgattaggtctttgaggttacatgcgatttggtgggaaacaaattgtgtagtactttaaaataaattattttaaattgttattcagcggttctaacgaatgcagcattaactgtttttgtcctagaagtgtcacaagctaataaatcttgggaagtgatcgtgttaggaagctttcctggccaatatagttaaattgtttgtgttataggacaagtggatgtagttatggataatgaggcaactttcgtattttttttttaacttaggttgcatatacttcggttggatggtatctaatcagtgaaaaggtaagaagacttgtgttgaaattgggaaatagttgttcttctttgaatatgaatttcaatataaaaaaattaaaattggaaaggcgtataaaaggtaataaatttaattgatgtagtttccttgcattgcattatgaacaattgacttcaaaaatttaggatacaaagagggttgatttccatataaaaatgacggagaaagaaagaaactcggttaacactataagacaaacttggattatcaaatatggcaaaggaaagtgagaaaatagtcatgacatgacctctttatggcaacgtgtcactacaagaaaacagacgattaccaactacaatggaagtcgtaaacggaagttatgcgactattagacgactaaacaccatagtcttatatacataatcgctaagtaccgtagtcgtatatgagtcgtaagtttacgactaacatacgactgttacacagtcggcaaaaaatagtcgttgattagtcatactatttggagaccatatggcgactattgtatgatcaattaaactgtatatggggtatgattcttgtagtcgtaatattctggtaattttattgacgactacttggcgactatcttacgatcaattgtactgaattgtgggcactattctgtttgtcgtatcgtagtcacttaattgttaacgactaatttacgacgcttgtacgatcacttaacgacttagtgaagcttttagctaatagtcgataatcttggtgactatgttatgactataatacgactatgttgcgactatattacgacgactttacgacgacgttttgtttccgaataagaatttggtcgtatcttgattttttgttggttggtcatcgattctgtgaattcggtttgtttgttgtttgaaatactacaaagtataaaaaaagacatttattattgaaaatcctatcaaatacataaaacataacttacacttaatgttcaaagttctaaacacacacacacataattgttcaaagttcaaagttcaagggaaaagggactgaaatctaaacctattgatcattctgtggagtatctggtagaggctctgtggatgtcgaagattgagaggcaatgaagttaaggaattgcagatctgtttgtcggggatacttctccactaaggacaagtgtttgagcttgttcttttgctcagccgtgactcgggctatctcagtttcacgcgcagcaatctcagaatctcgcttctcattgtaggcagcctgctcttcaatcttgcgttgcgcttccttcagccgttcttctaaatctagaaaggatgatgatgattctccagggagattgtggttcgcacaacctaatgtttctttgagactcccaagtccataagaattgcctcttgaatccctttcggtggactgaaaagaaataaaaaagagattagtgacagaataatcataaactcaaagtctaggaattagactacaacattttacctcgagaaagatggttgtatactcctcatttgtcagctcccgaggtcgtgaagtgccatcagacacaacagaagctttcgcctctagttgtgacaacctatctctcacattatactcatatatttgaataatcttctccgccttccgatcaacatacgtaccatccgacttagtatgtgtctctacaaacacctcataaagagtgaccgttcttccggatttctcctcctacaatgaaaccaacacagctcaaatactcaaaaacatacatgtgaggtaactgaagaggtaacaaaaacacttaccaattcgtcttggatttcttggtaagactttggcccagagaagtggatgtgaggaccgagaccgttacggtcagagagacgagctttgtaataggtccaactccgtttttgagctggttcggtgtctcagtaagcgcacataacaccccacagagttcaaccaatctatggaggctgctctcgagttctccttgcaatgctaaccatgtccttcaagcatcgtctacagatctcattgaagtaatactacagtgtccctgttattaagggatcccaactgtgagttttctacaaaaaaagagtagatttagttagtgaaatttaaaagattaagctgtaaagttaagaaagtaagagagatgcatgacagcttactgcaaactctagaaataacctctctcttttatccaatggcacacatgaccagttatagtagggagcattaaatttttgtgtaaaaatccgagtcatctttctaaccaactttgatccccagtcgcaagtaaacctccaaacacatgaaacaatgaaagaaaaaaaacatgttacattagtgaaataactcaacagaaagaatagaccacaacatataaactgagatgactacagaacacagtctaagctagattatctaagcaagacaacacaatctaaccacttaagacaacacatgattgcaagtgaacacaagagagcaagccaccataacagaacacaagcggtactagacatgaccactatgttcacacaagatagcaagcgttcacaagagagcaagccaccacaacagaacaaaagatagcaagcgaacacaagagagcaagccaccacaatagaacacaagatagcaagccaccacaacagaacacaagcggttctagacatgaccactatgttcacacaagatagcaagccaccacaatctaacacaagctaatcaagacaaaatattacagaagctaatcaagacacaatctatgttcacacaagatagttcacacaagatagcaagcgaacacaagagagaaagaagctaatcaagacacagtctatgttcacacaaaatagttcacacaagatagcaagcgaacacaagagagcaagaagccaatccaatgacacaatctaatacaagcaaatcaagacacaatctatgttcacaacagattaacgaagtggacacaagagcaatccaccacaatctaacacaagctaatcaagacacaacctaacacaagctaatcaagacacaacctaacacaagctaaccaagacacaacctaacacaagatattcagtcttcggcttgggaataggagacagtacggtggtccacgtttccctcccagaaaccataagtatgtcattgagagccctcgccgagtcttcttgtagctccggcaacaattgaggagctccctcttgaaagttgttgccttgagaagatggatggttgtgtgcctgagagttgggatttggagactccggttgctcttggtttagagaagcttctggcggtggattaaactgcacctctttagatcgcggcggcggcggatcaacacgctgagtggtggagaatagttgctgcagcggcggcggatctacacgctgagtggtggagaatagttgctgcggcgacggatagttgcggtagtgggggctgacgttgaggctttggcggtttgaggcgccagcgccgaagtgaagtcgtactgctgaggcaccgaagagggcctttcaagcgttgttgaccctccggctctctgagtaacgttgggggttgtcttccgctttcgtgaacctccatgactggcgttaggcatcgatgaagagagacagagagatcgaagaagactcaaacgaagaacaaatcgaagagtagaagaaagcgaagagattgaagaaagagaagatgattcgaatcaaatcagatctaagaagaagaagaagaactcgattgggtttatgtagagatgagacgaataaaagatcgaataacagatagaagaaggagaagtcgattcgaaatggatcgaagaagaagttgaagaagaagatcgaagaagcagagtgttgtttggatgaaataagaagtgaatcgatcgaattagagttttctttatacaggtagtcgcaatttagttttatttttatcactaaataattgggtttgggccccgaaatttaaaagcccaactataaagacaattgtcgccaaatagtcgttggatagtcgttcatttttattgggtttgggcttcggaattcgaaagcccaacaaattaatagtgtgtcacatgttagtcgtactatcgtcgttaacatcattaggttcgggcttcagaatttaacagcccaacaaataaaacgtctgtcgcacgttagtcgtattttagtcgttaattcttttgggtttgggcacaaaatttaaaagcccaatatcattaaacgtctgtcgtctgttagtcgtattttcgtcgttaagtttattgggtttgggcttgggcttgggatgttgaaagcccaacaaattaattatacttataaatattcatgaaaattataaggtttctataatatttattcaaataattaaacattaaatgatatattcttaaacaacatttttcaagtaaatagaaaaataaatatacaaataaagcacacatttagtactctttatcatcttcgacttcatcttcgtttgaagacgataaattacatcagaattcatcttctggttcagcatttccgacatcttcgacttcatcttcttctgaagacgataaattacatcagaattcatcttctagttcagcatctctgacatcgtaataccggattgtgtagtattagatcttcaattgtagttagcaacacagcttcatcgctttctgtttgcaaaagagtcggatcattgtttttcatattcttcagaaaagtttccccgaggattcacttttaaaacatttcgctaaatttttttgggtttctttctatatggatacggaatattacaaacttgatctgcctgtgatactgcatacacaagttatacatattaatagatatacaaaattatttaataattaacagagaactttatgtattcttaattatgtacctagaataaatggctcgtatttattgtatttcctagatgatagaacgtctacaacgccaccatggcttcgccgagtgcctctaccaatcacaaggtcataccacttacacttaaaaagtgtgattttcaaattgacaatgccctcatactcgaattctatgatattagttaaagtatcgtagaaatccgctacatcagatgaatccgcgtaattttctcctttaacacataccccatagttacatgtttttcgtccagcgccatgattattcgtatgaaacaaattccctcgcgtgaaatacattagccaagttttaaccttctttaaacgcccatgtacaatctcttgaaccaaagtaggaaatggagaagtagggtttcaatatgttacctacataataaataaacaatatcaatatcaacataatttaaaaggttggccgaattttccaccctctactatttataatctcaacattccaccctgaacttttggctccttgaaatatcaccatcaacgaatatattctcaaaatacctacatgtacttttggattcatgtgaaatactacgcctccaattgaaccagtgattaaacagggattaaccataaacgcggataaatcgcaatcgcggtacagtaaacgcggatttatggttaatcccagtttaatcactggtttaattggaggcgtagtatttcacatgaatccaagagtacatgtagttattttgagaatatattagttgatggtgatatttcaatgagcaaaaagttcagggggaaatgttgagattgtaaatagtagagggtgaaaaattcggccaaccttaatttaaatgattacttttgaaaattactaaaatgatgtagacttacatattctttaacccatagataatattcttcagctcttttcgcgtagagttctttttcggacaaagttggatatttcactgtaagaaaatcctcgtacatattatatttacaaacgaagataaataaatcaaagttatcataatggaaattttaaattaaggagtgattaaaaatatctatcaagtggttgaaaatagtcataatttcttaaaacatatgcatgtgcgctttgatagtctttctctgtaagccattccacgtgcatttcaccacttggacggccgacgtgcataaatatgctaggtactccagggacatgatatacaggaacttctccttcatcgaatcttgttaacctgatccatgtaattgattttaattcttaagtatagcttgcgcatcataaaataaataattatatttaccttgattttgtttgtatatgatcggcaaagtagtgctctgaaaaataagtaatctcatcattgatatatgactcaacaattaatcctgccacatatctttctttgaactttttgaaaaacctctcaaatgggtacatccaccgatattggacaaggccacccaattcagcttcgtatgggagatggataggtaggtgttccataacatcaaaaaatgatggtggaaagatcttttccaagttacagattattaaaactatgttctgtttgagaatttgaacccgatttttctgtaaagttctcaaacataagtcctggaaaaatgccccaattcctaaaataaatatatatatatatatatatatatatatattataaaagtgtggcaacttaaacaacatttattgtacctgataatgtaaggtggacattccggtcaaggagttcagcaaagataaatggaagtagtcgctccataaaaacatgacaatcatgactcttcatgcctgaaaactttccattctccatgtctacacaactagccaaatctgaagaataaccatctgggaatttaaccttatgtttcacacaagacaataaactctgtttggcttcttatgttaatgtatacactggaaatggagctttacccttactatcaatatgtaagtctgaccgagaacaaaaaatttcgatatccaatcttgacatgatattatcttttaatttacccttaacactcatgagagtgttcataatgttgtcaagaaaattcttctctgtatgcatcacatcaatattatgtcaaagattgaggtccttccagtaagacaactcccacaaaatgctttgcttgtgccaattatgttcctttccatagcctggcattttcttttcatgaccgttcccaccaacgtccttcgtttttgcactagccaaccgctcgtaataaacttgctcccctgtcaaagactcaggtggatactccctagaagcatctcttcccttcagaaagtctttcttgttcctacgggatggatgaccatgagcaagaaatctacgatgacaatcaaaccagcatgtcttctgtccattgggtagataaaaagactttgtactttccatacaaattggacaagacaatttaccatgagtagtccatcctgataacatgctataagccggaaagtcgcttatcgtccatagtagcactgcttttagattaaaattctgactcaatgatacatcgtacgcatcgactccagtagaccacaactcttttagctcctcaataagaggttggaggaagacatcaagactagctcgaggatgatttggtccagtattcaaaattgtaagaaataagtactctgtattcatgcacataccagggggtaaattatatggagtcaggatcacaggccacaacgaatgattacgagacatgccaaaaggattgaacccatcagtacacaacccgagataaacgttacgaggttcttcagcaaaccagggatgtaactcttggaaatatctccactctgccgcatctgaaggatgattcatttctccctcctttgattggtgctcagcatgccatcgcattgctgcagctgtcttgtggctctgatacattctttttaaccggtctcaaataggtagataccacatatgactatatggtactttggttcttcgacagtcatctttaggcttccatctttgtgcgccacaaaatcaacaatgatcttatttttcgtcttctttcaagaaaagcatacaattgttcgagcaaacatcaattgtatgatatggaagtcctaaattgcgcatcaactttttagtttggtaatgtgaactggtagcctggtttccttcttgtaaaaaatatgtaaacagttcgcaaacggaatccaccaacttttcactcatattatactccgccttgtttttcatgagtcgatatgctaaggataactgcgactggccttcatgacaaccatcgtacaatggagtatttgcaccttttaacaagtcgtagaatttctttgaattgttaaggaccggttcttccacattctgataactaccatcctgatgataactatcatcatgatagttatcatcaaaccccacgttaaaattaaatgcatcattcaccatatccacatatggatcttctacaacattacccacttcttcatgattctcactaaaatacgtcctatccgcgtaactagttcctatatccatattcagttcttctccatgcttataccaaacataataattaggcataaatccttgactaacaaatgactactaactcttctacctgagatgatgtgtttttcattcttgcatacactacaaggacaatgaaatttacctcgactactctgtactataggctgactattagcgaatgtcatgaattcttctactcatgcgacgtactctgctgacaaatttcccgttacttcatcaaatctcttgtacatccaatctcgatacaaaccgccaccaccgccataattgtagtttcccgccattatatataccataaactaaacttatatttttttctttgaaatcgtttttttttatttgatgttgttttgatttgttggtgaatgagaatgaagagtgtcgtgcattatatagaggaattttacgactattttacgattacacactgtagtcgctacaaaattaggtgtacctacccagcaacgcgaaaaacgttgtccaaccatattatacgaccattatgcaactatttgacgacaaacaaaaggtagtcgtataattgtcgcctttttgcgactaaatattaaagtcggaagtgtagtcgtcaatgtacgagtactttacgactacttttttcctttagtaatgtcgtcgtcaaatagtcgtatttggacgaccattgaccgactaattgttgtagtcgctaaaatacgactacgaaacgaccaatttatctgttgtcgtaacatcgtcgtccatcagtcgtaaagtagtcgcacaaaaggaggactacattgttagtcgcctttcgtagtcgtcgtttgcctgttttcttgtagtgtgtagttcatatgtagctaaaattgatgacgaggtgtttggttttattgtcttgagattgaatggtgacatatagatttaaatggctttttgtgtgtattttatttaagcttcttcaaccggttcgagaagatttttctaaagtttcagatctgacttgatatgtgaagacaactaaaggaattcgtagcggtttataacgatttataaatactaataacgaattcaattgccaagagcaagagcagtgtaaacaaagaattaaatctagatcttatggtttgaatatacctggatattctgcagcggaaaggtgaaccatatatctcgagattattttcgcatcccaagtgttctgcctctaccggtatccacacgcacacaaactggatcagatctggaatgctaattcctttgagatcttatctcaaaactttagacaaactttttgtctcttatattttagtattcttgtgatcaaaagtaaatttcacaaacgttgctaatatatcatatatatatagccaaacgtataaccctaactaattagaattaataatgggccaacgcccaataactcttttacttcccttttgaaattaacgtacatattatatcatatataacatatatagtataataaacattttattatatatgcacaactacaaatatatatgtgtatcttatatatttagtgtgttcgtttggtcgccgcagctacttgcggaagcggcaaccgcaggtgatgatgttcgtttggtggacgcaagatgctgcggccaaacgctgcgacaaatgcaagtacctacggctagaaattattgatgccgttttaatttagcgttaaattgcgattgacgtggaaaaggacaaaaatgccctcaatatttttcagaaacacacaaaaacctaacctaaaaatgctgcggcaaacgcagctttttcatcaacaaatttcttcttctcttgggtaatatagatctctcggcaatttgcagcttgttccccacgagcttcctctgttcatcatcgtcctcgagcttcctctgttcatcaagctcctctgttcttgaacatcgacgaaatcaggtttgttcatgtgagattgataatttttgaaatgggttctctttcttgactcttctcttctcttttgatcttatgtttatgggtttttgttaaagttctctgcttagctcaaatctaaacggttctgagaatttgatttactttgtgctcttctctttgaattttgaattgaggtcttttgcttctcttctcttagcatggtttatacacttgtcagccattgtgattagtctttatttcaactatatcttgcttgaggatagtattctccgaattgtcattcccattgttacttgttagtcaactttgtatatagaactttattggttggattaaatttgggtctgatttgtttctcaatgagcagaggctgtggcagatgcgaacaaagcaattgagttggatcattcattaatcaaagcttacctaagaaaagggtaacgttttgccatttcctcctatgtaacattttatagtgatggtgtttctcttctcaggaaatctttgcccttatgtagagttctccgtgtctccttaaataattgtggagtgtctaataattgttctctttgctctttgttctattttctgtaatttcaagtcaaatgatttatagttttataacttgtttgtttgggttttgatgatttttcaggttacaactcaagtgttttgagaaagaagatggctaaagatgtaagtgttttggtttttattttagagttttcgtcaatcagtttgctaatgagtggctaggttgagcataaacgtgcttaacctttgatataacctcagtcaagcatgaagaggagctagctgaggtaaatatgaatgtctttgtggtaggctaaatatagccattggatgtattcattttgtgtttgtaatatttaggttggttaaccaaattggtggcttctaacatggttatattgaatatgcagcctcaagaaattgtggcagtgaaagattgacatgttttgtttgtcttatgtgctatttatgcagctcggagatagatttatctatgaagttgtggatgaagtgaataacttccctcacttctatggtcctatcaaaaccttcgttcctcttcctttggattatgttgtcaaagttgagaagttaacattcatcaattgcaatttcacctgcagcttttttgacttgatgattcagtggtttatgtgtaattgcaatgtcactcttttaataatgtaattaagagagatttgttttctattcacaaaacagtgtatttatactattattacaatgcaagattaagatcaaaatcattatcttttttcatgaccttctctacttctccttcatcatcttcttcattatcatgactatttttgtttaaatttagctcatggtttatcataaattatattgttataattatatatttaacaaaaaatcattactagctaaaaatatatttcttatggatttatatatatttaaatcccattttttattcaaaatatatttatataactttataaaatttaaataaaaaactaaatgtaaaattgttgatgcgtcatagaaacgaacacaaaaacccgcggtagcggcaacgtcagcggcaacgatgtctaaacgaacataaacctgcggcggcggcagcggcaaccgcagcgtctgcggcgacgaaacgaacaacaacctgcggtagtgtttgccgccgccgctgccgctgtcgctgccgcaaccgcaagcggtaaccaaacgaacaggctaaacatatatattatattattattaatccaacattaatccagtttgcgtaggtgtgtgacgttgtaggtttgtacaatattagcaatgagttctgactcatagattataagcgggttctagcaaaacatttaaccacctaatattatacaaatgtcaaacctcgatattacaattttaactagggtaaagtacaactgatttcaggacattcccaacaatctcccacttgtactggaatcatctattcccataatccctttgtctctatatctcgatctcagcataaggcaagaaattgtcatccttattcagctagaccatgtttatcaaactccgatttatactgataaaacaaatcttcgataggcccagagatatttatctcttgttatataggagggagaaatcccatcttgttccatccctgttccttaaacaatttataatgcgcccaatcactgtctttattaattcgatatttataatgttatatctataaataacgcagatttgattatgaaatgttttaaaaaaattaattggattaataacctcttagaatataataaatattattgatatatgagtataattagttttccaattttaaacccacgtaattatgaatagtattgaataagggaatatattaattggaaataaataaaaattctctctccaaaaatcttgttgtaggatttattgaaaaaaaatcaatggctacaattaattgaatcgaatggccaagattataacgtatgacccaaaagttttaaacccgggtcaaaaggatacgcgtgttttttaagtgaaggcgagagatcggacggtcacaaacaattcaatcgaatggccaagattataacgtaacttaagtgattctcagtaaaaggtaaactttttcatgacattaacattttaaacatatgatttaaaggtaaaaaatttttttaactgagaatcacttaacgtacgtctcaaataatagagtagataaataaataatactgaaacaaatttcattaatctgaaaataaatccaaatgtattttaacatgaacatcatatcataaaagaaaaacctcccactaaaaataagatcatatctttataaatctaatgccaatcgcaacagtatgactctcatgctttggctgtgtaagaggtttggtaaaaggatcagcaacatttgcatccgttgaaactctgctaatcttcacatcacctctatcaataatctcacaaatgaggtgatatcgcctttgaatgtgtttggaattctggtgtgatccaggttcttttgcgtgcgcgatggcaccattgttatcacagtaaagatcaatggggcctgaaatactaggaaccacacaaagttcagtaatgaacttcctattccaaacaacttcattacccgcttcagaagcagctatatactcagcttcagttgtagagtctgccacagtgctctgtttggaactcttctaactcactgctcctcagttgagacaaaagacaaatcccgattgtgatcggaaatcatctttgtcagttggaaagttggcatcagtattaccactcacaacaagttcctcacttcctccatagacaaaaaacttatccttagttcttctcaagtacttaaaaatgttcttgactactatccagtgactttcacctggatcagattggtatttgctcgtcatgcaaagcacatgcaacagccaggcgagtgcaaagattagcatacatgatagatcctatagcagaagcatatggaatcttactcatccgctctcgctcatcatgcgtcgaaggatactgagtcttgctaagagttatgccatgagacattggtataaagcctttcttagaatcattcatatcgaacatgtgcaagaccttatctatataagtatcttgacttagtccaattattttgtttaatctatctctatagattcttattccaagaatattgacagcttcacccatgtctttcattgggaaacaacttccaagccaagtcttaacagactgaagcaaatgaatgtcatttccgaggagcagtatgtcatctacatacaataccagaaatgcgactgcgctcccactagtcttcttgtaaacacaaggttcttctttgtttctaatgaaatcaaactctttgattgcctcattaaaacaaatattccaactccgagatgcttgcttcaatccataaatggaacgatgaagcttgcataccttccaagcagactcaagaacagtgaaaccttcaggttgtgtcatgtacacatcctcttcgtgatttccattaaggaaaggtgttttcacatccatttgccaaatttcataatcataatgagcagcaattgctaagagaatccgaatggacttgagcattgcgactggagaataggtttcatcatagtcaataccatgaatttgtttgtaacctttcgcaaccagtctagctttgtatatctgtatattatcatccatgtcaattttcttcttgaatatacatttacattctatggcttttacgccatcaagtaaatcaacaaaagtccatactttgttttgtgacatggattccatttcggattttgcggcctctaagcacttatcgaatacccaaggagtagaaccagaagtagtaatatttaattctataacatagataccagaagaagaaatcttgaatgttttcttcttctccagatcttccaagtattcaggagggtttgatccattcaatttgtccttctcaagaatatctcgaactgaataggaactttgagggtttgacataactgtcgaaaaagaaaagcagaaattaatatgatgttcataaattttagaattctcaacaattaagaaaactaacactatactcaaaacaaattttctctaatgagtacaatgatccatatttaagtagaatccaagtgagctttggctccactcctaaatatctagttatttaggtaagcaacaccttgctaattatatccaatataactcttgattgtggatgacatcgtatgtcttatccaaccctatgtctctaagcccaaaaccgttttgatagcatagtcaagtaaatcaattttatttcatatggtaaccattaccatctgtctcacttttaaacaattgcagaccgctgctttcgcagacccgccatacaacaatttaagttttaaaagtttataaaattggagagacatcaaatatttgatattagttgaggaataaattttataactcaattttatatttaaaatttatatctaatataaataaaatataactaatttacatccaatatgtatttatttgaattataaaaaattaattaatcttaatcacattaaaattattatttatttaacatttaatcttaattaaattttaatagctctaatcaaattagaatatattataattgaacttatcctaatgaaattaggatctatcgaatattaactttttccttctaaaaattcataaatcataagtcgatatataataattataattatgctaacaaatattttgcataaaaaactattccaaatcaaaatcctatacttaccataattctacatacacatattatatatataatatataattctaactacgagattttatatggatatgtcaatataatatacacaaacagatatcatatatcaattgattaataatgaaacgttttcatatgaacaaattaatcaaatacacaacaatcgacaatcatggcgttcacgtgaagatgtttaattagatcaattatttaattatattcgtacttttattaaccattaacaacattcacacattctttattattatatttaacaaattaaatatttttagttataattcacacttaacgtaaccgcatatcatatatactgaacatgttcgtttaggtgaattatacaatttcgtttttatcatgtatgtaacgtctccggaaattcaaaagaatctttaaaatattattataataaaaatactaattttttaaaaatatataaagttgtaatcttgtgtaaactccaaatcttaaaaacaaaataaattaaactttacaaaatctaccaagtctcgttttacgaataacaaactctaaagctcagctgcatatcgctcctcgtcaatgccctttacatggaatcagaacttatgtgagcgaaaaattgcccaatgaaaatataaacccgaagaacaagtaccaacacggtctgatcccgcacagaataatgttcacgtgttggtactaacaaacatagtttcaattcaattaattttaaataaagtaaagcacattagaacttatgctagcaaaatacataattaaatcataagaacataataatatcatcagacagaataataacatcacaacagaacgaccatgtatccaacaatgcacgtcggaatggcacaaccccaacattagtcgacccaaaccatatactaacagaatatttacataatatactcgatagggatgctagcccctaacgaggtgataaagaagtacggtctacgacattaatcgacctcaataccactaacagactaacaggatacttaatacatctgttggcgataccggccgccacagattgcccaatagagctagctaaatcagagtgccatgttgataccggtcttaacagaataacatatcttattatcataataatatccaaattaattatcgaatcaaacaaacaaactctcggaaattaaccttcaaataatttaattgattatttaaactcacacctaacatattatacgaatgtatcagtcttaacagaataccatattttatttctaaacagaataacatatgttattaccaaaaatcatattcatattagtttatctagataaccaaatccatctttacaacttatcatgcaactaatttaattaattaattttcccactcctaatttaaatgggagttagaactcacctgacaaagatattcatatcttcagatcgaacgagtgatcaacggtaattccgtacacattccaaaccaccaaacaattcacctaaattcaaccgttaatcagaaaaatacctaaactacaccattgtaaagatacttttaagtgaaatcttgaacaagtatttgatttgccaaaaccggtttaaaaagagccgaatcggtcagaattgctatgagtttaaaatcaaaactcaatcaattctaaattagatttcaaacgagtattttccatagacataacattccagaaccggttataaaaccttaaaaccggcttaaataaatcccgatttaactatgaatcaacaaatcaaaatatttaccaatcagattccgatcgttttcgacttctgtttggtgaattctcagcggcgttggttacatattgaagagaactttctaacaaggtatagatcaagttttaattcttcctgaaacgaaatccaccattaaagagcttgaaactcacttccacggataaaatttgaataaggaagaagatgaggcttaccaaactcttgtaccaaagctgaatacaacccaaaactaaagctctaatatggagaagcacgatcaacctaactcacaacaaaattcgatcacaagttgcccaaaaataatcaaatcgaagttgatgaagaaaggtcttgaaatctcgtcaaaacctccaattgactatgtaatcggcacgatatatccctctgatttcggaacgatgaacccgagttgccctcatttttttcgtttttggagtttagtcgcttaacctttctttatttagagattttgccttggacttttgaatcaatcagaaatcttcctgaagtcatacagtttttaaatgatcaacttaacccaaaatataactttttctgtttttcaaatttggggtgttacaattccaccatccttaaaagaattcgtcctcgaattcagagatcaacctgaaggagatgtgatacatttcaaggcttataattcagagattctagtagacttcaactaccatgttgcttcttacgcacttaagttactcaccttttatattcaagtcccaaaagtttttctcctgaactctttcactctagtctctaatatccgaattgactattattctttataactcatgtcttcttgactttctagaggttcaaagttcacaacttgagaatggtcatggtgatacttccttaacatcgatacgtgaaaagaactttacgcacatgcctcaactctagaggtaattctaagcgataagctacacttccaacacgcttgagattcatacaagggcctatacagcgcaactttaactttcctgactatccagttcagaacttaccttcatatgttgaactttaataaacactttaccaccaacctgaaattccaaatcacgtcttcaacgatctgcataactcttttgatagttttgggcagatttaatcctatctctgattagcacaacttttcaatgatttccaaaactaattcatggcaaattacaatagtttctccaacttctaccgaacatagaggtatataacatggcctaccgttcagatcctagtatggtacaataccaatacttgcatggaagctaatattataagcaacttaaccattgacaacgatctctcccatgcttgatcactatccaaaacacatgatcttaacatatcctctaatgtttgaatattcttctcagactgcccatttgactcatgatgataaccatagattttagtcgcttatccaatgcctgatgtaagctataccaaaaatgtgaagtaaactttcaatcatggcaagaaacaatgctactcacgacatcatgccacctcacaatttctcgcacgtagatctctcctagtcggcatgaagagaatgtcttctttactggtagaaaatggggtgattaagagagtcaatctactattatccaaatcgagtcatttcctttttgggaccctggaagccctgcaacaaaatcaatagaatctctatcccatttatactgtagaataggtaacatttgcagtttaccactaggcttctgatgctcaatttttttcatgcttgcataccgaacactctgatacaaattctgcaatatcacccttttctttagtgctccaaagctctactcattagacactccaaacaaatttagttcattggcaaagcaattatgcgagtgatttaacaattcgagaaaaattctcttataaccttcagtaatatactgccaacccagaaaactgcgaatctctaaaaagaattgcttagttgcttccacttagttgctacatcgactttagcaggatctacaacaatacctttcaactgctcttttttcaatctctgaagtatcaatctcaagtgttcaacatgttcttcttaactctttgaatacaccaaaatattatcgatgaacactataacaaatttttcaaagtgcggtctaaatactctattcatcaaatccatgaatatagctagagcattagttaaccaaaatgcatccacaaactcaaaatgtccatatttggtctcaaacgttgtcttagaaatatatgacaatcctgtattcgcacttgatgatagacatgtcgtaatcaatctagaaaccaacttgctccttgaagttgatcaagtagatcatcaatcctaccatcctaccccactggtctaagtcctaagatacttgttcttttattgtcacttgattcaactgtcggtagacaatacataacctcatactaccatccttctttttcacaaacaatataggtgcaccttaagaaaatgaactagatagaacaaaacctttctcaaataactccataagctgtttcttgaacttttccatatctgatacatattggtcatgattccttagcccgtttgtcgccttattccattcgttcaacgattcatatccgatcgtgcattgatgaaccaatccctatcgttacttagccatacaaccaacctaccccactggtctaagtcctaagatagagattggggatcgtatgattccattggttcacgatggctgaatcaagctcttgacttattggtccatctgtcctccaaatgtacgtcccttcggtttaatggtggacgatcgaggcttcggcttatcgaaccatccatgtttccgatccggtcctttaacactacaaccgcccatggtttactaaccgttacccgtatggtccatggtggtcgttaaagcttccggtttatcgatccatccatacaatccgaacgatatccttatcacacctaagggcccgtggactcatccatcggatcatagtaggctagcccattaaatcctttttccgtcgaccttacgtttgctcgcgagtccaacatccgttttgtccatcggttcccaccgtagactttcccgttggttatccgtcgagtcaccctttggtcttatcgttctctgatcggttttacaatggttgaggagatagatacatgaaggcggccgcgatattgatcctatagggtgaatcacgttccttacccattcttggtgatttcttccttttaccggtaagattccatccatgggcgaccttttggtgtatttggatgcacttctccttatgcttcctcgaacaccattcccggtcttgtccgatccgtctcctcgttagatccgattcgtctgtccaatgatcggtctaccagatccgattcgtctctaagacgatcggtctaccccatccatccgctaaactccatcaaaccgttggaccgggaggtagcatgcacatcagttcgatcgagttatactagccgagccgtaccctctttccgaccaacaacttcgtggtgtgtttggactatttgtgatgtgtggttgatctcctaaaggccttgggcgtcctcccttatatatgggcgaatggatgcttcccgacgcatcacatccgttccttgcacccttctgaagtgttgcacctttccaatcgtagctgttcgaccaattccacccttggacgatgcaaccgttcgttggtaaccgctcgaccttacacattttggccgagacacctcttcacccttgatctaccacagtccaccagctcgagtgtcagctgactagaccatccacctgggttagtactcaatcagctcaccgagcccattcgagctatcggtcagctcacctagctgagctagctactcttccagctggtttagttcacctagcttagctagctagttcatccagcttgtccagctcacctagctggttcagcttgaactttctcgttcttccgactaagtcttttggtctatttctcgaccctgaactagtttttccctaaaacaaaccagcctctttatgaactcgggacacgtgcgttacactaaggtatcgtctcgacacgcatcgtggattgcttatctccaataattcacgttttccattcgtcacaaggctggcactctcaatcgcgttgtagacgccctcagccgacgccatactcacctagcatcgatacatgcaactgttcccgggtatagagcagtgacttctctctgaattttcaattcaagatggcttcttgttcaagggtttgcgtgtgtgtaccagcgtgcagcctgcgtcttcaaattattggtgaactacacaatgaaggtcatgttgggagagatcgaacattgcaacttgtcaccgcattatatttttggccaacgttacgccgcgatgtagagagatttgtggaacactgtcgtttgtgtcaacaaaccaaagggaaaccttttaatgctggcatttacctacactgccttggaccgacacaagcatggacttcattttgggccttccacgaactcaaagaggtcatgattccatttttgttgtggtggatcgcttttcgaagatggaacattttatcccctgcaagaagacgacagatgcaagtagtgtggctactcttttctttcatgaaatctatcgtctacatgttttaccgctttcaattgtgtcggaccgtgacacacgttttctgagtcacttttggcgatcactttggaagttgctgcgaacgaatcttgacatgagctctgcgtatcaccggaagagtgatagacaaaccgaagttactaatcgcacccttggtggtttgttaaggtgcttggtgggtgacaatatcaagagttgggatgtgaagctttgtcaagcggaattcgcccacaatcatgcctctaatcaaaatttggggttttcaccatttcgtgtggtttatggactgattcctcgctgccccttggatcttactacactttcatggacaggcgattgattttgttacagagttgcaggaggttcatcgtcaagccaaacttaattgggagatagcaacgttaaagtataagacaactgcatatcatacgcaaagggagttgatttttcaacctggagatttagtttgggtagtcatcaccaaggatagattgccagtacgagagtacaacaagctcaagtctcgaaagataggtcttgttgaagtgctagaacgcatcaatgccaatgcttatcgtctgcgacttctggaccatatgcgtacatcggacgtcttcaacgtcaagtatttgtcttctttccgtggcgacaatgagccgttggattcggggtcgaatcctctctcacccggggagacttgatgcagcgcatcatttgatatttgggcatcaaatcttcattatgtgggcctcacgtttgcgacttcatcgattgcaagtgttggtttatctttattctttttcagttttgataactttaaatcgttattaggattagtcttctttgatttggtgttatcacgttttagtcgttatcttctcagttctttaaatagaatctttgtaactcagtttttatattgatttaacaaaaacgaatgtttaagagctttgtaaaaggccttgcaaggaggatttgcaccctacgtgacgagctcgactctctgattcgcattcatcatccattatcactaccatctctcattccctctcttcccctgtcatgtttcatcccctctgttttgctatccgaaaacagagcctccccttttcacagtttgtagcttctgccccctatcaacaagtatagccaacagcctttcattgttgggtctcatcaagcaagctaatattcgagaaccttcgagactcattcatgtactataccatgataaatcgaccattctttatattactttttttggtattatttctctctcctagacttattctttttagagagtaaacaaaggggaactcgcatagtggattgacatcctcgacatatttccaaccttcgtaattgatcattcctaataatgtataataatgggaccatggaaaacattcctacctctatacactaccaaaaaccatatcaatctcttgctttctttcttttttttaataaggggagaggaatactttttttttttcacgtaggtctcaacatcatgtatgaacaaggagtcaagttctatgaacactaaccgttttgatgaggtaaaaggaagagcagtgagattagctccagcctaaatggattgtgttggaaaccaagatatcctcaagtctgtcggtttgccatttgggttttccaatagtcggattgagtcaaacttgcagcattaatcaacgaggtaataaactaaagaaatagagatcattgttcataaccaaatttgactcaataaaacgactcaaaaagagaaaataagagtaagaataagacgcaaaaagtaaaatgtagttagtaagcgcctcccacagacttaaacgtcactatccccaaacttaaacgtcactgtccctagtagcattcaaatccggggtaagcgagaaaaataaaagaaaaataaaaggaaaatcatactattgggctgcctcccactaaacgcttgtttagagtcaatagcttgactttgatggagtttgaggaacaggtggatcagatggtggaagcaaaactttgtagtagaacctcgcatcatacaaggtggcgtataagcagccagtgtgtgcggtctaacttggaagtgaggaagttcagcagggcaggacaaaggtatgggtggtctactccttttacctagacaatcatcaaaagaaagaaaaatcgctcgacgagaaactcgtggcttgcttaactgtaaaacaatttctggaaaattcaaagtcttattgatgatatctggaggtttaagaggaggagatgagtatctttgccgtttcggaagtggatcaaggagtatatgtgcagtgggtgacgtgactgtagtgcctggagtatcaccagtgaactcaacacgaaaaccagctctaataaggaactccgactcagcctttgtggggtgtcgatcgacacaggtggtggtgttgatcaacaccattgctgcagatgattcccatcaactgcttcgtcagctgcgtcttgtggttgcttgcttgtaccatgaacatagctatctcaacatcaatccattgttcattgacactatcatctgttgttgacgctttggtgttgagcttgctcgatttcgctccttcaaacgttgaatcatggtctgttcctgatgagtgtcgattgacaccaaggtcgtgttggtcaacactgagacttggtgttgagtggttatgtaaataagtgtcgcaagcagtcgtgtggggtttctcagaggtctggtgctgaatttcactccttgactgaactacaataacatcctctttgttgaatcgagcattcaagtcttgtatatcatcatacagaccatcaatcctttcattcgtcatcacttggctcttgagaatctattatagcatgtattccatcatactcgtagaagtgggtggagggtgggcttggtgagtagaatagctggaatgactagcatagaacatatctggcgtgttgtagtcatcaagttgaatagcacgtccatttgcaatagttgcagctctatatcctctttggtgtcgagcgacacctaggtggtgtcgaattgaggaagtgcaagcctagtatggtggatatgacagcctttagaatgaactattgggtgttcaagacagactctgttaatccgaattggctgtcgatgcttcgaacaaccaactcgtcgagctcgacttcaaatacaaggcgcttgtcaggctaagggattccgaattggcaaagtcagcctcgaaggctagaaaagaggttaaagatcacggaatggagctgatcgagggggccatccgctttattcaaactgagaaggctcaatcgcagctcgaatcggacatcaaggagtataagagcaacctactctagttggattagactcatgatgacgattttcttgaggagcaagagagatccaagctgaatgccactttgaaagacaaaaaagaacgtcttgcggctttccctgcttcaccctttgatcctcaactttacgaagaatttttcaccgagtcacccccattaggtgaaacgggacttgattgggttgtgagtttttctactttcaagacttattatttgtgtattttacgctcttaattgatttgaatatttcttcttaggccggggtgcctatcacactgatcccaaccatcaaatacaactctatccaaccaaaggtgcctttgattgtgaacaacgatccggtgatggtcttgaatgatgagaatgttttagaaaccgctcatgaaccttcagccgaacaaaagctcattaaagatcctttcgtagctgaaagaattcgagatggcaactgattcgtagtggctgtgaccactttaaactggggcatgtcccaaatattttaaaagcctattttaaatttcttgaaaagttagtttttgcctatggaggctcaatttcttgaacaagctgtttgcttgaggaggcttttaaacctttcaatttttattccatagagggtttctcagttgttatgcgggtttgcaaagtccacactcttagaaattgaccttgtggttaggctttgagaatttaggttgattagaccttcctcataaaatgcgagaactgagctcgacttaacacgagttccccacttagtcaattcggtaaatgtaagggcctagaccttgattgttttattcgacattaatgggccattatctttaatgtgacgattgctttttcttttttgtttttcgaaaatagtaaaaactacacgccattaaggcaataattttactttctcgatttctaaaaatggtttaatccattctgacacgccaccattattgagcttctggttccaaggtaaccctaagcccctataaataagaaactctagtcaacttaactccctccaaacattatttctgaaatttccctctatgatacttcaaagatggagagagaaggcgcgtccacaatttgccctctcgagctggtcagccaattgttcctgtcctgcgacggttttgaattgtccggtgttttgttcccacatgttgccttccactttcctctgaaggataagaaagaggcgtaagatttcgtggataaggtcggtaaccgctctctttgaagactcttttactctctccctattttcacatgttttccatgttaggttatcgataaacaccaccgcatgtgcgatgagaggcagcgctcgggtcttaagaggcagatgcttgaggcgcgcatcgcttgtgtggaaaggaatgtgagggctctggaaagcgatccctttcaatgggagtggaggaacttcgattctgtagccaagatcccgaccatgcttcggatgtacctccgcagttgaagtcaagttcaggacctgcgtctgcgtcgggtgaagtgatcccttctgaaagcgaagatgatgatgaaggagaagacagcaacacctggaaacacgtcaaaaccaagcccaagttggatgataagaacgaaacgtccacttcgaatgctgaaccagcgatgaaggagtctgttcctgagcctcttccaaaaatgtccccgaactaatgttttttattttaactcgcttttacttcggttgaactcgtaacgggcttcaacccatttttatttatggaaaacttttactaccttttaatttggtatattctcgattacaaatttaaaggcatgattagctggacaacataaattctccctcgaatcgctccattctaggatggaaaaaaatggattttgagggatacgttgctcctataaattattgctctaaccttgtcttattttccatctttccctcttttgcagatatggatttcaacctttggtgctcggaatctatgccaaatttttctattgtcggtatgatggatggagatatcccaaatgagccagaaagaggaccctctccatctccaggtttcttccgatctcaaatccaaactccatgtgctttgatcaaaggccttccagaacgggaccaagagctcacgatggcgttcgtcatgaagctcacagtttgacaccagaaattcacactcgagaggaggaagcttcggaaaaaggttcaccagatggggcgcaggattaccaagatctgaagggacctccatacccttacatctcatctcggagattggctcaaacttggaatttctgaattcgcagacatcccgggttatatgatgcgagttcttgacctagccggatctggagttcaggtgttctgctcatcaagaaggatatcataattagaaatgtgccatccttcgcctttcatgcttatctttgaataatcgttgttttgtttttctgctttgtatgttcgcacagtcgaactctttttccgcgtatgttcgcacagtcaaacttctttatcaataaaactaatttgtattagtagttgaacttgtttccgagctgcctacgtacagattgcgggatcaagccacatcatagttcatgtacatcacaaataaaatgcatgttactaaacataaaatttcttcaaattgaccactttccaaggccgctggactggtctgtcttccaagtcctttaacctataaacgccgttccggaccacttcggtgacgatgtaaggtccttcccaattaatctcgagcttgcctcctttgtcctcccttgtattgtcgaagactcgtttcaggacataagctcctacaaagaaaggtctgcttttaatcttagcattataatatcgagcttctgcctgctgatagatttggattcgtatcaaagcttgatctgtctttcattgatggtatctagcgaattgatgatatgtttttaaaatcaattatcctaaaacactaatcatgtcgttgtagtattttaggttgtcaattcaaatgggtgtaatgctatcaatcaagatgcaatcagatttcacagagtcaagccaagcaataacaggttttgagtttctaatagtcctaaatgaacatgcacgaaacagaaattcaagcagaaacaatgaaaacactcgaccacctagcaaaccagacagagaatgtaacaggagtactcgattgcacagtctgttgccagacaattgggtggtcaagtgtcagagtgataacaggcgaaaaatgcaaaaactaaacatgaggcaataaaaacaagtaaatgatagcaatttaagcaaagaaatcaaatggaatagaaattcaagagcatggggtaattgagtagctaagtttccttaatctacatgtgattgacatgcacaatacattgtctttacacaacaagttcaataaccaaatctaagtgccaccgcaacaaagatcctcaagttaaactagtcccagactcaatcgccattgacatgtgctaacctaacaggcattatgaatcaacaagttaaagcaaaaatgctccttgtaatcaataccttggtacaaagccacgtatcactggaattagtggttcagacatttcgtcgaacactttttgggtgcggaaatgtctgggcccaaattccagttgatcagaaagcaatttgcattaagaataactaatccagaagggatatataaatcaaactcaaccgcctagcaaaccaaggattttaagctactctaacccatcctcagaaacatagtcactactccgacttcattacagataaaataaacgatgacatgtatgaaaacatcataacaacagagtaataacaagatgataacaggatgaacaacttagtaaacgaaatgaaaagaaaatattgaatagattaacagaaatctggattacaaaatgtcaagaacacaaactgctgcagaataaaacttagtctcgagaataaaagatacatcctacatatagcaaaatattccaaaaccctaatattcaaaacggcagagtattgggatggattaagaacagtagtcgaccctagtacttgagtgatgggtcgagtgatgagctggagccttcatctcttccttatgctcgaatgtctgggttagtgcggaatagagaagactctaaagctggcagtcgagtatcaagtcgagtggtggatgatggtagaactcgacttggtggtagagtgagaaagagagtgagagtgaatggtggtactcgaccctggggtcgagtggcagtgatcgagtgaatggcgaaaagtggagatggtgttactcgaccaggcggtcgagtggtggtgagaaactgtgatgactgctactcgaccaaggggtcgtggtgggtaagaatgtagtggtcgagtggatagctgcgaaggtcgtgaccgagtacttcaggaaagccaagatgacactactcgacctcgtggtcgagtatgttgattggttcagatccacttctttcaattagctcaccagcagctccaaataaccttaaaacaacacaaatatgcaatatgcatgcaaaactatcctaaacatgcaaagtgatgacaaattatgtgaaatggtatgaaacagtggtgatatgatactaaaatgctgacgaatggatacttagaacaagtaatatgcagtgcttctgtttgccgaagtccgggaacatttagttcggccgggaccactgcctccatcccgtacaccaaagaaaattgagtctcgatccccagtagaccacctaggagtcgtgcgataagcctacaaaacgggttggagctcatcgtaccatcctccttttaaatgattcaagtgtttcttaagattgctcataattgtcttgtttgcagctttggcttgtccatttccttgcggataatgcagagtggagtaactaacttttaattccctaatccaaacaaaaggcctcgaattcgtgcgaaatgaactgtggttcgttgtcggtgactatctcgtatgggacactatgtcgacatatgatattcttgcatatgaaagttttcatagccgaatccttaatattaacgtaagcttcagctttaatccactttgagaagtaatccgtcaaaaccaaaagatattgcacaccccgagttgacttatgcaatggtccaatgatatccatcgaccacctcataaacgtgtaaggggcggagatggaagaaaacaactctgaaggttaatgaatcaaaggtgcatgaagctgacgtaaaacgtgatgggccttctttagaaataagggaaagttctggggcgaatttggaaatctttaaaacttcaataagttgcgtcttcgaattgccgtcaggtattggtgtcgctcgacaccaggggtggtgtcgttcgacacctacgcgatttttagtcttcggatttcttctgcagcattagttctctgttttccttctgaatgctctattatctccaaatgaatcccaaacatgtaaagacctgtaaaagaactagaaaatactctaaaaataacaaattgactctaaaacctattcctaaaacatagataaaaccggtaaaaatgaggatatatcaactccccagacgtttgaaacgtaggaactcccaacattctctattctattgccttgatcattctaaccaaattcatatgcctagcagttctaatcaaaacctaaccaacgtatacttatgcgcaagcttacacaatattctagattccattcctaagttccacaactatatccacaaggctttcatcgatggatctcatcaaacaagctaatattttgagaaccttctagagtcatttgctgtactataccatgataaatcgacaattctataaaaaaaatttatctatattattttggtattctttctctctcccagacttatttttcttgaagagtaaataaaggggaactcgcatactggattaacaccctcatcatatttccaacctttgtaactgatcattcctaacagtgtataataatggggtcataaaaaacattcttaccgaaaatcatatcaatctctttttttttttttttataaggggaacatttttctttttcacattggtctcactattaggtatgaacaaggagtcaagttctataaacactaaccgttttgatgagggaataggaagagcagtaagattagctccagtcttagtggattgtgttggaaaccagaatatcgtcaagtttgttggtttgccatctgtgattttccaatagtcagattgagtcaaacctgcatcattaattaactagtcaataatctaaagaatagagatcataatttcaaacaaaattttgactcaataaaacgattcaaaaagaaaaataagaataagaataagactcaaaaagaaaaacgtagttagtaagcgcctcccccagacttaaacgacactgtccctagtggcattcaaatccgaaggtagcgagaaaaataaaagaaaaacggaaaataaaaagaaaatcctaccagtgggttgcctcccactaagcgcttgtttatagtcaatcgcttgactttgatggagtttggggatcaggttgatcagaaggtggcagtaaatattccctagcaaaatgtatcatcatccaaggtggcgtacaaacagttggcgtgtgaggttgacctatgaactgtagaacatccgaagggtgagactcaggtatgggtggtataccctgtttacctgcacagtcatcaaaagaacaaagaagcgctcgatgagaaactcgtggcttgctgagatgttcaggaggtagatagattagtagaggtgcaatggttgttgtcacagtagtcgctggaatagcagcagttgtctcaacttgaaatgcagctttaggtaccatgtctgccgcagtttgtgtggtgtgtcgattgacacatgtgatggtgtcgatcgacaccttctctacagatcgatctccatcaaccaatttgtccgctgcttcttatggctgcttgcttgtaccatgtaccgcatctatctcaacaacagtgtctgtaaaggtttctatagagaatgcttggtcgtcaatcataagcggcttcctcggcttatccatgtcaaaagccataaccacaccacgcacattcaaagcaatttggccttatttctcgtcaatctgagcaccagtagtagccaagaaatgcttgcccagtataagaggatcagaaggttcttcttcagattccaaaaccatgaagtcggttggaatcaaacattctcctactttcactggatcatcttctagtataccctttgggattctctttgagcgatcagcgaggagaagagtaatcctagtaggcttgaaatctagcatcccaagtctcactacaacagaatggggcatcaagttgattaaagagccatgatcacaaagagagtgaggaaacctttccttagatacattgcaatcgagtataaagcttcctggatcgcgtagcttctccggacccacagtctgaagtattgcactaacttgttcggagacaaccaaattctgcttcttctccttcttcttccgagactcatacaacagaatcgcactaatgactttggttagcaatcctgcttcttcagcactcacaccattagtgaccattcttttgacatacctctgaagtggaggtgacagcttctccaaatcaactggtggtagctgagtcagaattttatccatgatggcctcacatttctcctctgatatctcctgcttagactgacgcttcttcaaatatgaagcacgaggaacataggcggatactggctgcattgggatgcagacttaataaggtgcagtccgaatccagtgtcgatcgatgcaaggagtatatcgatcgacactctggtcgtgtgttgactctttagtatcaagctcattcgattttgcattgtcaaacatcgattcctcctctattgggcattggtgtcggtcgataccgtcgattggtgtcaagcgattctgtgaatcagttgttgatatctcatgtaaagctgttggtgtcgaacgacaccactggttggtgtcaatcgacactgcctttgtaatatcaaaatcgacctggctcttctcagcttcgatgaactcctctttgttgtgcgtcaaaatagcatggcaagcagttgtgaggttgctttctaaaataacccgacccatttaaaaaaaaaaaacataattaaatattcccataaatacttaattaaaccaaccaataaagcaacatttaaaccgcaagtcaaaaatactattttatgaataaataaataattcaaaaccaagaatgactaacaatcctaacacaaccctaaccagttccaataaccaaaacacttaaataaatcaaacgagttcctaaatcatcctctcttccttaccatgattccacgatcacactttatctttacctacatcaacaatacaatgagatgcgaaagtattatcataaatacttagtgaggcgatcctcccatctagaggtatacacacaagcaaataaaaggttataatcacaattacaacacaaacaaaccagtcattgaacaattcactcaaaacacattcactgcacctacatatcatcacacaaaacaaatcatacaacacgatcgctcagataagctcatggtcacgcactaaccttaacaaactgattctaacaataattaaaaccaggaaagactctccttgcgtctgaaacaatccagaaacgtgctacaacaagtcacacaaccaaaagcaaccttgaagcaaagtggacatgaaaaacagaaacaaatagtctcaaagacgaaaccctaaaataaataccaaccgttgactatcaaatccctctggtgaaacgctagtcatagacgtcacgaagcttcccacaaaattgcgtgtcgatcggaaatcagatgagaccacgatctcagttacaatccctgctgatcctaattcgcgtctgagaaaacgtgtctcacaaaactgcgaataactcaacgaatttaaatccaaatccacttctgtaaactagagaatgacgataaaagacttggaaataattatattaaatttcgttacctttgacaacgatttgatatacaaaatctgttttcttccaaaccctaacgattttggtccttctcattctctctctttttctcctttataaaacgaaaaagtggctaactaaagccctaattttgagtttccttcttttataggcacactctaggattttcattaacccaaccgattaaaccgggaaatttaaatacaaaccctaactgattttccggttcacgagcgttacaattctcccccactaacatagatttgtcctcgaaactagcttcacccttccactccgaggaactccgtgcaaccgtcactacggtccgtactccctccaaaccgacccctctatgtctctctatccagtcgatatacccacgatttactagtcattgttgctcacaactctctttccgctctcagaccgtagtcttcgagcataactatcactcttaggccttggcctacggtatctcgggtatcacacgtattatcttccccactcaaagtcaaaccctgagttgtgtcgactcactcttagcaacaaagtcatcgagttacgacacttggagaaaataatacctcaaaactcgctcttgggtcgtcacctgaaagcgtgctttcagatcgtcacccgaaaccaccgtatccctcgcactctaaagacaccaagtccctcgagttaccggtaaatcaggagcataccccgctcctcacgagtcattgggactctcatgtccctcgagcaaacagtactaaatgcttccgagcatatctccagactctctcattgattcgcgtaagactcctttatgcctcaccatccatcatatgcccttcgaaacatccttatgaccaacttctggccatctcgtaaacacacctctctcttaggttgtttactcaaactttccaaaaatagacaagccctttctggaaaacttttcatttttggaaaccgcacaacacattcttaaataagacaactcaagtcaagttcaagaaaaaaatactcatcttataactcatcaaatgtcatgatcgttacaactccaaacgaaaatataaataaaagaaaataagaaccacaactcaaaagctcaacaactcaacaagactaaaactggaaaccaaggataggcaaactcatgcaacaacctgcttctcaaattacttcttgaaccttgccttcatcctcgcctctggctctcaagtctcctctgtcacaccattgtagtcccacatgactttgatcataggaatcttcttctgccaaagttccttgatcctcctctcgagaaccctcactagtctcgcctccaaagtcatgtggggctgaagatcctctggaatcttagccaacacctcatcatccttgtgaaaatacttcctcagcatcgacacatgaaagactttgtgaaacgcacgcataacacctgacaactctaacatgtatgccactggtcccacccactcaacaatcctgaatggatccatgtacctcggactcaacttagtcttcgagatagacctgttcagacctcgcaacatgtccatcttgagatacactctgtccccaacctcaaactcaagctctcctcctcttgtcagcataactccgttgtcgatcctgagcttccttcatgttcaacttaagaacccggatccttgataataggattttaagatcaattatcctaaaacactaatcatgtcgttgtagtattttaggtgtcaatccaaatgggtgtgatgcagacagatgagatatgatcagaagttgctaagtcaagcctagcggaatttggttggttttccaacagtcctaatgttgatgcagaaaacagtaaaaagtcacagaaatgactgatatacttgatcgtcgggtcgactggcagaagggaccctatgatcgagtacaacaggatgacagagagtgattatgcagaaatggaccagtttactctatcacacagtctcactgttagtagcagggtgtgatcgagttgaatggttgaaaacagaaaaatactaaaattcaatagcaagtgaatgaagcaggtaagtaaacagagaaatcaaatggatgagaaactcctaaggatggggtaatcgaatagtaaggtctccctaatcaattcagttggttaacaaatctcgattaagctatccctaaacaacaggttcaacaacagattaattcactcccgtgatagaaatcctcaagcatagctagacactgacctaattcccagtagcgatctctaactaagcaggcaataagaaccgactgttaaagccaataaccgctctaaacggccaatcccttgggatagagacgattataaatggaattagtagatccaacgttccattaaacgccttctgagcgctggaacgtctgggatcggattccagttaatcagaaagaaataagcagtaaacacaactaatttagaagggattcaataactctacacttaaccaacagattcgaccaggggttccacaactactctatcccatcctcagaaatcctaatcactactcagacaacatgcttaaagacaataacatagaaacgattgaagattgcatacttaagatattaaagggaatgaaacaaagatgaacaagcaaatgaaagcaaaatctgaataacttagaagaaaaatggaaatacaaagttgtaggaatgaaaagtggctgctgaataatagtgcaaaattcgtgtctctcaaagtgcatgtctcagggcgaaacccttaaagacttatttatactaagataagaaagcgggcttcgagcccacttaacagcccatggacgacgtgatcaagagtgtcggctcaaagtgggcttcctgatggccttcgaatgggcttcgaatgggcctcctcttctgcctagctctagatgcagcaagcaatggtaacttcaacaaacgttacccagctgatgatacagccctgatagagaaccttgcttgcagcaacagtaccaagaatgctgattttgagaggaagaagattgctggagctattttaggaaatcagatggcagaggtgaatgctaagctggattcagttcataacttgctcacagggaagaagcatgtccactttgcagctgaggaagagactattgagcctgagcctgagttagaggaaggagtcttctacatatatggttagagatacaggaagtttgggcagccacaagacaactttagtggcaacagatttgcagggaacaagggttcctccaactacactccaaagcttgctttccagaagacctttcctcaaagcagcttttagaggaactatggtaattcaacctaccaagccccttctccaccctcagcagagacaagaatggaatcaatgcttgaccagattctggagagccaaacaaagcttgttgtggagctctctacacagatcttaatgggaagattgacaatctgagctctcacttgaagaagctagatgtacaggtcgctcaaacagcacaatctatcaagagacaatagggttttcttcctggtaatcctgatgctaacccaagaaagagctgtaatgccatcttgatcagagaaggagatgatgtgtgggaagaattggacactgaagacgagttggagctcgcagttgtagagatggtgtcgaccgacaccttcctgtgtcgatcgacaccatatgggacgcttttctcagagacgacccaatacgacggtgtcgatcgatacccctctagtgtcgatcgacactggatccgaactgcaccttgtgaggtgcaagtacctatgcagcccgagtctgtctacacccctcatgtcccctatccgaggaggcgtcgttctaagcaggagtttcatgttgccaagtgcacaactataatcgaaaagatcctccatactcttcctaaagatgcttctgagacatcttcttcctcactcaccaggtatgtcaagcgacttgttgacaatggaattagctcagatgaagcaaagctgcttaccagagacatcagtgcaatcatgctgcctaaggccaagagggagaaggcacaaagagtagatataactgagtacatctgcaccattactcctggtcaaaccactgagaagcttccagatccaggtagctttgtccttgattgctctatctccacaagcagattcagccgctctttgtgtgatctggttccaagcatcaacctcatgcctaagtctgttgctgagagactaggcatgactcactacagacctactcgcatcactcttctcttcgcggattgttccaagcgaatccctgaaggaatccttgaagatgttcctgttaaggttggtaactccataatccctgctgttttcgtggtcctggactatgagaaggaacccaaggatccccttatccttggaagagcattcctagctacaactggtgctaggtttgatgtgaagagagggagaatctctctcaaggttgtgattcagagatggagtttgacatggatggttcagagcttactaagcctatcaattgcattgcctcccgcacagacacacctcctctgatcagaatcccaccacagagccacacataacgctccaacccgtccagctcgcaaatgagagttgcagagcaacggtgtcgatcgacaccactaactctgtcgatcgacacccacgggtttcacagacagaggattctgcacactctcttcagtccacaccaattgaagatctctgtgataagttctcttctctctcttctccttttttatctttgattaattctttggattattcgaagattgcttcacaagataacaagcctagagttcgtcgaaagcttgtttctcctgttgtttttgcaggtgatgagatgagtgtcgatcgacacacccctgagtgtcgatcgacaccagaagctgctccaaccagatccgtttacacaccgccttggaaggcgaggaggcagcagcaatccaccaccaccactccacccacatcctaaactccgccaaatcaagctattgactcaaaacaagcgcttagtggagttaggaatcatgatctatatttctcatgttttttgccgagggtgtcgatccagtatgcaagttcccctttgtttactctctaaaaagaataagtttggggagagaaagaacaccgaaaaaaaaatatatatatatatatatatataaagaatggtcaatttatcatggtatagtacaggaatgagtctagaaggatcttgaatgttggcttgtttgatgagacccagcgatgaaagcctggtggatatagttgtggaacttaggtatgaaatctagaatgttgtgtaagcttgtagagaagtacatgttggttaggatttgattagacttgttaggcatatggacttagtttggatgatcatggcaataggccagagaatgttgggagttcctttgttttaaaaccctctttcacgggttcggcttttgtgttttgcttgagggcaagcaaaaactaagtctgggagagttgatataacccgattttcaccgattttctttatgttttaggtatacgattttgagtctttatgttatttctcgaatcttttttgtgtcttttcaggtattctatgcaatgggacaacaatggagataaggagacattttggagcaaaaactaaggaaaaggaaactaagaacgattttggttcaggaatcagcgatgagtgtcgagcgacacactcttggtgtcggtcgacaccagtttcggcccagcaaaaaccctaaacgctttcaagttttcagaagctcaagtttgccccagaagatttccatatttgcattattagtccctggacgtttttagggtctatatatatattttttagacctaagtttcttttatcaagtcttttataaagttctttgcaaaaccctattgtgagagacataagctattcatcgattattcttgagagtttcattcagatctataaacagtgaagagatcccttctttccccttctctatttactatgtttatgctttttatctcaaaatatgttgtttgtttcattcaatatgtctaagtagtctgctttgttaggaatagggtttctcattagggattcgtatggtttagtagattgccccctttgctaggttatctatagaattcttcatctttaattgttcctaatgctagatctagagtaattaactagatcttgaatccagacaatagatatgcccgccataggtatctgtagttggatctattatttgatgagtctggtttatagatgtgtaataagaatcggcctatctactaagatgaacaattgaactcgttaagaatgcatatttaggttgatagtttctcggcttctccagttattattggctatagatatagggagtttcgcggcacgcccaccggttattccataattagagtttgagtttaagaatggttcaataacaatctagctttcattagatctactaaccaatagtttcctgagaataccctattcctagctctttattaaaatcgtttacaaccaaatcaatctcctgtctttttactttgttctcttttattctcactattactctgctagcttaatctcaacatttaactcattgtttgaacaaaagaactccgtgaattcgatcctaaaatactataattgatctcttatttgagagagtagttctaggtaatttgaaccatatcatctttgttgaggaagttcccgttggaagcggtatcaagaagcatcctaatcttatgaagaacacctctgtagagactgctgagaagtgaagcttttttgaacccgtgatgagggcaatttggtctgatagcgtttgaagcgctcccatgctttacagaaggtttcagcattctactgtgtgaatccagatatctcattccggagtctagcggttctggagttggagaaaaatttagccaggaaggctttcttgcagtcgtcccaggttgtgactgatccctggggtagcgtcttctcccacagatgggctttgtctccaagtgaaaacgggaacaggcgaagcttgaaaccatcttcactaactccattaatttttgttaggctgcaaagcatttcaaactcgtccaggtgatcgagtgggtcttccattggcaggccgtgaaatttgttcccctgaaccatagcaatgagaccgctcttgatctcaaaattgttgtctgaaccggtggagggacaatgccatgacgcaagttatggttgtgtgggaagtcaccaacgccaatgttgttgggcagttcttgctcatctacaacgtcagccatcgtgtttgtatgtgtctgttctcttagagagcgagctatgcagtcgatgttgtctttgaagaggaggttctgatgtccttgagaccgtgtttgcatacaatagatatcagcacagcttgaacagaccaatcagagactggtccagggaagctggtgaatgtgagcacctgaaacacacaaacagagaaaaagacatggagtcagtaacctcttaacaaaagaacttgatcttaacgtttccgaaaatctcaaatatagcaaagaaaacacccaattggcaacggcgccaaattgataataggtttttaagatcaattatcctaaaacactaatcctatcgttgtaatattttaggtgtcaatccaaatgggtgtgatgcagacagatgagatataatcagaagttgtgaagtcaagccaagcagaatttggttggttttctaacagtcctaatgttgatgcagaaaacagtaaaaagtcacagaaatgactgatatacttgatcgtcgggtcgactgccagaagagaccctgtgatcgagtacaacaggatgacagatagtgaaaatgtagaaatggaccagtttactctatcacacattctcactgttagtagcagggtgtgatcgagtagaatggttgaaaacagaaaaatactaaaattcaatagcaagtgaatgaagcaggtaagtaaacagaggaatcaaatggatgagaaactcctaaggatggggtaatcgaatagtgtggtctccctaatcaattcagttggttaacaaatctcaattaagctatccctagacaacaggttcaacaacagattaattcactcccgtgatagaaatcctcaagcatagctagacactgacctaattcccaagagcgatctctaactaagcaggcaataagaaccgactgttaaagccaataaccgctctaaacgttcaatcacttgggatagagacgattatcactagaattagtagatccaacgttccattaaacgccttttgagcgctggaacgtctgggatcggattccagttgatcagaaaggaataagcagtaaacacaactaatccaaaagggattcaataactctacacttaaccaacatattcgaccaggggttccacaactactctatcccatcctcagaaatcctaatcactactcagacaacatgcttaaagacaataacatagaatggtctaggctgcttcttggcctctgtgatcgagtatgtgtgtcagctgtcaagatggactggttcttctcctccgcgatcgagtagaactggtggacaggcaaagtggactgcctggtcgcctctgcgatcgagtagaatagtcaggatggactcctctagctctgtgatcgagtagaactgcatttgggactgcctcctctcctctgcgatcgagtataagtgtctaggtggactgctgagctgactgcttccctctctgctactagtgatcgagtatgttggtggaaatgtgactatctccagatcataatcagccaccagctccatccatcgcctttgcctcaggttcagctctggttgagtgaagatatatttcaaactcttatgatccgtgaacacctgcacttttccgccataaagataagaccttcaaatcttcaaggcaaagatcaccgcaaccatgtccaaatcatgcttcttcaactgtcgcgatgcataggcaataacctttccacgctgcatcggaacccaacccaaacctactctcgaggcatcggtatacaccatgtaaggcttcccatgctctggcaatgctaacactagtttactcatcaacatctccttcaggctaacgaaaccctcctcgcactccggtgaccacacaaaaataacatccttctttgtcagcttagtcatcggctgtaccatactcgtaaaccccttgaaaaacctcttgtaataccctgccaacccaagaaaactcctgatctaagtggcattcgtcggtctaggccagtctctgatagcctcaatcttctccggatccactgaaactccctctgtagaaacaatatgacccagaaaactcatctctctctgccaaaaacttcacttgctcaacttatcgaacagcttctactcccgcagcttctccatcactctcctcagatgtacttcatgctcctcaggactcttagaatacactaggatgtcatcaataaagatgatcacaaactcatccagaaactcctggaacacgctattcatcaacctcatgaacgctgcaagtgcgttaatcaaaccgaaaggcatcaccacaaactcaaaatgtccatatctcgtcctgaaagcagtcttgcaaacatctacctccgctatggtggtaatccctgcaacgattgaaacacatcctcgaactcctgaacaacctgaatgtcgctcactgctacctgcctcacagactccggcatatatattgtcaccaggtaaacctcgcagcccttctcgatcattttctctgcctgcactgctgagatgatgagactccctgaagtaggtctcagtccctgataaaccaacctcccctctgtccgctcaaaagaaactctcccacggtggcagtcaagatgtactctttaatgatccacccaatctattcccagaataacatcatacaactcttaagggctgataatcagatctgctgccatcgactccccttgcaatctgaatatccacacccttagctctccccataaccgctagaaattgccctccagcaaccttaacggctgcaaactgctcaccaggatccccacggatgttcccgcgcgaggcacttttcgggggtaatgaaacaatgtgatgctccagagtcaaacaacatatcggcctccacaccgcccactaataaggtccctacacaaatctcatgtgctaagaaccataacattcatcacaaaacaatgatatccaaaacaacagaaataattcacaaagtctgagtctaagaaatcataccagtgatcgccctgttgttggtaccgcctagttcacgcgtagtgtaaccctgtggtgctgctgcaatatgtgcactgctgcacattctgctgcactccctgctgcacctgcgcttcctgctgcaccgccggctgtacaattgccattgccatccactgcagcttaggacaattcggccttagatatcctctctccctatagtggtagcactctctcgtctcagctcgctgcgtgcaatccgctaccttgtggtcaagactcccacaagaaaaacatcttacacgaccaccctgtccagctctgaaaggatgatcccacctcctcttctgcccctgcgcaggcttgctaggtgccacctgctgttgagtcttcttcggctgtaccgctggactcactaccaccacctgcctctgaaggtcctcctctaccttagtagccgtctccaccagtgccgctttcgtggcgaactacgacactctacaccgcactctcaaatccggccgaagtcccctcaagaacctcctcaactgggcatggtcatcctccatgccccgacccgcatacaccaatagtcatggaaactcccggtcatactcccgagacgaccgctcaccctgtgtcatctcaagaaaacgcacctccatacggtcgagcgcctcctccggaaagtacttggcattaaacttagccacgaaatttgcccaagacatatcggcttgcctcctcctggcagtcacactccgccaccataaatgtgcatccccgattggaaaatgcactgctaaatccacccgatacttcaccgggcatcagctcaaaccgaagttccgctcaacccgcgaccgccaactatcggcctcctcagaactagtaccaccagaaaaatacccggtgccaatcctctgcaactgctccatcatcctcaaataagatggaacctcctcagcaaccgcagccccctgctgcacctccgccactcgtggcgcaactggagtctgcactggtaccacacctggtaaccgctccaacaactgcctcggcaggcccgccaaaccaacctctagaacctgggctcctccggctacgacacccatcactcgtgggccctcagcaccaacggcatgcacaccggcaccaccagcccccactccggctgtacaagctatattggcacctagacagtcctcgggactaggcgccacaaactcaggctgcaaacccacactctgctcaactgtggcactgtggccatcactctcgctggtaccctcgagtactcgtcctctactgcgaccacgaccacgaccacaaactccagctcctctaaccatctgggctactcaagaacaaaaggctaagctaagaaactagaacaaacatatatatcacaattaacttacagtggaatcttatttaaggcttggagaagatgatgctaggaccctaacaacacacaattgactaaacactccataatcaatcctcagtatgctaacacccttgctcatcccacatcaatcatcaggaaaataattcatcaattaatttttctacacatcctagaaccgtgattgctctgataccaaattgaaacaacccgacccttttttaagaaaacataattaaatattcttataaatacttaattaaaccaaccaataaagcaacatttaaactgcaagtcaaaaatattattttatgaataaataaataattcaacaaacaaaaccaagaatgactaacaatcctaacacaaccctaaccggttccaataaccaaaacacaaaaataaatcaaacgagttcctagatcatcatctcttccttgccatgattccatgatcacactttatctttacatgcatcaacaatacaatgagatgcgtaagtattatcataaatacttagtgaggcgatcctctcatctacgaactatacacacaagcaaataaaagggtataatcacaaatacaacacaaacaaaccagtcattgaacaattcacccaaaacacattcaccacacctacatatcatcacacaaaacaaatcatacaacccaatcgctcagataagctcatggtcacacactcaccttaacaaactgattctaacaacaattagaaccagaaaagactctccttacggctgaaacagtccagaaacgtcctacaacaaatcgtacaaccaaaagtaaccttaaaacaaactggacatgaaaaaccgaaacaaatagtctcaaagacgaaaccttaaaataaagactaaccgttaactatcaaatccctccggtgaaccgctcgccttagacgtcacaaatcttcccacaaaatctcctgtcgatcggaaatcagatgagaccacgatctcagttacaatccccgcttgtcctaattcgcgtctgagcaaacgtgtctcacgtaactgagaataactcaacgaatttaaatccaaatccacttctgtaaaatggtgaatgacgataaaagacttggaaataactctaccaaattttgttccctttgagaacgatttgatatgccgaaactgttttctctcaaaccctaacgtttttggtccttctccttctctctcttttttctcctttataaaacgaaaagtggctaactaaaaccctaatttcgagtttccttcttttataagcacactctaggattttcattaacccaaccgattgaaccgggcgatttaaatacaaatcctaaccgattttccggttcacagtcgttacaccttctctccttctagcaagtgtactatctaagagttgctgctgatttgcaaactttacctcaattgcagtgactgattcacttactgcatcaattcttctctctatcgcactgaagcgtatatccattgcagagtaaagagtaaggatctattctagtattacttccatctgctcagtgaagggggtggtgggtgggcttggctatgatggatgtcactcgtttctacatagcccgatgtgctagcaaaacagatctcttcttgttcaactctcttggttttaattgtttcagctagcattttgcgttaagtatctctgctctttatgctaacactgtaggccatgttctcttttagcaatgttgcttcatttggattcttagtcaagaaattcccattactcgctgcatccaaaactttctggtaatgaaaatcaattcctcggaagaagatacctagaagttgtccttcagcgaacccatgatgcggacaatctctctagtaggtcctcaatcgaaaccaagcaccttggaaagcttatgttggttcttgagaaaatgtagaaatcttgattcgcagcgcttgagacatcgagtcatcataaaagtagttgatgaaagtggtctttgtatccttccaagtggttagagatctcggcctcaacagctttagccatatagatgcgtctccatcaagagagtaaagaaagagtttgcagagtagagaatcagctggaacaccctttgccttgatgcttgaaacaatatctttgaatacttctaagtgatctaaaggtgattcatctcgagtacctgatgcgtgttttatttagcttcagacttttacctgaaagaccacacgactactgcaagtgcacagtatatcggagtagtattttaggatcgaatccacaaggagagaagtagttaagagaaatccttaagaagagagggaagctaggaccaaaataaagagagggggtttttgtatgctatgactaactaaactaagagactactaactaaactaaacgataaactataagagaaaagcgttaggtcatcgggggtttctccggatgttcatggttcaataataaggcatagatctcaaactaggtgataacatggcaaggtttgtttacttccacattcccgaacatacgaaactctatcaagaccagctaatcctaacggctactaaatgaaaaccggcttttatcactagtatattgcgtactcagttgccctatcggctagtaggtgctaacatggtttcaaaatacaatatcaaagcattaggttcagattcggttctagttcataagtccctttcactcgacgggcatgcaacggttatagttttttattcagttgagttaggtcaagcattcaaacgagattttgccaaagaatgaaatacctaaaggcgagtactaggtggcgttccggacatacaagcattaagaataaactcaactagaaggaataacgtaaacgatcaaacaaagccatagaaaccgccaacctagatctttgatctattagtccccatgaattcccctttgaaaaccccctcaaacccaactagagatctactcgctcatggcaaaggagctaatccaaagttgggttgagtaaaccataaataaaagatgaataaaacttaaaaaggttttagagattacttctttgaatgtagaatacaagaggcaaagctccaccttaaagagtcttacacaaaaacgagaaagagagagagagagatggtgtttttcaagcttcaagaggtgcggcggaaaggaggcagctcttggcgacggctagggttcgctggtgatgaaggcacaccctagggttaggtcttagatcaagtatttatacttgaggcccaagaattaggtttagaggtaagaacgtcgagaagtgggctttagggcaacagcctaaaggcggaggcgcaaaaagggaaagacttgcgcgtgacctaatggtcggtggtgagctactcggagctgcctgggttcaagtctcatcgtcggatgtgttttggacttattatttctaaacggccggttcttgacatgtcttaactctttggatcatatcttccaaacggcttcatggattgcctcgattcgacttcgacgtgaatcttgactcttctacccaaatatcttcatgccgagtccgggaagaccttggccagatgctaaacttccaaagcactggaatgatcgtcttttgatacttttagcttcaaaactcttaaaaccttcttggcacctagaatacatgtttctcctcttattggctctagaatggcaccaaatgctctctgaaacataaaaaaaaaatagctaaaacgggcttaaaagccgtgttatcagtacctctgaatttttctcgagaaacaagatcgaagtaacaaggttgcagctcaaaattggtcctttcaaaggcggggggagggggggattgaattgctgaacgaatggagtagaataagtcagccctgttgaaatctcctatcgtgtctagttcagtatgcggatggtgtcgatcgacacccaggtgatgtcgatcgacactactgtcaagttctaccattgtcgtgaatcagttcctaaagcccctgaaacacaagaaacaaaagaaagaaaagaaaaattgaattagtaatgaaagaaaagaaaagtctagacttaaatcaacacatagtctaatggtgaagcaaagagaactttggcaacggcgccaaattgatatagctcaaattgccttcagcttgctccctcaaataagagatcctcgttagcacttaaggatcggatttcactgagctctcgatgtttacacaatagacttatgatgatttaaattaagctagacaaatagaataaagtaaaagacaataaagcaaataaaatgagttgtagatgtaggagattaaagcgtggggtctaaggaattgtctgggaaaatagttaaattgtagatctagctaatattaggattgttatcgcaccgttcccgaactcaaactatgattttagaataactagtggcattccgcaaaactctctatgcctagagctaagataactagagaagccaggaaatcttatactaaagcatgcattattatcaagtttgattagttcaccttgtatctaaccacagcccttctatgagcctacctgttctttcttaaatacctagcctcatctatgatagttctgataacaagtacctatggcgggtatacctattgtctaatatcaagttctaggtgatcaatttaaaattagcactaagaacaatcaagatgaagaactctaagaataatcctaaggggttttcgatctaccaatccatctaaatccctattaagaatccctaaacccaacaaggtgattactcaaacatgattaaagaaacacaaatcaaagtctgaatagattgcattgaataataagaagaacagtaaaaggagtctagaatcctctctacaggggttggattcttctctcaaaaacagtctctctcaatcaaaacaaaacttaggtctaaacaatgaccttaaaatctatatatatgtgacctaaaacgtgatgggccttctttagaaataagggaaagttcagggctgaatttgcaaatcttcaaaacttcaataagttatttcttcaaactgccgtcgggtattggtgtcgctcgacaccaggggtggtgtcgttcgacacctacatgattttttagtcttcagatttcttctgcagcattaattctctgttttccattagaattctccattatctccaaatgaatccaaaacatgtaaagacctgaaaaagaactagaaaagactctagaaataacaaatagactctaaaacctatacctaaaacatagttaaaacctgtaaaaatagggatatataagcattgatttggtttggattggcttcaattcccctcttagtcacgatgtaaccaaggaattcccagaaggaactccgaaagtacactttgccggattcagcttcacctggtattgattgagaatttcaaaacattcttctaaatgctgaatgtggtcttccttcttcaatgatttgaccaacatatcgtttatgtatacttccatcgttttcccgagatgcttgtggaatatcttgttcaccaatcgttaatacgttggtcctacattttgagaccaaaaggcatcactttgtaacaataaatacctctatttaagatgaatgaggtttattcctggtcctcggggctcatcataattttattataacccgagaaggcatccatgaatgtcaaaaactcgttcccagcgttggactctacgagctgatctacatgcgaaagtgggaagctgtcctttgggcatgctttattgagatctgtgaagtcaatgcacaccctatctttcccgttcttcttttagaccacaaatgtgttggccaatgatatatccctattttcactgattttatctatgttttaggtatatgattttgagtttttatgttatttcttgaatctttttagtgtcttttcaagtattctatgtattgggacaacaatggagataaggagacatttttggagcaaaagctaaggaaaaggaagataaggaggattttcagttccagattaagaggagtgtcgatcgacacacttctggtgtcgatcgacactagttttggtcaagcaaagtcttagacgctttcaagtttacataagaggaaatttgccccagaagacttccctatttacattattagtccgtagacgttttatagtgtttatatacattgtttagacgtaagttttgattatcgagtttctatcaagtttctatcaagttcttatcaagctttttgcaaaccctattactgagagacataagctattcatcgagtgttttcagagattgattcagatcttaatacagtgaagagatcccttctttcccttaatctatttgttgtgtttatgttttcatactcaattatgttgtttgcttcaatcaatatgtctgagtaatctgcttgttaggaatagggtttctcattagggattcatatggtttagtagattgccccctttgctaggttatctatagaattcttcatctttaattatgcttgatgctagatctagagtaattaactacatcttgaatccagacaatagatatgcccgccataggtatctgtagttggatctattatttgatgagccaggtttatagatgtgtaataagaatcggcctatctactaaagtgaacaatcgaactcgttaagaatgcatatttaggttgataatttctcggcttctccggttgatcttggctatagatatatggagtttcgcggaacaccaccggttattctataattagagtttgagtttaagaatggttcgataacaacctagctttcattagataacaacctagctttcattagataacaattttgaatgtcttcaagatttcctccaggtaaaattagtgaacttacattcaatgcaatgactatcgcggaattttgaagatcgttgttatcttcctgtattgctgcttgttgtgtgatgatttcttcaagtattcttcttggatagactttcactactaccaaccattatttagtacgtcattttatacgaagatgatatggatcaaattgaccttaagcttactccctcaaataaagagatcgtcgttagttgttaaggatcgaattacacaaagctcttttgttcacacaataggcataagtatcgagatcaagcttaacaaaggtaagataattaaagaaagcaacaagcaatagcaaattatggggttctaaaataagataataaaaatggtaggcttagggtattatcagaaaatagatgattagtagatctaatagttgctaggatgttatcgaaccgttcttaatctcaaaccactattatagaatatcccagcattaacttggcactactccctatgaataaatctaaagattctcagcgttagcttggcaaatccctaatcctaaacatgcatgctaatcgggtttacacacctataaactcggctcatcaaatagtagttctgataatagatacctttttgggcatatatataatttaagatcaagttctaggtggccaatctaaaactagcattaagaataaccaaagatgacgaatcctacaaataaccaaaaaagtgggcatctactaaatcatctataaccctaatgagaaaccctaactctaacaagaaaactactcgaacatgattatgaaagaacaaaggtaatggatcctttttgggcacacctattatttatcatcaagttctagtcaaatggatcatgcttctcatacgcaccagatagacatacctcaacaacaccagacttataaattcttttttttcaatgattacatcaccacttttagaattattacattattgtattagatcaccgtcagagcttaaatgaattctttaaggttaattgatatatccctatttttaccggttttagctatgattcaggtataggttttagagtctatttgttatttctagagtctatctagtctttttcaggtctttacatgtttggaatgcatttggagataatggagcattccggaggaaaacagagaacttatgttgcaaaaggaaatttgaagactaaaaccatagtctattgtgtgatccaagaggtttgtggaatttgacccttaagtactacaatcgatttcttatttgagagagtggtcttaaggcaatttgacctacatctaatttggcgccgttgccgaagttctctacgattcaccattagattaggattagaaatttgtcgtagcttttgtttttgttattctttttatttacttagtctttctcatttctttttcttgtgtgtttcatgtgtttgtctaatcgcagcagaggaaacaaccaaagaacatgaacgagagtaagattgctggattctatttgtggaagatgtcaattattttggtggaagaggttatcagaatcagagatttaaacaccaacgaggctataaaggtgtctatgggaatgttcaacctaactacactcagaagtctcagttccagcaacctttccagaaaagcagtagtttcagcttcacaagaaactacgatcttgcttcttaccaagccccccctccacccgaaccaagaagcaagatagaatcaatgcccgaacagattctggaaggtcagaagaagatcttagagagacctatccctagatggactgaatacagactcacgccttattggcatgttgctttgatggaaagtgaagatgagttcctgaatgttgaggagagtgacgaatttgacgttgtagaggcagtgttgacccacactaacccatggtgtcgattgacaccatcacatatatacgagacatcaagttgtgacgaagcaaaatcgaccaggctcgacattgatctctcgaatcgctcgacacacatttatagcgtcgaccgacaccacttgggtgtcgattgacaccaataccaaacagtgccaatgtcgactttcgacagaaaataatcaaatgagattgacagagcaggatcaataccagatagtagtgtcgaccgacactcacctaatgccgcttgacatggacgctgattgcaccaatcagccttgactttccacctgttgctgaactagtctacacacctgaaattccttgtcttatgcctcaacagtatacacaagagattcaggaggagcgctgcaaggctccacagaatcaaggagacataaggaagacaattgtcgtctcagaacatatttcagagctaaattatcgacatgctaagggaagacgagttgtagcacgagtgtcgaccaacaccaccacgagtgtcgatcgacacccatcacgacacccatcactggttgagacaaaatcatttaatataggtacttttcaagctcgaatcactgctaaaagtctaggaactactgtcatgtcacccactatacctctactccttcatccacctcctaaacggccaaggaaccaatctcctcctcttaaacctccatatgtcatcaataagagtttaaaatttataaaaactgttttatggttatgcaagctacgagtttctcgtcgagcgctttttcgttcttttgatgattgtgcaggaaaaaggagtgttcctcccatacctgagtcccaccctgctgatgctcctctcttcctagatagacctcatgcgctaacagcttatacaccagcatggatgatgagaggtttttctccacggtatttaataccaccttctgaaccacatgattatagaaatcctgcaaaatcatgctaatgactgaaactaagcgtttagtgggaggcaacccactggtatgatttttatttttatttttcttttattttttgtttttcttttgtttatttcgcttactccggatttgaatgttactagggacagtgacgtttaagtttgggggagtcgcttactaactacatttttctttacgtgtcttattcttattcttatttttttttgagtcgttttattgagtcaaaattttgtttggaattatgatttctattctttagtttattgctggttgattaatgctgcaggttcgactcaatccgattattggaaaatccagattgcaaaccaacagacttgaggatatcctggttcccaacacaatccattaaggctggagctaatctcactgctcttccttttacctcatcaaaacggttagtgttcatagaacttgactccttgttcatacttgctattgagaccaatgtgaaaaagaaaagtattactctccccttattaaaagggaaaaaagcctaaaaaatcgcggtttacttcttatttggccgtttaatacctgtagttttaaaattggaattaaaatacttatatttttttttggttgccttttaaattcatgatcttttaaattttggtaatttcgaacatctgttattaggcgttacggaagtcgttaacggcgttaaatattgaccctacatgtttacatatatatatatacaatatgtttacgaagtattttgctgatattgctttggtctggtggtaacacccaaatcaatttattcttgatttctgggttcgagtccacctgctacttattttttatttttttaacttggtccaatttcatctggggttttgctcatagatctttgagacgcaatcccttcgatgattggtcctaaaaccatacctttgacgcttgcttgataatctctataagcctctcctcatcttcaacctgaatacaatcccaatcttgttcgggttttcacctcttttactgtaattgattttatttttttcaattcaattctcatcatttatgttattggtggtgatggagagatatgtgattgatgggaggtaggataaacagagagttagggattttggtttaatggtggagatcgttgggggagtgaaggaattgaggaggaaaaagtagtggtgggatcaattgtagaaaggtgaagaagatgaaatgaaatttaaaaaggaaaaaaaaaaaaaaaaaaaaaaaaactaaataggctgtaagttgcgtcgaacccgttaacatagggttaaactaaacccaggttaccactagaccaagaaaatatattcgtaatgtactcataactaattgtatatatataagtaaattcaaagtattaaatttaacaccgtcaacgacttccgtaacgtccagtaacagatgttaagtcgcaggttctaaattaccaaaatttaaaagatcatgaatttaaaaggtaacagaaaataatttagatatttttattccaattttaaaactataggtattaaacggccaaataaaaaataaaccataattttttaggcttttttccccttattaaaaaaaacaaaacaagagattgatatgattttcggtagtgtataagggtaagaatgtttcccatgaccccattattgtacattattaagaataatcaattacaaaggatgtaaatatgtcgagggtgtcaatccggtattcgagttcccctttgtttactcttcagaaagaataagtctaggggatagaaaaaataccaaaaaaaatatataaagaatggtcgatttattatggtatagtacatgaatgagtctagaaggttcttgaatattagcttgcttgatgagacccaacgatgaaaatctggtggatatagtggtggaacttaggtatggaatctagaatgttgtaagcttgtagagaagtacatgttggttaggatttgattagaactactaggcatatggatttggttagtatgatcatggcaatagactagagaatgttgggagttcctgtgttttcaaacctcttccacgggttcggcttttgtgttttgcttgagggcaaagaaaagctaagtttaggggatgcatttgatttaggtataagttttagagtctattagttatttctagagtcttttctagtccttttcagttctttacatgtttgggatgcatttggagataatggagcgttctggagtaaaacagagaagttatgctgcatcaagaaatctgaagactaaaaatcgcataggtgtcgaacgacaccacccctggtgtcgagcgacaccaatacctgacggcaattcaaagatgcaacttattgaagttttaaagatttctaaattcgacccttatttttaaagaaggcccatcacgttttaggtcatatatatatataaaggttatttttcagacttaagcttggagaggctaatctccttatctcttttgttccctaggagcaaaaccttgtggagactccctttagagaagatctttcttactctttttcttgatatgttgactattgattttttattcagactatgatttgtgttctatgatcatgtttgagtagctttcttgttagggttagggtttctcattagggatttagatgatttagtaggttgctcccttgctcggttatctgtaggattcttcatcttgattgttacaacccccatcatctgttatttgcttactttgctttgtttttattttcttatcttttgtttagcttaattcaaaatcttaatctattgtgttatccgagagctttgtggaattcaacccttaaataccacaatcgatctcttatttgagagagtggtcttacgacagtttgacctacatcattaattatagatttgaaaaaagattaaacagatgttacaactctgatcttcgattaaacgtttctctcacaactcttgatcactcgtttgtactctcaagaacttgaaccaactaaaagagaaagaaaacagagcacacaagtgatttgttacccagttcaacggatcgatgtgatcacgtctacgtctggggtcgaatcaatttggcaatccacgaaaatcaagagatgaacaagtctcaagctcgagctcacaacaatggagtctctcagctttctgttacaacagaataacaaactctcactttcgaatgaatacaatgaagaagaagaagaagactttatatagagtcaacataatgaaaccctctctcgcgaaaagagtatttcatttaaccagcttccaatgtgattcaatcgacttctgtaaaccgatcttcaatcctcaataaccaagcattaaaccgaatgctaaagttgaatcagaaccgaatcccacaacactccaccttgattctacttttcatcatctcctagtgaactgcacttcatgaatttaaccttcggcaacaagacttaagagtcttacctgagtagctttagaatgtctaaagcatcctcaaacttctttactggtatgcactttgtgagcatatctgcaggattcatagacgtgtgaattttcctgacctttacctcaccagcttctatgatgtctctgatgaagtagaacttgacttccacatgcttcgttctatcatggaaggcattgttctttgacaaacaaatagctgactgcgagtcacaccacacaattgcaggctttggctgcaatcccatgtcttctagcgaccctctaatccaaattgcttcctttacagcttcagtaagggcaataaactcagcatgtgtagaagacagagctacaacatgctgtaaacttgatttccagctcacagtattacctccaactgtgaaaacatatccactgatcgaccttcttctgtctaggtctgcagcatgatcagagtcacaatagccttgtacttcaagattagctcctttagtaaacaccaagttcaaatctcttaagccctttaagtaccttaatatccactttactgcttcccagtgcatctcaccaggtcgactcatgaacctgctcactaaacccatggcataagcaacatccggtctagttccaatcatggcatacatcacactacacactgcacttgaataaggaaacacttcaggatccagacttccaatctcatcaatgattgatattaacttgaaatgagctcccattggagtactcactaccttagcatctgccattctaatctctgtatcaccttatcaacatatctcgtctgagataaacgaagagtaccctccttcatgttcctgataatatcaattacgagtattttgctagctgctcccatatcttttatttcaaaattcagactgagagcttccttaagcttgctaatttctgacttactcttagcagctaacaacatatcatccacatacagtagaagataaacaaactcaccagagttaacttctttcacatacacgcatgaatcatgttcacttcgagcaaactgtagactcatcatgaaagcatgaaacttcttgttccactgccttggtgcctgtttcaagccatatagtgatttctttagtaaacataccttatctttctctggatttacttcaaatccttcaggttgttccatgtagagtacttggtcaagctctccatgcagaaatgttgttttaacatccatctgttccagctccatatcatctttcacaacagttgacatgagaatcctgattgaaatgtgtttgaccactggagtaaacacttcctcataatcaattcctttatgttgtgtaaaccctctggctactaaccgagccttatacctctgagcttcgactcctgaaataccttcaatttatacatccacctgcagctaatcactttttgctctttaggcctgccaactatctcccatgttccattcttgagtaatgaatcaattttttctttcattcctccatttcacttgatccaatgtttgtctttctttgcatcatggtagcattggggttcttctgactcaatttcttcagccataaccaatgcaaaagcaaaatgagtatagtcggccaacttctgaggtgggtttggtgctcttctttctctgtctctagctaactaatagttactgagatcaatacttgtaatgagtggttcttgagttactgtgttctctgaatcagactcttggtcaatctcttctatagtaactccacctgttttataacactctccatgttctttaactgaaacctgaaactcattgtaaccttttgagtcacttatgtctttcacaggctgttcactgctctcccttatatccttgtactcctgactttcgttaaacactatgttccgactgatgacacacttctcttcatccaataaccacaccttgtaccctttagtaccttgtggataccccaagaaaactccttttagtgcccgcagttttagtttccctagatccaaatgtacatatgatatgcacccgaatcttctcagatgtttgtatcctggcttcttgtcaagccacaaatcctcagggacattgtgatatacagcagaagcaggtgatttattcaccaggtaagctgcagtagcagctgcttcagcccaaaaaacttcttcaagacctgactcattcaacaagcaccttaccttttccattaaggttctattcattctttcagtaacaccgttttgttgaggagtgtaggtacacgttctatgcctctcaataccattctgcttgcaaaactcatcaaacttgaggttgtagaactcaagaccattatcagtttgcagtatcttgaccttcttgtttacttgattctcaacaagctctttccattcacagaacctttcaaatgtctcatcctttgttttccgaaacattagccaaacttttctggacttatcatctatgatggagaggaaataatgttttcctgacagtgaaggagtaacatttggtgaaccccataagtcagcatgaatatatcctaaaacctcctctgtgatgtgcttcccaacattaaaactcagcttcttagactttcccataacatagttctcacagaagcttaagtccctaatgtgtttcttttcaagcagtcctttttctgctgaaatcttcatgttattcaaactcatatgtccacgtctgcaatgccacaactcaatcttctcattggacccttcaacattgcacttctcattaaccacagtgtgtccatccaagacatacaatccattcactaagtcacctcgcaaagcagtcttgttttccttgtaaaatctgactttaccatctccaccttcatgcttgtaaccaagcttgtccagagtaccagtggaaattagatttcttcttaaattcggtacaaatctgacattcttcaataccctgatggatccactacgagtattaactttcacagagccactttcctttaacttaactgtgtgatcatcaccaagcaaaatcatagtagtctcattctcattaaactctgaaaaccaatccattctagatgtcatgtggtatgtacatccagaatctataacccacttgtcctttgcttcctggtcatacatactcaatgcttctgaatataccaatttttcagtaatcacacctacttctccttttccttcattctcaagctttctctttctagcatagcaatctttcttgacatgtccttctttcttgcagaacaagcaagttagacgactcttagagtttgacctgccatgtccctttccttgaccctgagtgttcttggtatgagatctgcctctttcaacagtgtagagagccgttgatccaggtgctctaattgtttccttttgctcagacagttcacgttcaagtgattttgcagatgacaccacgtcttgaactgagagagtcttgttgccatacttcagagtatgcttcaattgaatatagcttggaggtagcgagttaagaatcatgattgcttgaacttcttcgcctacttgaatatgcaggctacctaattctgcaacaatcctcaagaattcatcagtgttttgatcaatactcaaattatcaaccatcttgaatgagtaaagccttagttgagtatagatccgattaggtaacgatgattccatgaacaacttatttaatgttgcccaaagttctgcagcagtaacacaatgttgaaccttaagaagaactgtatcagtgatgtgatttatgatgaagttctttgcttgatctgactgctcaaacttaatcggatctggaactttttcagttttctttgacaatgtttcatcgtcttcagattctgattctttcgtctcgctctttaccaccagaattgacttggttaaagtgaaatccgataatgcaggctttgatctaagaacaccaagttgaggttcgattcttatcttccaaagagagaagtcacgattgccattaaaggtcttgatctctaccttcgttgacatcgccatcgatggagttttgcctataaccaggctctgataccaatctgttacaactccgatcttcgattaaacgtttctctcacaactctcaatcactcgtttgtactctcaagaacttgaaccaactgataagcaggtttttcaagtctgcttatactgaagagtgtgtgttcagttcaattcctctaaaacacaaacatgtcgatgcagttatagagggtgtcaatccagtccactgtattgctagcaatcaagatatgtacaaaaacgactaagtcaagccaggttataatgatggtgggtttctagtaacaatcctaggtcaggattcaaacaagtaaaaatgagaactttaaaagccctactcgatcattgggtcgagtagaaccaacaggtgagaaaattaagaattaaaatgcaatcaacaggggatgaaaatagaggatgcaaatgacaggtaaataaaaatgcaatcaacaggggatgaaaatcgatctaatagaagttctaaggatagtttcattgataagggtaactctagggttcatcaaatggctaataggcgaaaggtagatacccatgacgatagattcaaaaaccaggtcaatccactctcgtgacagagacccccataactctaccacttcctaatctcaactctcgttgatgaaacatagcagagcagggcgttattttagacgctggacgtctatgatcgaatctccacattagccagcaaaaaccgcataggggccaagcgaatccagaagggtataaacctaaacactaaccacctaactaacctagagattaccctaatttaatccatcctcaagaaccctaatcactattcaagcaacattctcaagaacacaaacccagaaattactaaaatcataccaaaatgtagatctaaacaagctaaacaactttactaaaacaactaaatgcaaaaacgaaatagattaagagtaatttaagtttcaagattcataaacacaaagaaaaactgaaagataaagtctagatcttttggacaaaccccaaatgatctatttatactaaaatgttggaaaccctagattcactagaagacaggagacttgaggcggtttgggcgaatactcgaccttggggatcgagtaaagagggtgctgcaaagtctgcgcctttgtgtctatgctccgagtgatcaattggtcgagtagatgcttcatcctctcctatctgtatgctcagatgtatggttgagtggggaatgaggaggatccgaagacgctttgatatctcaacaagtgttgtagagatggtcacccttggtcgagtaaatggatcgagtaatggatcgagtaggagggtcgagtagttgaatttgctgcttcatctgaggttgccttgattgagtaggagggtcgagtaaactgcagcctcctttgtagcatcctggatcgagtagagaggtcgagtaggatgatgcctcttctgtagctgcttggatcgagtgaatggatcgagtagagcccttttaagctccttttgcacctgaaaacacaccaaaacatacaatgcgaatgcaagatgatcctagatgcctaagtatgcaaaacaagctaaaatggtgcacaatgatatgatacattgagcaaatgcaaagctaaataatgataaacatacacctaaaatgagtaaaatacagtgttatcaactctcccaaacttatctcttgcgtgccctcaagcaaacaaaaaatcttaagttgaaggagaggtttgaaggtggggattcaaaaaccgaagcatgcctataaaatgggtaagctcaatgtccaggtagctaattctgattgcaagatgatagacccttactcaaaaaagttagccatactcgtcacaattgcaacctaacaacttgccttaatctattcaagcattcacatcaaccaattccctttaacattcattaagcacaaacagtggatcaagcaattcaatggttatgaactcacttggtttcgggcttaggctaagagacaaaaatggtccctctaatggtttggtcgagtaacaggggactctcagagaaaacattgagcttcagtagaatgctaaaggtaaaagccaacggacacatacaagaacagactcccatctacccaatgatataatatgatagctcagaagatgatcccattcccatagatttcctaactctaccctttttctcattctttctctcttttttggttcatgttctaaggggttctcttgaaacgatttaagagtctagcgggtttggttttatacttttacaaacttaaggtttttcttctaatcttagcacatcagataagcgagtttcgatcaaagtagtatagtcaagttacaaattcaaagcaaggtgcggtcttatttcagagatacaatcggttatgcaacagagaactaacaacttgggcattgaacttacttcattgaatcaaaacatgctaatcggtttgaaatcatcattatcccctatgcaaatgagcaatcctaaatgcaaacactctatatacaatcctaaaatgatatacaatctacatgacactcttttttttatgaaataattttctgaaaatttttcaaatttttatggtttttctatgccttagatgatgcaaaatttgaaataagaaaagagaacacaatgttaaacatgtcttgaaccctcccccaaacttaaattaaacagtcccttgtgaaataaaaatctgaaagaaaattcaagaccaaagcacaaaacacacaaagaaaaataaaaatgaaaacgatgttatagtatatacaatggagaggtggtgttacctcagttttcaggtgaaggttcatgctcgttgatgccatagtaagcatgccaattcattaccgagtactgcccatcttgatcccactaattttgctcaacattctgctcgttctgaacccacggatcctacttgacactctgctcaatatcgcgtcgagtatcttggtcgagtgatcttctgctggacataagaaggtccttgctccttggccgaacaattcttgtttttctccttcttttctgctcgtggtgttcatgagatgaatgtcgtgcaggagcttgagggcgacatacctctcgttgctcataggcagattgtctcgaaggtgaaactctatgccttcttgaaaccacttcttcagggcggttttctctcaccatggtagcgcctgaagatgaacagcttagtacagcctgaattgcagctatggccttgccacattttttcaacatcctgtcttgaaacttattccaagcactcatcgaaccaatattcttatgcgcaacagtcagactcttactcactcttggtggtggtttgtattcctcaaaatggaacctactcacattgtagttctcccaatccatctcctctccgtcttcattctcagcttctctttcactctcaaccctttcttcaatgactggagcttctctcgtcgggggtgcttgttccatgaagaagagttcttcattaggcgggttgaaatctatgttacccctcactgtgatggttgtgagctcttggttgggtaggagaaacctcgcatccatttccgttctgagctgaaacttgagaatatgcatcccctcgtgactctgatgatcaataaacaaagcccatctcagatgaggaatgtcgatccatctagggacaaagggagtcgactgaagtggcactccacaagccattagtataggtgttatcacccctcctatagaaatggttctcttctgcttatttgctagtgcccatttcctgaaaccacaaagatgattcaataaacacattgatggtgaagcgtcgttggtgtcacccttcataggcactttgttcttggtgtagactaggatatcttttagggcaatatccagcagctgtatctcgccattgttaattggtccggtcttcttccttgcgtagaggacgttagccattgctttctggaagtaccgaatgcaggggtttcggattgcgttgctcttggcccttaaggatgagaatacggcgtcatcacctattgttacccaacgatccaagagttcctctttcttgaacttgggtttaacatcagtccctctagggaatccaaacatatcttcaagagttttgatagccaaaacgtgtcttttccatagactgcgaatgtgatatacccaagcccttcttctcttgcttcatggctagaaagcccttgaaacaactctacttccagcgaagcaataaactgaacccctctgtcttgtaggctgagtgagggttggacatgagacccaaaagaccactcttttcaaagaggtactcgacatcctctgttatcccaagctcattcattgtttcggagtgggggtatcgagtgccaagaaaatcgtgaggtgccaaaagctcatagtatccctccggtgatagcttagtcttcttcatcaaggacttagtggctcttggagttatttcggggacatagtcttcatctccaccaaggtcttcatcgacgagacttctctcttcagccatagctctcttacctcttgcaatttcctctcttcttctatcacgagctaggaccttggtgtcgtgttgactgaaccgcctatactcttccatctccctctgaggcctagtagaccaagattcggcctcatccacgttgagatcggcgtccatggaggattcgttgctgttcgaactcatggtgaagctaaactctcagaaatcaaagctaaagcttagtaagtgagtctcaaagaaagaaaacacttgtagtttggattgagtaaaataggggatggacgatttcttgaagaaaagtgaagattgaaattttgggcaaaggaatcgagtgagagagatgatggttaggtgcgctcaaaagaagaaagtgagagagatgataacttatctttaagtttcgatttgaatgagtggaggaggatggtctcctgtgctttctttgttgggataagggtgttgaccaaatagtgattgagcatgatgggtaaaggctttgtccaccgagtaatagaatgatggagagacaagtgggtcactcgatcaccaagcttggtcgtttagttgctttactcgaccaattgatagagtaaaatggtgatgcaattttactcgaccaattgatagagtagaattgtttctgttgcacatattttttgatcacacagttaacagcgctacaaatcctgatttatttcctgaatttcaaaaacactaaaaagcatatcaaaatatcaaaattaaatatgtacagagataggcatgagattttctcccaagtgagctagtttaaagtcttaagctagacttcttactattttaggcattgatgggttcttggaggtcaactgtagttccttcaggaatagggcagtctgccatataacgcttgactctctgcccattcacactaaattcaaaacctccctccttagtaagagtaattgccccgtatggcagtacctctttgatggtgaaaggcccagaccacctggattttagctttcctggaaacaccttgagtctggagttaaaaagcagaacttggtctctaatgttgaaatcttttggtgagatctttttgtcatgaaaagcttttgttctttctttgtagatttttgaactctcatatgcttccagcctaatctcttccagttcatgcaggtcgacagctcttttctcttgagctcccttgatttccaaattcaaaattttggttgcccaaatggctttatattccactttaactggtagatgacaagatttcccatagagcatctggaatggggttctccccataggtgttttgtatgcggttctgtaggccaataaagtctcatcaagtttagctgaccaatcccttcttgagacaccaacaacttttgtgagtatagccttgatctgtctgtttgatacttccgcttgaccactagtctaaggtgataaggagtggcaaccttatgcttaaccccatgctttctcaataaaccttcaaagactttgtttatgaaatgtgagcctccatcgcttatcactaccttcggaataccatacctggggaaaataacggacttgaacattttcaggacttgatcatagacaacatggttggtgctgctattgcctccacccacttggagacgtaatccactgctaccaggatataagcatttccatatgagggagggttgaatggacccatgaagtctattccccacacatcaaaaacttctacctcaagaattggattctgtggcatctcattccttctggatatgttcccaactctttggcatggatcgcatttcgctataaattcctaagtatccgtaaacattgtgggccaccatagacctgcttgcagaattttctgagcagtcttgaaggttgcaaaatgccctccataggtggatccatggcaatgtcctagtataccttgaacttccccttcagagacacacctcctgaatagcctatcactcctctttttatacaagtacggctcatcccaatagtaatggtggatgtctctaaagaacttctttttttatatgcatccaaactcttggggatcataccacttaccaactaattgactaaatctgcataccaggacaacttttcttcttcaactacatatgcttcttccagcatgtccttcgtgtcgaagcttttgttaacaaggtcgtagaacataagctgttcttgaggcatagtgtcgtctatcgggactgaatcttcaatcctcatcctggaaagatggtttgcaactccattctcaacacctttcttgtcaattatttccatgttaaactcttgaagcaacaatatccacctcagaagtcttggcttggtttccttcttggcataaatgtgccttagtgttgcatggtctgtgtagaccttcactttggaaccaaccaaatagcttctaaatttctcaaagacgaaaacaacaactaatagctccttttctgtggttgcatatcttgtttgagcttcgtccattgttctactcgcgtagtagatgacgtgaagtttgccatcaatcttttggcctaggacggctccaactgcataatcggatgcgtcacacatgatctcaaatggttggtcccagttgggtgcttggacgataggggcatacaccaatgcttcctttatcaaatggaaagctttgagacaatcctcatcaaagttgaactcagtttccttgcacagcaatcgagtgaggggtcgagcaatctttgaaaaatcttttatgaacctcctgtaaaatcctgcatggcctagaaagctcctgatatcgttaactgtctttgggggttgcagctgaatcatgacatcgatttttgccttgtcaacttcaatccctttacctgaaatcttatgccctagcacaattccttcctgaaccatgaagtgacacttctcccaattgagtaccaaattggtttcctcacacctttctagaaccctgcacaagtttaacaaacatgaggagaaagaggatccatagactgaaaaatcgtccatgaatacctccattatctcctcaataaaatccgagaatattgaagtcatgcttctctggaaagttccaggagcattacataaaccaaaaggcattctcttataagcaaaggttccataggggcaggtgaaagtggttttttcttgatcattagggtgaattgcaatttgaaagaaaccactatagccatcaagaaaacagtaataaacatggttagctagcctttctaacatttgatcaatgaatggcaagggaaaatggtcctttctagttgcagcatttagtttcctgtaatcaatgcacattctatgtcctattatagttctagtgggaatgagctcatctaaatcatttttaactacagtcattcctctcttcttgggtacacagtgcacaggagagacccatgtactgtcagaaattgggtagattatatcagcatcaagcaatttaagaatttcctttttaaccacatctttcaaatttggattttaatctcctctgtggttctatactagtatatgattcattttcaagatggattctatgagtacataaactaggtgaaattcctttaatatcagctaaagaatacccaattcctctcctatactttctaagttcattcaacaactggttcacttgttcatcacttagtccatcattaataatgacgggataagtatcatttgaaccgagaaacgcgtacctcaaaccttttggaagaggcttatggtcaacctttggggctttgagttctgaccagtcatctgaacttatattctcccctccatggtagagtatctcagttgagtttgttttttcagcgattaggctcatggtgcatcctgatactgcttcttctgcgagaacgatcaatttctcaaactcttctggtccttccattgaacgatcaattcctcaaactcttttggtccttccattggtatgtgggcgtcaaggtactctttgtacccttgggtttctaggtgtaggtacccttcttctccatcgttggttaaagcacttgctaggtgatctccttctgtaagttcttccagtaattcgtcagccaatctatccatttcttcgatccaaaagacttgttcattgattgttggtttcttcatagccttgttaaagtcgaaggtcattttcatctctttccccaggtttaggtcaatttttcccttcttgacatcgatgatagctcctgcagtagctaggaatggtcttcctacgatcaatgggtcttttggctcctcatccatctccagaattacgaaatcagtagggatgtctattgatccgactttaacaggcaggtcttcgagaactccatgaggtattctgactgatctgtcagctaatatcagttggataccgcagggtttgtatttactaaaacccaatcttctgggtacagataggggcatgaggctgattgaggcacccaaatcacataggcatttactgaaagatagtggtcctactgaacaaggtagggtgaaggatccatgatctcccaactttcttggtattatgtttttctggatgatagcgctgcattcatggcctattaccaccattccctgtacctccttggttctttccataatcagatctttgaggtacttgtgggagtgtggaatgagtgtgaaagcatccattaatggtattcttagctcaatctcctttagttgcttgtcaaatagagttttgtatttttctattaattccttcttgaatcttcctgggaaaggcatagtcggtttgaagggtggcggagaaaattctttatttttctctgaagccgctgctttcctttcctcaaaagttggctttgctcgatcgagtagagggtcgagtgagtctgagggttgatcaagcttaattggttcatcagtttgaacttcgttttgatgttggtcctctccttcttgaacttcactgtcctcagtgatcttttctgttggctggttgttgatcgatttccttccacgacggagtgttactgcgtgggaatattccttagaattttgaatggcctttcttgggtgttgccctggatacgttgatgaggtattggaaatagcttgacgttccatgtatgtcattttagatgtgagatcttcatatttgcttcttaattcattgtaggaacagtcgactttagtattaatcacagccaatcgtttttccagaactagagctccagtagtttgaccctggaagatttgttgaagcattcgttttgtgtcaggatcttgggctgctgaggcttgttgtggttgttgagtgaactttggtggtgaactctggtagcctccattaaactgttgtttagggacataaccttagttgtactgaacaaaaggcttagactgattctgttatggtagatacacttgatcttgggggttagctacattagtgcttctataggagaggtttgggttgggcgtgtagttgttgtagcccttgttaaaccctccttggttctgaatgtagcacagctcttcagtttgatcattccccccttcttgcatttggaagtgctcctcatcagtgatgtagtgtatctgcttctgctgagccatcagcagcttgtctaaattctcattcagagccttgatatccttgccctgtttgtcctcacttcctccagttcctctcattgagcgatcatagtcttcattgtagcacccatcagattgtgctagattttcgaccaactcccagccttctgctacatccttgttcaggaagtttccattggaggcggtgtcaagtagcattctgatctttggtaaggctcctctatagagtgtgctcaataatgaagccttctaaaaaccatgataggggcactgagtggtgtagcttttaaacctcttccaagaatggctcctttaagaatgttttatggtgttttggatgttctgagatgatctgagatgccttgggcgtcctcccttatatagggggcgaatggatgcttcccgaagcatcacatccgttccttgcatccctccggaaggtcacatccgttccttgcatcctttcgaaaggtcacatctgttccttgcatcctttgggcgatgcaaacgttcgttggtacccgctcgaccttacaccttttggccgagacacctcttcacccgtgagctaccacagtccaccagctcgagtgtcagctgaccggaccacccagctgggtcagtacttgatcagctcaccaagctcagtcgagctgtcggtcagctcacctagctgagctagctagtcttccagctggtttagctcacatagcttacctagctagttcatacagcttgtccagctcacctagctggtttagcttatactttctcgttcttcctacttagtattttgttccgttcctcgaccatgatctagttttctcctaaaacaaacctgcctctttatgaacgcgggacgcggtcgttacaagtctaccccccttacactgaattcgtcctcgaattcggcgggtgagagatcttgtttactccctaacttgggacacgggcgttacaagtctaccccccttaaactgaatttgtcctcgaattcagcggatgtaagatcttgtttactccttaacgttttcccatctttagtctctccgagactttagatatcatatttgatcaaatctctatttccgagcttgatcaagtttcctgatcaaatctctatttccgagcttgatcaagtttcctgatcttagtcctttcccgaactcaatcattattttcgatctttgtcctttcttggacttgatcaatattttccgatctttgtcctttcttggatttggtcaacgttttccaatctttgtcctttcctggacttgatcaacgttttctgatctttgtctcttctgacattcgatcaaatttccgatcctggtcctttcctggactcgatcattatttcccgatctttgtcctttcctggacttgatcaacgttttccgatctgtgtcctttcctggacttgatcaacgttttctgatctttgtctcttccgacatttgatcaaatttctgatcctggtcctttctcggactcgatcattatttctcgatttttgtcctttcgtggacttgatcaatattttctgatctttgtcctttcttggatttggtcaacgttttccaatctttgtcctttcctggacttgatcaacgttttctgatctttgtctcttccgacattcgatcaaatttccgatcctgttcctttcccgaactcgatcattatttcccgatctttgtcctttcctagacttgatcaacgttttccgatctgtgtcctttcctgaacttgatcaacgttttctgatctttgtctcttccgacattcgatcaaatttctgatcctggtcctttctcggactcgatcattatttcccgatctttgtcctttcctggacttgatcaatgttttctgatctttgtctcttccgacattcgatcaaatttttgatcctggtcctttcccggactcgatcatattctcgacttaagtctttttctgactttgtcaatatatccgaccctggtccccaccggactcggtcaatattcccgacataggtctcttccgaccttgtcgtttttccatgatcttggtcaatttccgataagatcaaaaccccagaaatagtcaaatcctgactaagtctgtacccgatcttagtcaagttccgactagatccaaatttcattgatatcggtccatctccgaatatatcaacccattttcccgtcatgtttaagttttgacaacaaggataatatcttggttcctgatcgtgagttaggtaactgtttccgtttccaaacacatcgatccctcaacttccttatccgccaaaaccttactatgacgttttcccgagcacctatccatcctaggatcaagcatgctctgataccaacttgtgagacccagtcccggacgtctcggcgtccagcgacgtagtactcaagttcgcgcctctccccggccgaacctcttaatttttcgcgattcaacatagaattgcctttacgaggctaaattctataatcgctctcttattacacagcggaagtctttctaaccttggtttaattctaaccaactcttgtaccggtttcatcgtctttgtcccttagacttagatcgattctttactcggtcaagacatgcatatgttcgctaaccattctaagccaaacaatcgcatattcctttatcctactttcacgatcaattaccaaacgtctatcttaactaataagctagatcgttacataccttggccaatatgcggatttgattccttagcccgtttgtcgccttactccattcgttcaacgactcgtcatcggtcgtgaattgatgaaccaatccctatcgttacttagccatacaaccaaccaaccccactggtctaagtacaacgatagagattggggatcgtacgattcccttggttcacgatgaccgaatcaagctcttggcttattgatccatccgtcctctaaacgtactccccttcggttccatggtggacgattgagcccttggcttatcgaacaatccatgtttccgatccggtcatttactacgaccgcctacggtttactaactgtttattcgtctggtctatggtggtcgataaagctttcggcttattgatccatccatacgatccgaactatatccttatcacacccaagggtccgtggattcatccactggatcatcataggctagcccatgaaatctttcttccgtcggccttaggtttgctcgcgggtccaacatccgttttgtccatcggttcccaccgtggactttcccatccgaaaggtcacatccgttccttgcatcctttcgaaaggtcacatttgttccttgcatcctttgggcgatgcaaacgttcgttggtacccgctcgaccttacaccttttggccgagacacctcttcacccgtgagctaccacagtccaccagctcgagtgtcagctgaccggaccacccagctgggtcagtacttgatcagctcaccaagctcagtcgagctgtcggtcagctcacctagctgagctagctagtcttccagctggtttagctcacatagcttacctagctagttcatacagcttgtccagctcacctagctggtttagcttatactttctcgttcttcctacgtagtattttattccgttcctcgaccatgatctagttttctcctaaaacaaacctgcctctttatgaacgcgagatgcggtcgttacaagtctaccccccttacactgaattcgtcctcgaattcggcggatgagagatcttgtttactccctaacttgggacacgggcgttacgactatcctgtcattgtagtattttaggtgtcaatccaatccggtgtgatgcaaacagatgagatatgattagaaagctctatgtcaagccaagtagagagttggttggttctagcagtcctagtatgcaataacagaaatgaaatgaaactaaaagcagaaatgggagtaacaggcaggtgaataacaaagcagaaatgataactggcaatcaaatggataaacgattcctaaggatggggtaatcgaatagtgtggtctccttaatctattcaggtggttgacaaaacttgaaagaagctatccctagacaacaagttcaacaacagattaattcactcccgtgatagaaatcctcaaacaaagctagacactgacctaattcccattagcgatctctaactaagcaggcattatcgaatcaacatgttaaagccaataccctctctacagcgaataccttggggtagagtcagatatctctggaattaataggatccaacgcccattaaacgccttctgagcgctggacgtctggactcatattccacattaaccaatgaaagcaataagcgcaactaatctagaagggattctagtattctaaactcaaccacctaaaacgaccaagtaaaccacaactaatctatcccatcctcagaaatacggttcactactcagacataatcaaagacaatagcaaagcaacgattgaaaacatgataacataaatgacgtaagacttatacgaaaaccaaatatcaaatacttgaaagtgaaaatacaaagtcgcaggagaaacactgcggctatgaaagttgcgaaaatgtaaaagtgaatgaaaaacggaataacaaaggatgccctagggaaaaccctaagaggcagtttatataagcgagaaatgaaacaaataaggaaactagatatataacgaatcttcacgtcatgaccctgcgatcgaatgtgtcattggcatctgatgggctgaaatgagcttccctgtgatcgagtatctctttgatcaaactaggcttcaggggctccgccttgcaatcgagtgagatgcagtgaagtcaagattgaatggtctagcgaccatgtgatcgagtgcgattgagtgaatgtcatgaggtggtgttcgagtggtttcttcggcttctcttctcttctttggaactacatgggatactactcttgtcggctcaaccttaacacgttataccaagctcaatcctaaaaataggcctcacatgctctcacaaaataacatgtcttgaaagaagggttggttaaaggtgggggaactactccaataatagaagcagcaacttggattaacaagagtggtgaataagttaaataaaatcaaaataagtattctatccatgagttcaaaaacgatgcaaacatgataattataagtcagattcaagttcaaattgacagggaaaggtgtcatgacatgcatcgagtggtttctatagaacatggtgcggttttacttcaaagtcattcaaatgcctcagagaactaataactcattttagtgaatcatcatgcttacaaggctatttcctgattatcccctatggatatgcaacaatcctatatgaaacactctagactcgatcctaaatgtaatgcaactaaatgataactctgtttttgtggaattcattttcaaaattgttttcaattttttttgtttttttctatgacttagatgatatgcagactcaaataatattcacaaaaaacaagtcaaatacgtcttgaaccctcctccaaacttaaattacacagtcccttgtgtaatcaaaatttgtgaaagaattcaagataaacagagaaacaaaaacaaaagcggtatttacaaagggttttggtgtgttacctcagtagaatgttctggagatgtagtcatccatatctgcttgagtgtactcagcaagcatgaccggttcttgatgtggctccgccatctcctcgtcattatgctcgatcgcaaccccagcaggttgtgaagcacgtcgctcatgtgttctacgacccgacattattcgacccttaattgatgaatgtacagttctagcactcttcctcctcttgtgttccattggctcatgagacgagtgccttgcggaaacttgtggaacggtgtggtccctttgttgataggtggattgccttggtgggagaaagtcgtggcagctggatggcatgtcttcaggcgggttgtcattgaagtcctgtcgggcattttcacttctccttgcgattgagtggtttgggcaattccactaagagaccactcgatcacaccacttccatgttgcgatcgagtagtttgacatttttgttgagaaagatgttgtcccaaaaccagtagatcgcactctcgagcttttactctcatcatgcgatcgagtaattcataaaaaaaattgattttttttatttgaacaccggttgcatccctgctgttactccagctgttattcatttcctgagaatcaaaaccaaaaccaaaacaaatcaaaagtaaaaaaaaaaaaaaaaaactatatacatggataggcatgggacttcctcccaagtgagcttgttttaagtctctagcttgactcctcacactcattaggctcaaggagggtgatagagtagagttgacgtctcctctgcttccttagtagatacaacatcaaattcagcatgctctcgtgaaaggtctgtaattgagtactcaatggccctttcttggtaagctcctttttcatcatctggatagtcgtcttttctagacagttctaatgtgaattcacatccttcttttctaaccataggaataacttcatcatttgggaagtccttgatgtcgagtggtgctttgttggctttcccatggagctccttgacttgatctttcagctctttcacagtgtgtgttagctctcttatagctctattatgccatttagatctctccttgagttctaaccaatcatatgatgtcctcatgcttgactttagctgtttggttgagcactctagtcgagtatcaattgagccttcctcgttcaatgcaacatcctctctttctaacacaatgacacctttaaagatctctgatcctggtactctgttgtgtgagtctaatgacatctcatagctcaaggtctcactggagagaaatccagcttcactacttttggtcaaagcagtttgaaggtgatctttgtcagtaagttcctctaacagttcattagctagctgacccatttcttcaactaagaaggtttgtccttctattgttggcttcttcatagtgtccctgatttcaaacttcattttgaaatcctcccccagattaagattaatttttcctttcttaacatctatgactgctccacctgaagctaagaaaggtcttcctaagatcagaggatccttagattcttcatccatctcaagcacaacaaaatcagtagagacctctactccattaatcattactgacacaccctctaacaggccaaaaggtctccttgaagtcctatcagcaagaatcaaggttaggtcacaaggcttgtactgaacgaatcctagcttccttgccacaaagagcggcattatgctgactgaggctcctagatcacatagacaattgttgaaaggcaattgtctaatggaggatggtagagtaaaagatcctggatcttccaacttttcttgaacaatcttcttttgagtgattgcactacacttatgacttaataccaccattccttggacttctttgatcctttctgtaatcaggtctttcacgtacttgtgcttgttaggtactagcgcgagacagtccactaaaggcatatcctttatctgtttttccaggaggtctcgatatttcgcaaccagaactttcttaaatcgaccagggaatggaagcggaggtttgtaaggtggtggcacgaagactgtatctttggtcttttgctgctgtcggttttgcaacgaaggtagtagctggaggagcttgtggtcgagtgctttgactgtcaaggatggcctcttcgattgttttctcagccaaaacatcatcttgataaaaatcctccccctctagaatcacactgtcctcagtgtttaatgtagggacatgtcgagttggcagctctcgatcatttctgatagtgatggcatgggcagtggcatactcctttggattccggattgctttccctggaagctggcatgggttgttgttaacagatggtgaagcgaggatgccttccacatatctcatcctagtgcctagtgattcaaacttactgttcagtttgacaccttgtcggtcgactttgttgtttaattcagccaggttcttagcgatttccattgctcatgtggcttgtccttgaatgagttgctggagcatagtcattatgtctaaattctgaggccaaggtgcttgttgttgttgtggtgtgaaaccaggtggtggctgttgttgttgatatcctccctgaaactgctgctttggaatgaacccttggctttggttgtaagtaacaaacggtttgggttggttctgctgctgctgctgatgagggtagacttggtcctgagggttggcgacactggtgcttctatatgacagattagggttgggtctgtaattattgtacccttgttgtagccacctttattctgaacatagctgatttcagcacactgatcattctccccctcttgtacttggaatgattcatcttcagagatgaagtgaacatgtttctgctacatttggacaattttgtctagtttgtcattgagagctctcatctctctatggtgcttgtaatcaaagtcagaactggtgtggatgcttctgtcatagtcttcattgtaattgccatctgactgagtaaagttttcaactagctcccacccgtgttcaacatccttcttcaggaaattcccatttaaagcgatgtcaagcaacatccttatcttaggcaagacgcctctgtagagtgtgctgagaagagaagctt

SEQ ID NO: 548 - DNA, 101644 bp, Arabidopsis thaliana
agataagaactgggtggagttgaagggtaaatttgtaatccatggttcgccatcgagagtaatactataccttgaaggtccacctccacgagctgacattcttctcaacagtttagttgttcaacatgctaaaaggaatcgtccatcgcctcctcctttctacgaggtttagtccctttaccaactaaactaaatgacactagactgatggttcttatggggatactaatctgttttgtttggcagaatcctggtttcggagtcaatatagtcgaaaacagtgaagttttagatgggggaactaaaccatggttcactctagggaactgcaagttgagtgttggacaaggcgctccgcgcactctgcctccaatggcgagagacacgctaggtcctcacaaacctctaggtggaaactacatcgttgtgactaacagaacgcagacttggatgggtcctgctcagatgataaccgataaaatcaaactcttcttgacatatcaaatctcagcttgggtcaagcttggtgtgggagtaagtggtagtagtatgagtcctcagaatgtgaacattgcacttagcgtcgataaccaatgggtcaacggaggacaagtcgaggtcacagttggtgatacatggcatgaaatagccggatcttttaggctagagaaacagccacaaaacgttatggtttacgttcaaggtcctggagctggcattgatttgatgatcgcggctctgcagattttccccgtggatcgtcgagaacgtgtcagatgtctcaaaagacaagttgatgaggttcatattctcttcaaatctctcttagttatacagttttaataagttaatgacttcaagaatgttgttacttggtaggtacgtaagcgcgacatcgtgttgaaattctcaggactaaacgacgacgaatcctttgatttgtttccttacatagtgaaagtgaaacaaacatacaacagtttcccagtaggaacatgcatcaacagaacagacatagacaatgaagactttgtagatttcttcacaaagaactttaactgggcagtgttcggaaacgagctcaaatggtacgcgacagaagcggaacgtggaaaggtaaattaccaagacgcagacgacatgttagatctctgcattggcaacaacataaacgttagaggacattgtatcttctgggaagttgaatccacagttcagccatgggttcgccagcttaacaaaaccgatcttatgaacgcggtacaaaagcgtctcacggatcttttgacgcggtacaaaggtaaattcaagcactatgatgtcaacaacgagatgcttcatggttctttctatcaagatagacttggaaaaggtgtaagagcactcatgttcaatattgcacataagcttgatccatctcctttgcttttcgttaacgattatcatgttgaggacggggatgacccgcgttcgtctcccgagaagtatataaaacttgtacttgatttggaagctcaaggagcaactgtaggagggattgggatccaaggacatatagatagtcctgttggagctattgtttgttctgctcttgatatgctctctgttcttggtcgtcccatttggttcacagagcttgatgtctcttcgagtaatgaatatgttaggggagaggatcttgaagttatgttgtgggaagcatttgctcacccttcagttgaaggtaccatttacttcatttttcccaatttcatatatatattttcttaaattactacacaagttagatatacctaattattactactagtttagtatttctatcaaattgtttgttaggattttaaccaaattaaaattcaaaagcttagatgtaagatatttttaaaagataattagtaaaatagaaatgggttagtttgttatatagctaaatagggaaccaaaattatactccctctgttcttttttatttgattttctagaaaaaacatttgtttcaagataattgatgaattgtaaattttaataaaaaataattgaatattattggttataggttatatgaaattgtaaaagacaaaaaaaaatatatttaaaatcaactttaatatgtttactttaatatgtgtgtttttccaaactatcaaataaaaaggaacagagagggtactaagaaatggggtgacaaaaccgtaaataaatagtgtttttcatgttatataaaaattagtgtcatatcttagaaaatagtgtgttattggataaaatttcaagataattgaaaacatccacaaaatttaagttagttttaaaagccaacttatttaataatttgcaatctattgtttctgctaataagaggtcagaaatttgactatacaatacattatgcgctatttactgcatattcatctttttgtttatttaatctcaaatgaaatgtttggtggagaaatgatataaagttatttctcaagtcatttaatttgcattttcgtttttcagtatcaataaatttatataagaatcgtttttttttttggtatgtgagaatcttaataagatatttatattttgggatacatatttgatgttaataggaataatgttatgggggttctgggagctatctatgagtagagagaacgcgaatctggtggagggagaaggagaagtaaacgaagccggaaaaagatttttagaggtgaaacaagaatggttatctcatgcatatgggatcatcaatgatgagtcagagttcacattcagaggctaccatgggacttatgccgtcgaaatttgtactccagctgggattgttctcaaaacgttcgttgtcgaaaaaggagacactccacttgttatctccattgatctctcttctttgtgatgtttgtgtatcctttcctttttcatttaatatttgggtggtgatttgttttttgtggagcatgtaacatatgtacacaaagttatgttatgtctttgtttttgattgtttaatacaattgcaataaaaacttgtgaatatgattgttaattgttataaaaaaaaattgtttggtgtagtggcctaattctacctggatcgggagaagtccagtctgtagtatttcggtgtgttcctatcgagactgaccggatcagccgatagggtattatcaaaaaaaacaaattgcttgaattttatggaattgaacttgactctgctactagggaagtctttgcttagcctgtcatatcttcgtattcccacatagaagcggtccgctactagggaagtctttgcattgctatgttgtctaaactagcttggattttacttcatcaggagactggtaatatcccggacctgaatagctagagaaggtgagtcgtgtgacgttatggtcataaatagataatatgacgtgatggttgtgattgggttgattagtttgatcttagggatccttttttattgtgtttattgtcaatagattgtattattacacttctatggttaatcatgtttccttatctttttgaaggtatagaggctatagataatcattggacaaatcattacattggttgaaaaactaagtacacatgtgtgatcaaaggattaagtatgtgtgtaagatactaagattataatgttaagagtgaagatgttagttatttaatacacactagtttatgatgtgtactaggatgatatgttgtcgttgaccaaattatacaccttcgattctctttgtgcatgatcgttgttacctttgagcctagctactggagaggaaaagaatatttgtagtagatttcaagtgtctcttccggttgttccatttttgtctacgtttccgctaaatgcttatattttatgctattatatttagtaaaatatacttgtatcgaaattaatatttgttacataatccctctcttctgcgtagtttattttttgggttttattcttgttcttcaaatattgatgtagtgaaaaacgtcattattatttaaagttgtgaccaatagaaagaagacactagagaaactaatattattaaactagtaaaaaaataaaaaatataaaaaattattttttcttatttagtgtgaaaaacctgaaacattaatttataaataacagaagaattataattttcttataaaaaaaaacttttaataaatataatgctaaaatttagctcaaactttgtcaacatcctttgttattagctaacatcaacttgttattttcttaaaaacaaatattctcatcaccatttaccaaattaactcaatagaaacaaaaacagttttcatttcttttctttttttccgttttgcactaaaattaatttaatatggaatgtggaatgtgggccaatgaatctataaaatatataacaatattaggaaaaaaatagtaaatgcaataataaataaaaagatagagaggaacagtaaaggacagtccttgggactagactaagtgggagtgatgagaagaggaggcagtctctaaaaagctcttttcttttccttcgtctggtaactttcagatcccagtttgttagtatctctgtcgtcacataaaaataattgacctctcatctttttttttcgtctccttaaatctaaccccattctattatttacttacatgtcttgtgttgtgtcccttgctcttgattaccacttatagaagtaatcaatcaaactagagtttactttctttcacctttttggttgcatattcaattctatctttgttattcataatgcactctaaatcctaatattaaaacacaacactagttttgaccgttgaatgcgtttaatctaataggcttacgtccttgtctttatctgtcggccaaaacatatttagattctttagcttttcacaaaatcttaattactatgttaatcaataagccaaaatattctctgattggtaattactagaatgtcttttactttattttaattttcaaatcaacataaccatatataatagataaattttgtagtcctattttgtatgcttagtacatatattaaaaaaatgttctacctatatttaggtaaaagcaaagtaaaaaggggttgtttagcttctctttcacatcaataaataatatgcttagcagttgtatagattgaaatcatggactacaaaaaaaaagatagctaaaatatgtgaatgatatgtttccacgataatactatattacatatattaattgcatcacaagacaaacagcatcatgcctttgtctacatgtcggtttatagttgctccatcttttctgttataaagtatgatctcctttcattactatgtcctaagtggtaacaaactaacaatccatcgcttgttcttcttggtttttttttttcttttcattttattacattgcttcagttgtagaatccttcactagtctatctgtctttttcattggattacattgttcagtatcaatacttttctaatagagcatgtactattcatgtgtggcctccttgtagttcaactttagtcctagtgtaatgcttctagaaaaatgaagttgcttccttgttggcttaaatgaaagttattcatatgtataagatgttgcatgtctcgtaagtagatgaaagaataatgcatggtgcaatagtttaaattaaagttggccaaccatgtaagagagaagttattaccaaaatactttaagatttttgaaacttctattgcatgggaaattcataaatcaaatatgttaacaaaaagtgatttgatgaaagtgcgtaaatcttctatgtcaaaaatgtagaactttacttaaactaatgttactattatacttaaacttggccggttcggtaaatccggtatgtgtaacatacgagaatacaatgttagggattccacaactcaacagacaaagcacgaaatgaatcagagcatcatattggagttgttgcagaaagaaacaaaaggaggaaggctgaaggcaaaagtaaaaagaggaaaggtatcgagtggagaaagccaaagaccatcatttcatggactcctatcttacatagcacatgtatatcatatatatatatatatacacacacatggatatatgcatatattatatatgtcaactccatttataaccaaaaacaagagcaagaggatccatcgaagtttagcccaaggcacttctacttcttcaaatagtgcaagaaaaaagaccacccaccaaaaagtcttggattcccatttgttgattatacctttcttttttttaatataggtttttgaatattttttaaaaattgtaataaatgatgatgatgaattgatgatgatgtgaatagagttctgacagaagatggggtccgtctataaatgtcccatctctccttttgtagcgcgcatctctcgggggacttgtattttctgtctggcccaatgcttctctctctctctacctctctcacatgcaaatcagcaatgacaacagtctaaagtctttcctttctttttctttttttgtcaacaagtgaaacactaaaccaaacgtcttttcttcttctgttttcttataatatgttttgtattttcggtgtgtgattagtgatctttggatggtataagaagtctgtgctttgtagtttttatgaatcgggtaagagagagataccaaagtggaaaaaatagacagttaaaccattgtatggctatttaaatttaacttggtaatttgttagtttttgaggcaaaaaaaaagattccgcttgtagtgcgtagggtagttgatgatcaggatcttaggacataaactcgcataagttctaggttaggtttgattgaaaacaaaacagattacttggacttttaagttttgttccatgtgtttcatctgaagtaataagtttgcacaaattattaccaaatagtctgcccatgtccgaattagttgggtttaacttggaacaataatgccaataaaaagacgataaaaaaggtaatggaccaataaataaattaaaaatagttaaaaaaattgagttatttgtcttaataaaaattaaatatcagaactattttctattcttaattcaactttataaaaacttttttaaaagaaaaaaaatctatacaaagttttcctgcaaatatagaaaacattttctaaaataaattgttgtatgttttgaaaagacaaagaattttagcagtattttgagtattatacctattttgttttttggactagagtattatactaaaatcaataagttggatacttgattttgtttttcttttttcctttttgatggttttgtttcatatttctatcttgtgtttcatataataaggacatctattttaatttttacaatttatcacatttactaataatgttcttaagaaaccaacaattattgaaccactattttgttactgtgcagtcatttattttctttttctcttacttaattgtctattctttaccacctaaacacttattgccaacccactaaaagataataaaaatttgttttcttagttatcttatgcgtattttgagtctaattagtcaatacatgttctatctgtaagaaatgggctatatagagtagtattaaaaaaaaaactaaatcatttttagggtgattaaagatacatttatatttcgtattttatctttaaaatatcagtttgtaagatctaggaaaaattgataatgacaataaatatgcatgtttttatataaaatagcaaagataaaatttatgttggtaatgtttaacatttgtcaaaagaactgtaaatactttcaaaataacgatttttttattggaaaaattgaacctttatacctcagaaaaaacaaaaacaatataattccacatatgaaatattgctccctatataactgtgggcaacaataatatatgaatttaattttttaaattaatacataatttttactgtagatgatttatgttaattaaaggagatggttggttggtggtcttttcaaaaatggaataatcacagtttctaactgttaataagaatgcaataaagttctaaaagatactaattcaacaataacatcaactagatatgttttatctaggttgtcaatttcttttgttcagtttaataatcattttatataaacaaaatcacaatatccttatgaatgtaaaatctttaaaatagtcttaggttttcaactttctaccatcactgtaatttaaattcaagttttcataattcaaaaaaataagttatgaaaacaatgattattttcctaaaattatatttagcgtgaaaatcgccaaaatgtcaatacataaaaattaaaaaaaaactgaaattcaatttctacatatatttacttataagtagatctatcgatctgtttaggtacttaataataaaaaatattttggttcaccgctaaaaataaactaaaatgttcacctccttttattcatgctaataagaatttaccatctaatcaaaaacttaaacttatttaactattaaaattcatatgtcaccaaaacaaaattatgtatcagtttggattgatagaattagaatttagattttataattaaataaaattatatatcagtttaggtttattaaagtgtggttagaaattaaattttataataaaataaatttatttatttattagataacaggttttgattgataaaataaaatagggtgaacaaaatagttaattgtgacaatttagataaaaacccgaaacataaaacctacacgaacacagatgatgattatagatagacacatgcacgcacgtgggctgaagcaggaggaacagtaataggtgtagtcagtcatttttttcacttcattgcactgccaaatcttttgatcactgttaatcgttgaataaaaacatccaacgcataagtcaatcccctactctcacttccactgcctctctttctttctttctttttttttcgttttccactcattaaccattacttactgactcgtagttctattttggccatttattaccgtcagttcttgtaacctggccaatttgcaaatatgtactttatttctagatttgattagcttatcatctccttttattttcttaacatttgaccattgattgaaaatgattgataagtagctatgttgtatttagagattagtttaattagtgtatctcttgagtgttttattgcaggtttagataacctcatacaagtcgttacatagttatgagtaaatgagtttattaataaatttagagaacaatctatgcctaccggtgaatttttatataataaattgaatgttttattttattgttataattgactttctaatctaaaagatagaattctatgaaattgtacacacttttgaaaacaattttttttttaatagaaaattataagaaattagatccatatggttatgggtattataatatttttatttatatatatatatatatatatatatatatatattcttcttgcatgaccatattaatgagaatattgggatcagagacttatttatagtgtgtttttagtctattgcacttgtgttttggaatattatgatatttaattcaaagatgtacccttaatgaatgatcttttatgatgtcaatgtttcagcatcttatactgaaacagaaaataagaggaggtcttaaaggaaaagaaaacatttcgaatgcaaaaatttaacctttaacattttcgattttttttaatgaaattctaataatattggttctaagcagctgattttatttttttaatagtaagaaataatatatgtatacatatatatttaaatatttactatcaaaatttccggcatagcaagtcataatttgtaagaaatcttacattttgttgtttacaaactctcacaagtcacaatgtaagtttcggtctagtgcagtgatgaggtaaacaaaaaaaaaaatctatcgatgagccaactttttgatctagagccctaggatttgacgatttatatataaataaaaccctaggattttcgtttctttttgtataaaaatgaattcataggcactctatacgtctcatgaatcatgaaatataaatcgagattaaatagaaaattgaatgttgaccgtggaacagaacaagtgttgaaagaagtgtgtttgcagcatggtcttatcatagagccaatagttggaaattagcagaatatcgtataatatccactatcctgtaaagcatttttataattccttttttttttctcggtttctaatgtaatcttctatccgataacaaatattcggatagtgtgatctctccactaatatacatacgaaattacgaaaactaaaattataatttcatcgatttgattaaactccaaaaacatccaagtcttgcatcaaatatgtacatttctatcatattgtttataattctttttttgttatccgtaagttttaggcagaaacccgtacagtgaaaccgaggaccagaacaagataaacgtagtcccctctcctaagtatagaattataatgtgacacatgatcacaatttgttgaacgaactctatgttcaaccactagactacaaattcttgggtttatatcgtattagaagtatatataaatcatacatattttttttaaaacttttttcttgactattcttttaagaaaaaaaaacatttcattactagaaaatagtacaaaatatatcattcaacctagcaagaaaccatagcctgaagtagccgcgaagacctagttgcttaaacactgagtggttcatcttaattcgaatattataaaccacattttaattaagtaaattacttagtcttgttctaatgtataaaatagcctatgagaggaaaacagaagagagaagcctttgccttatctcttgtcccttctctcttacctttattttaattttcaaatatttctttttgctcccaaagcaaacgacgtcttgtcaatccactcaagccacccaacttcttcattattgttaatctctctctctctctctttctctcttcttctctctttctcttttttttttttttattttcttctcttccatgtcacttccttgacgaattctatatacctagttcgttttttcttcctcaaatatatctttttcaatttatttggtttttctttgggtgcaacttcacctcacaaaattttctctctttttttatattaatttgagttaggcctttttgatttcatagatgagtcgtctagtcgtctggatttgatgtggttatagtcttacagagacctttgattgaaataagaacaaaagcaagaatacatacatcctcttcatcttacacccatccttttttatttttctagggttttatttttttttaatttattttttttctttgatttttatattctctctctctctcaaatctttactcatctgggtatggaagaataccagcatgacaacagcaccactcctcaaagagtaagtttcttgtactctccaatctcttcttccaacaaaaacgataacacaagtgataccaacaacaacaacaacaataataatagtagcaattatggtcctggttacaataatactaacaacaacaatcatcaccaccaacacatgttgtttccacatatgagctctcttctccctcaaacaaccgagaattgcttccgatctgatcatgatcaacccaacaacaacaacaacccatctgttaaatctgaagctagctcctcaagaatcaatcattactccatgttaatgagagccatccacaatactcaagaagctaacaacaacaacaatgacaacgtaagcgatgttgaagccatgaaggctaaaatcattgctcatcctcactactctaccctcctacaagcttacttggactgccaaaaggtttggttttattcttattgttatgttataatatatactctttttttaaagatataatatatagttatgtgtgacatatatatgtatgttcatgggtcatggtttatatagattggagctccacctgatgtggttgatagaattacggcggcacggcaagactttgaggctcgacaacagcggtcaacaccgtctgtctctgcctcctctagagacccggagttagatcaattcatggttcattactaaccaaagttgaattttaattaaatgggtcggttctttgtgtgtatatgtgttagaagtcttgattttccttttttattttttggtatgaataggaagcatactgtgacatgttggttaaatatcgtgaggagctaacaaggcccattcaggaagcaatggagtttatacgtcgtattgaatctcagcttagcatgttgtgtcagagtcccattcacatcctcaacaatcctggtacatgtcatcaatctcatatacatacatatatgcacatgtaagaaatggctggagaaaacaaagtgtagtggcaaggtagggctaatgatggattgcataaattggcatgtttctttggttcatggtaaattgttgtaacattgagatattaaaaaaaaaaaaaatcatagtctacatacattttcaaatgttaattaagattataagataattaagataattgagatgcattattgttggaaagtatgtaagatacaaataggtgtgcatatttgttcttgttttccccattgtggaatccatccaaagatgggtggggcttatttttgttttttttcttttcactcggcccaaaagtactatcacaagaacttttggtgctgctcgtgaagatttatttgggacattatcttcttcgatttcgttatgctaaaacatcaaaatctctactcggattaattagtctaatcataaaggtagatgactagaatgttgttaaatgactaaaccatttaacttcatgaaatatattatgttgaagcagatgggaagagtgacaatatgggatcatcagacgaagaacaagagaataacagcggaggggaaacagaattaccggaaatagacccgagggccgaagatcgggaactcaagaaccatttgctgaagaagtatagtggatacttaagcagtttgaagcaagaactatccaagaagaaaaagaaaggtaaacttcctaaagaagcacggcagaagcttctcacgtggtgggagttgcattacaagtggccatatccttctgtacgtataaattttctctcatctctctttgccctcatattttttaaaatatatactacaaattaagtgttttaaaaacctatctttaagctagcaattccctctgaagccgctatgttaggccaagtaggtacttgcatgaccgattttgtgtttaaatccttgtacggtttccaacaacatggttttaaatccgaatgctcacaacactagaattagtcactaggatacatatcttagtcatggtgttctaacccttaacatactattttctaacacgtatatcaatcacttttttttaaaaaatgtaagtttgtgatgaaatttttatccatatattttgaaacaatttaattttttttgtagttttaattagtttgaaatgaaataactaatctaaccgactgtaatgatagtgaaaaaaacatgtttaatattggtaaatataaatgacatgttgttaaaaagataataagacaacatatagttagtcgttacttgatgtcaaagaaaaatgaagttagtcattttacttagagaatcgttcaaaacaacaaactttaggtcattttccatttttatgtctagaatcatttaaaaataattttcgattatctctagcattgctttttatacattgattactacataaatgaagatggttggtttgagttgtgtggcaggagtcagagaaggtagcgttggcggaatcaacggggttagatcagaaacaaatcaacaattggttcataaaccaaagaaagcgtcactggaaaccatctgaagacatgcagttcatggtgatggatggtctgcagcacccgcaccacgcagctctgtacatggatggtcattacatgggtgatggaccttatcgtctcggtccataagacatccaaaagctttagccacataataacaacctctcgttgctttcttgttacaactcatgttttgaattcccctacatcagtttgctacttatagctttctttgttttcacgccttttgtaatgtcttatgtcgttcggggagtttgagacttcctagtcagaaatatcccttcattttattttctctttttttcggtgtattttgtttttttgttttctcactaatgtttttatttaataatgtgtgaaaggaaaatgctattctgaaaaggtgttgctccatttttttattttatatggcatgaaatgtatggttttgaaagacaaaacccaaattgatctaatggattcttacatgcctttccacaagctaaaacaaaatccacaaaatgtaaaacatcgatagttgataagtctcaaaaccatctttgcttcgaacacggtttcaggcatatattatgacttatgcgaaagcattacatcataatacataggtcatggaatcactaccagaaaaaaaaaaactattgtcgaaagattaagttaaagattctccctttgcacccactcgtcatctgatgcggacatccaaattaaaccaaaccgggaccataccaaatcagccggtacatttatcaaaccgattgatgaagagcattttggaggactcttgcccaattggagtctcaatcaagcacaaggcctagggttaattattcaccagcaaattaattctaagaagactaatgatgattcaagaagggtcaaagaccagcgagccgagtcaccatattgtggggatatgaccgttgcactctttttcccttatctagggtttgtcccaatgggtttacctagaaaggtttttaacgaggcaacatcaagtcatcaaggaatcatttaccaagcaaatgattcgaagatatcaaaagtacatatatttgatgtacttgctaacagaccggctgaactacttgctgaaactaccttctgaagtaccgcacgaaatgaagccaaacaaggaaatcttccttattctacacttggacgcacctcaaagctacatatggaaaccaggagaacatctagaccacacaagacttataccacacgaactttggtacatcttaccacacaagaacccgctgagctactacttgccatatatggagccgaaggagatcgattaccaacaactctttccttctttgtttgtgcgcttatgtgagaatcttgagaccctccagaaccttccaagacgtcacaacttcctccccaagttgacaagatacaaggcacatctcacttgccttatttggacatattctacaattaatgtccaatattttcatttatgttttgtttctttcattaatgccttagaacattgtattcagctctatataagctgatttctcattcattgtaaagcaacccttgatcattttaaagtaacagaaacgttttcttgtcaaagttgagtctttgtcatttgttctttagttctttgtgagtgagtcatgaagtacgtcaggaatctgcggattaagtttgttgagtgattcaacatccttcattcgttcattgatcgagtgagtcgattacccaactgattgagcgagtcaatcacccaactacccatcaattccccttgaatcgatcccacacgagagaagcgatcgccagcgtgttagatcaccaccttcatcatcccaccttccgcgtggcaagtttggaactcttgctcatcaagtgatcaaaggatggattagctccaattcttgcatcatcatccttttttttttactaatgtttttaaagagttttttgcaaaactagtcatttttgaaaacttaattaaaaatatagcatcaatcacgaattggtcaagattttatgttcttttattatgttccaagatgtatttcatctctacttcactctgattacatttaatctaattaatgaaagttgagttgaaatttttttttaagaatataacatcatatatatatatatatatataaattaagaaaattgcatgtgaaaggtgagaaaaaacaattttagtgtagagttgttggtgagatgatttagtgacacttagtttagttttcaactatttgtattttgggaaatttgagtgtataacaaaaaaaaaacttatattaactaactagctattctaactataagactataatattctatgtataatctataataatgccatatttgccccatgttgtaggatacatagttcttttatttattttttaatttattttaaatatttatctttcttcttcttctattctatcttaacaaaacaaaaattataagtatccaccatcacgaagtcataataattatttatcactgtcactgtcacaaccgtatcaccgcaaccacctcgtcaccgtcactattagtgccaccactatcaccgttaccgtcaatatcaccactacggtttaccttggttgcttggatgccaatgttgtatcccataaagtataatttttttggatcgtatcgatttaactccatcatttatcattatcactgccataaccatatcatcgcaaccaccaccgtcaatgtcaccgttagtgccaccactaccattagcatctaccaccaagtcaccatgatcatttatcactgttattgccacaattgtatcgtcgcaaccaccaccgtctacatcaccgttagtatcaccactaccattgtcgtcatcaccaccaccgctaccgtcaccactcaccaccaccaccaccgctactgtcaacgtcaccactacggtgtacctcggttgcttgggttgccaatattgtattttataggttatagtttttttggatcatatcggtttaactcaattctttgtctactgttcgttttatactatttagtttcattctatattattgtatttgtgtattttagacaaatattattcattattttaataatttgtatcagatttcaaaaatttaaatcatgttatacacacaaaaaaatctatgttttactaaaaattgttaaatgatttaatcagttatttttatgaaactaattcaacattcaaatcacttggggaaaatatcaattttgccatctcatcattattttctctcttcatgtcatcattattatctctcttcttccactcttatatattaaagaaactagggttcacccctaggggtaaacccctttattcacctccttttgcattaaccaataaaaacataccatgtcaagtcctatttaaattacataataaattaaagctataattataaatccaaaccgatatataatctcgtttaattacaaaatctaaaccctaattctcctttgtaaacccaaaccgtcatttaaactcatttaatcgtaaaaaaattaaaccctaatcgtattttctaaaccctaattgtaaaatctaaatctgtttataaacctaaaccaatatttaatccgtttaattatagaatctaaaccctaatcgtattttctaaacccaaaccgacatttaacctcgtttaattataaaatctaaatatgtttataaacctaaacaaatatttaatccgtttaattatataatctaaaccataatcgactttctaaacccaaaccgatatttaacctcatttaatcataaaatctaaaccctaaccttttctaattaacccaaatcgatacataattttgttttagtggcaaattattttataattaaattaaattcttttattattattaggtgtcagattttaattggctaaaataaaagaggtgaatataagggttcatccctaggggtgaacccaagtatttttccttatatatgtcttctttattctttcattatgtgtgtcttccacgcgtgtacatcctacagctgcaacaaatgagaaggacaaaatagactttttaaatatcattcatgttatttacttagtttataaaattctggtgttagaaatttagttacttttttcaaaatggttacttttgcaaaagatccttgtattttgttttgctatatatcttctccaaaaaagtagattccaattctgaaatttattacacaaaaatgtatgttttcttcaacatacaacatgatttgaatttttaaaatcggacttgaatttataaaatagtaaatagtgtttgtaagtaaaaatattttgtactatttaagatgtaaaggaataatatgatgtactatactattttcatatatcattcaaacattgtagtgtttttactatatactatagtagcggtagtagagaacacataatactaattaaacgtacgacgaataaaaaacgttataatatagggaacccaaacgatcaaattaaacagatactatttacataaaatctatactatttgtaatcaactaatgaaaaattcatttgtataataaacctcagacactaacaacggcgacatcttgactaaagttttcaaattaaagaggagacgatactttttttcacatggttatgatgacacaaagtcaacagagattccaattttacggcgagctccgtctgagtgatttgaggttgcagggaggagaaaatcgaaaacaagtggtatgagtctaatcaaattcagtcgaatcagagtaaacaaaatccaaaatcatgatagatcttcaattgactgatttcgagttctcagtttcatttccatggatctaagaaattaaaaattctcaaattaactttggtggaaaagtgataattaatagaacataatttggcaaaaagatttcaccgaagtttgctattattatccagcagacagagaataaaaatttgtcggagttaggaacgaaggttgttacgctaatggttgagtttgtggctaatgatgttgttaaataatagagtgagtcaggttttgttgattccatctattcttttgatagttttgatttttgttgagttggtgatctataagctttgtagagaaaaagagaagtagataaactaaaacaaagaaaagagataaaaggagcgtgaatttcataaaggctaaacttgtatttattacagaaaatataaagaatatctcttctatttttttgaagtgctagtttcttaattaatttttttttttggttatagactcaaatgtccctttttttaatgacctttagtatttaacttttgatctttttcaaagtttttcatgtcttttcctccctttaaatttgtttcttctcaattttctatatattaattaatttcttataataattttttatttatttatttacacaatagtttaaaaaattcagttattttgacaaaagtaagttcaacatcttattatataaagcttgattttcaaagttagtaattactatgatcgtgacacgtgttaaatctattaatcagatgttgacttgtggattgaaatatttaacttttctcaatcagagatctttccgacggtcatatctgtcaaaaaaccatcgaaaagacctctttctgactatttatggagagatgacacttgtcagctctaaagcgttggaaaactaaatccgccaagaattcgacggtgattttcgacggcttcctgactggtaaattactgacaacattctgagcattgtattctattgggatgttatcatcgaaatgttgtcggtaaagaacaaacggttgtctaagaatttttcgacagactttcagatgagaaaccgacgatttagcgtgacacgaatgtctagtattcccaaagactttcccgacagttgtattatcgacgagatctctgacggattgccaatgaagattaatggttaaaagtcttgttattcctaaccgattcccaacagacattgaatattttcattataatttttatgttattttattttgtatttaatttatttagttattaattataaatgctgataaataatttagaattcataaacttgaaaatccagaatacagtaaacaaatattcataaacttgaaaatcaaaaatacaataatacaaaatatttataaacttaaatataaattatttaaattttgtttatactgtattaaaatcaaacgaaaaaatcttagcacaaatccataatagtaacaataaatccaaaatttaatttattttaatcaaattggattttaacccaattcttaaaaactgataaaactcaaaaacatcacaaattctagtttttatgtttcaattcgtatctaaccatctaacctaagaactacaccttcggaatcctaaaatctaatataaaaatgaaatagatagctcaaaatgatcaaattctcaagggctcttcaagggggcaagagtattctcaaatgctcttctttaaaatgaaatatctttctgaattttttgatcgaaaaagagaaaagattcttaagccttaagaacatcaaatatttacgatccaaccaaggtaaacagatcacaaaatatccgagtccattctaattggggtgattcgtaataaaacctaagtaaaacactttttatttattattctctagggttcaacagacctgacggttcttttagataaaaatatttcgtcaacaccatttgaaagcaacaatctagggtttatctatttgtttctcttctattttctcaaagttgatcttggtatacctaacgaaacctaagttatcgttttttttttaatgaaatcgcttgattttcgttttgggatttatgattgaaatcgactgaaatggagtaacccgatagaatggaagtgctaatcaaaatggtttggtttgtaggtttgggagtaatgccttgaataaataacgttggtgtatcagcggtggcggaagtgttttatgaaacaacaaattcaatctctaacagcgattcaacggtatgaattttaaactatgcacaactagcaaattgtgaaactaaaaaaaatcttaaactataaagtatatctatgtatgaactatatatatctatgctgatttctagcttaaaaatatatgaaactaaaaggtatatctatgtataaactaggtatatttatgatgaaatctaacttagaaatttttgaaactataagtatatctttgtataaactaagtatatctgtgttggaatcttacttagaaaattttgaaactaaaaggtttatctatgtataaattaagtatatatatgttgctttcttaattatcaatttgttgattgcatgattctgatgaggaaactgaagctctctaacttcttagaatatacttcagtccgagtgagtatacaaagccattagagattacatcaaagttctatatttataaggtagtgggattattggagactcatcttagaggctttaagttgaagtggtttttggatcacccacagttcagacacttcttctagattcacaagtacccaaatcataaggtgatgggtatgtagcaattatatcttcacacagcatgttgagagcagaagagggaagtttggtttatcgtctatggcattctgattcggtattttctccaagaatttgcaatcatgtcaggattatactgtcataaatatctaaaatccattgaaaccctaagcagtagagagtttgttggcaagcatttttcactcaaagcaacaatacaatatctagatggggaggcaaagttactatcaatgaaaaaaccttttgatgcttgtttgagaatagttgtgctctacattttatatagcgttattgttggaaaagataagacaggagaaaatgcaccaagtgtggagaagtttttctttagagtcgtggccaatctagagttgtgcaaatcattctcgtgaaggagatatgcatttggtgaaaatttgagaaacatgttctatttgatggacacatgtagaggaaaagttggtccacaaaaggtgtttcctagtttgttagagcagccccattagagcaccttaattaaggattatttagaattttttattactaaattttgaaaaaatggaagtttagaattttgttgaatcctgatatttttattgtccaatggtggagttcttaagcgggttttttaaaaacaaaaattcaaaatataatattataatattttttttcacaaaacataataattattagaaatattaaaattataaacatacataacataaaaacaaaacaaacatatagaaatgaaaaacttgaatgacgataagagttaagcttgattcagaccaaatttttgccatatatgttcaaccaaatcagctttcaagtattcatgcttagtccgatcacgaagtcgggttcgagtgaccatcatattaccaagatttgaaagcatatctatagaataggtgaaatccacttgtgaagaactagctgattccggatgtgcgaaatcggatacatcatactgagtgtacccatctcgttcgtcttctactatcatattgtgaaggattatacattctcgcataatatttccgatttttaccttatcccaaataagagtaggatgttttacaatagcaaatcgagcttgcaaaactccaaaggcacgttcaacattcttacggcaagcttcttgatttatagaaaataaagaatcttttcatcttgtggaagtgaaatagattggataaatgtagtccatttaggataaattccatcagtgagatagtaagccaaattatactcattcccgttgactacatatctcactttcggagcacgaccttgtaatatatcatcaaaaataggtgagcgatcgagaatattgatatcgtttaatgtaccttgaggtccaaaaaatgcgtgtcatatccaaggatcttgggaagcaacaacttctaaaactaatgttggttttcaagatccacgtgtatattgccctttctaaactgtgggacaattctttaactcccagtgcatacaatcaatatttcctatcatcccgggaaatccacgtatctctgcaatatggagtagtcgtatatgatcttctcgtgtgggtcttcttaggtactcatccccgaaaaatatatgattcgttcaacaaaatttttcaaacataacatcgaagtactttgaccaatccggaggtattcgtctaccgcatcagccgctaaaccatacgccatcatacgaattgctgctgtagccttttgtagtgccgagaaaccgagtctctggtagcatctcttctttgttcaaagtatgaaatttcattggagagtcgatcaataatacgaatgaacaatggcttgttcattctaaaacatcgtcgaaatatatgcggaggaaatgtcgcatcttctctgaaataatcattccataattggatgtgtccttgctcacggtctctttcaatataagcttgtttattgttggctcggcttggtgacgatctctataattctctaaggcttgatcgatataatgcgaagaacctgtcattttggaataagtagaatttgttggagttaaagaaaagtgtatttggggttttggagttgaagagcagtaaagagtgaagacgatcagataaagaagaagagcgatacatggttgtatatatagagaatattttctaaaagttgagacaatagtattgtgtggtctcaaacacaaaagaacaaaacacaaaactagtggtgtgggtacaaaaaaaacaaaacacaaaactagtggtgtgtgtacaaaagaacaaaacacaaaacgagttaattgatgtcgataagaagctttgtccaccacctagtcaattgatgtcggtaagaagccttgtccaccacctgcaaacacaaacaatataagccaacattcattaatactagttaaattgaaaatgaaattcaacattacaaacacataaaccgaaacaaaacaaacacaaatacttaaaacaaacacaagagcatgaaattgaatacattacaaaccacatggactttgctgcaaactcatgtaaccgcaaacacaaacaatataagccaacattcattaatactaactaaactgaaactgaaattcaacattacaaacacataaactgaaacaaaacaaacacaactacttaaaacaaacaaagagcatgaaacggaacacattacaaaccacattacataaactgaacacattaataacttaattcaatagatcagagattagcttgttcttaagagttatctctatgtcagttagaggctcagttttggcaaagatttgttcaagcaatttagtcagaccaatattctcttctcttctcttctttgttaattagcttctctctcgccgccaaatctttctccttaatatcccaaataagttgtaactctttcagattgtcaccagacgcactactcggcttggcttggaatttggtattagctgccttaactccaggggaacgaattttgctttggctttggttctcttcaatgccagctggaacacagacactttcttctctttgttgttctttgcactttcttctctttgctgttcctgttgtaggaaactcacttaaccagttctgctcatagcgaaccgcactccaagcatgttcaagggtgaaattggcgccatagtcctcgtagaaaatctgatgagccaagttcaccaaatcatcatcattttggccacttgtttggtgtttggttgcaggcataaagcttcccacatacttgttcacaccctcatttatttttgcaaatttctgtttacagcataatgtgcttctttttcaaaaacctttgagcttctgacttgtagcaaaataatcagttatgcgttgccagaaggttctagacttttgcccgttggaaacaacatgatccttggacgtgttcagccagctagttatcaggaccaaatcttctattagagaccatttgcgtcttgatttcctctctgcaattggcgcttcatctttctcttgatcatcaaaccaatgtactaaacacatggacatcagatgatccaagttctatgttaggtggaaaacgttcaaactgaattggtggaatggtttgattctcttgaaagatgattagggaaagatttaaaggaatccataaccttgtttggtttggttgttaaaaagataagagaaagatttttcagcttgaagttatgtgatttaaactgtgtttttcagcttgaagttatgttgttaaatagatgcggttttagaagcttcaagttagggtagggtgttaagttaaagctctttgatattgatcacagagagcaataaatcacatagagcttttacttacacttaacctaccaagcattcaataaaatagaccataactatgataatacttttacccaatgtaaaccactccaaaatacactagttaacatgcatttatcacagttaaaaaacagttagcttttattgcttagaccaattcagagaaattttgagcgcaataactaagagagagcttttaaaagcttcaagttagtattaggtgttagaatttttttttttttttttttttttttgatcaaaggtgttagaattttatttaaccatagagaacaaatactttcttctaagcatttaaaatattaatgtaatgctatctcaactcaaaaatatattgcatttaaacagagaaacaaataaactaatcaaaagcagacaacaaataatcaaaaccggacatcaaataatcaaaagcagacatcaactaatcaaaagcagacatcaaataatcacatatcaaaagcaaaatcaacaaatcaaactcagacaacaactactagatgaattaaagaaggctcagttctaccttcgtgttatcaagaaatagtgcaatctgtagagcgtggtaagggccaggacagacaggatatcagaaatgtacttctgcaaacatagcaaatgtaatttttaagccataccaatataagaattgttaataacttgaaatcaatgatgacataccttgagattagaatcagccattgtttcatgaaacgctttaagagttacatactggggacgcagaaactttagtggtttgggaactgaagtcattgaacttgttaaagctcggatttcctgcctacaaaaccaaaaaaaaattaaaaactccaacaagggtagaacacaaggagcagaaaagaaagaaaaactttataaattatgagcttcaaagacagtaatctgaaaacccgaagctaatcaagtcaagaattacctcatactctcaagagcagccttctgcaagtccggattaggatcctgaaccatctcaacatagagcttaaggttctgctttagttccaaatcctcttaagactacaatcacaacccaatgtaagtcgagtcattagtcctgtgaacatatataaaaaaaaaaactctcctcacagcacaagttagcaactttttaatccggctatactaatgacgaacaaaacattcactttgaacatgcttattgttttgtttttgtatatctccttatgctttgtaaaaccacgtacaatactgtaattgatatgttctcgtaataagaaaagaatacgaacccacttagtcttcataattagattcatcatatcgaatcaaagatgaaaagatttattacaaaaataaaccaaattaaaaccgataaataagtttttttctactatagacacaacattccaattgccatggtgattgaacaaccataggaaaaaacgattatcatcttcatttcttctctctttgttcttttccatcctctctttgttcatttccatcttcatcattctaacttcctctttgtaacgcccgtgaaccggaaaatcagttagagtttgtttttaaatcatccggtttaattgattgggttaattggaaaccttagagtatgcctataaaagaagtaaactcgaaattagggctttggttagccacttttcgttttataaaggagaaaaagagagaaaaggagaacgagcagaatcgttagggtttgggagaaatcagtttcgtcatatcaaatcgtggtaaaaggtaacgaaatttggcagagttattcccaagtcctttatcgttattctccaatttacagaattggatttggattcaaattggttgagttattcgcagtttcgtgagacacgttttctcagacgcgaattaggaccagcggagattgaaactgagatcgtggtctcgtctgttttccgatcggcacgagattttgtggtcagctttgtgacgtctgcagctaggatttcaccggagagattgaatagttaacggttagtttgtatttgagggtttcgtctttgagactgcttgtttctggtttttcctgtccagtttgcttcaaggttgcttttggttgtggactttttgtaggacgtttctggactgtttcagacgcaaggagagtctctcctgggtttaattgctattagaatcaatttgttaaggtgagtgcgtgaccatgagcttatctgagcgatagggttgtgtgatttgttttgtgtgatgatatgtaggtgtggtgaatgtgttttggatgaattgttcaatgactggtttgtttgtattgtattcgtgattatacctttttatttgcttgtgtgtatagctcgtagatgggaggatcgcctcactaagtatttatgataatacttacgcatctcattgtgttgttgatacaggtaaagataaagtgtgatcgtggaatcatggcaaggaagagaggatgatctaggaactcgtttgttttatttttggtgtttttggttattggaacccggttaggattgttagttattcttggttttgttggtcgaattatttatttattcattaaatagtatttttgacttgtggtttaattgttattctattggttggtttaattagatatttatggaaatatttaattattttttttaaaaaaaatgggtcgggttgtttcaatttggtatcagagcgattacggttctaagatgtgtagaaaaattaattgatgaattattttcctgttgattgatgtgggatgagctagggtgttagcatattgaggattgattatggagtgtttagtcaattgtgtgttgttggagttctagcatcatcttctccaagccttaaatgagattccacggtaagttgtttgtgatatattcgtttgttttagtttcttagccatttgtttttgagtagcgcagatggttagaggagctggagttcgtggtcgtggtcgcggtcgtggtcgcggtaggggacgagtcctcgagggtaccggcgagagtgatggccacagtgccacagttgagcagagtgggttcgcaacctgagtttgtggagcccggggttaggaacggtcttggtgccgatatagctggtgcaaccggagtgggggctggtggtgtcggtaccggtgtgcatgccgttggtgctgagggcccaggagtgatgtgtgccgcagccggaggagcccaggttccaaaggttggtttggcgggccttgtgaggcagttgttggagcggttaccaggtttggtaccagtggaggctccagttgcgccacgagcggcggaggtgcagcagcgggctgcggttgctgagaaggttccatcttatttggggatgatggagcagttgcagaggattggcaccggttatttttctggtggtactagtcctgaggaggccgacaattggaggtcgcgggttgagcggaacttcggttcaagcagatgctcggcggagtatcgggtagatctagcagtgcattttctagagggggatgcacatttgtggtggcggagtgtgactgccaggaggaggcaggcggatatgtcttgggcagatttcgtggcttagtttaatgccaagtactttccgcaggaggcgctcgaccgtatggaggcgcattttcttgagctgatacagggtgaaggaggaccttcagaggtaggaggggggagtgagtccagcggtacaaccgaagaagactcagcagcaggtggcacctagcaagggcagcaagcctgcgcaggggcagaagaggaagtgggatcatccttccagagctggacagggtggtcgtgcaggatgtttttcttgtgggagccttgaccacaaggtggtggattgcacgcagcgagctgagacgagggagtgctaccactgcagggagaggggacatctcatgccgaattgtcctaaggtgcagcggatggcagtggcagtggtacagccggcggtgcagcacggagcgcaggtgcagcagggagtgcagcagttggcacatattgcagcggcaccgcagggttacactatgcgtgagataggcggtactagcaacagagcgattactggtatgatttctgagactcagactttgtgaaatatttctgttgttttggatatcattattttgtgatgaatgttagggttcttagcacatgaggtttgtgtagggaccttattagtgggcggtgtagaggcccatgtgttgtttgactctggagcatcgtattttttcattaccccggagagtgcctcgcgcggcaacatccgtggggatcctggtgagcagcttggagccgtcaaggttgctggagggcagtttctagcggttctggggagagcgaagggtgtggatattcagattgtaggggagtcaatgccagcagatttgattatcagccctgtagagttgtatgatgttattctgggaatggattggttggatcattacagagtacatcttcattgccaccgtgggagagtttcttttgagcggccagagggaaggttggtttatcagggagtgagacctacctcagggagtctcgtcatctcagcagtgcaggcagagaaaatgatcgagaagggatgcgaggcttacctggtgacgatatctatgccggagtctgtggggcaggtagcagtgagcgacattcgggttattcaggacttcgaggatgtgtttcaatcgttgcagggattaccaccatcacggtctgatcctttcacgattgagttggaaccagggacagcgccgttgtctaaggcaccctacaggatggctccagcagagatggcagagctaaagaagtacctagaggatttgttgggtaagggattcattcgtcctagtacttcactttggggagcgccggtgttatttgtgaagaagaaggacgggagtttctgcttatgtattgacaaccgggagttgaaccgggtcactgtgaagaacaagtaccctttgccaaggatcaatgagttgttggatcagttgaggggtgctacttgtttctccaaaatcgatttgacgtcaggttatcaccagatcccgatagcggaggcagatgttcgcaagactgctttcaggacgagatatggacattttgagttcgtggtgatgcctttcaggttgactaatgcacctgcagcgttcatgaggttgatgaacaacgtgttccaggagtttttggatgagtttgtgatcatctttattgatgacattctggtgtattctaagagtcctgaggagcatgaggtacatctgaggagagtgatggagaagttgcgggagcagaaattgttctctaagttgagtaagtatagtttctggcagagaaagataggttttctgggtcacattgtttctgcagagggagtttcagtggatccagagaagattgaggctatcagagattggcctagaccgacgaatgccactgagatcaggagttttcttgggttggcagggtattacaggaggttcgtcaaggggtttgcgagtatggcacagccgatgactaagctgacacggaaggatgttccttttgtgtggtcaccggagtgcgaggagggtttcgtgagcctgaaagagatgttgacgagtacaccagtgttagcattgccagagcatggagagccttacatggtgtatactgatgcctcgagagttggttgagttgtgttctgatgcagcgtggaaaggttattgcttatgcatcacggcagttgagaaagcatgagggcaactatcctactcacgatttggagatggctgcagtaatctttgccttgaaaattcggaggccttatctttatggcgggaaagtgcaggtgttcacggatcataagagtttgaagtatatcttcactcagccagagctgaacctgaggcagaggcgatggatggaattggtggctgattatgatctggagatagcttaccatcccagtaaggctaatgtggttgcagacgcgttgagccgtaagcgcgtgggtgcgggtccagggcagagtgttgaggccttggtgagtgagattggtgctttgcggttgtgtgctgtggcacgagagccattgggattggaagctgcggatcgagcagatcttctgactagagttcggttggctcaggagaaggatgaggggttgattgcggcttctaaggcagaggtctctgagtatcagtttgcagctaatgggactatccttgtgcatgggcgagtttgtgtgcctaaggatgaggagttgcgacgggagatcttgagtgaggctcatgcgagcatgttttccattcatccaggagcgactaagatgtaccgagacctcaagcggtactatcagtgggtcgggatgaagagggatgtagctaattgggttgcagagtgcgatgtttgccagttagttaaggctgagcatcaggtgccaggtggcatgttgcagagtttacccattcctgagtggaagtgggattttatcacgatggattttgtggttgggttgcctgtgtcgcgaatcaaagatgctatttgggtgatcgtggaccgtctgactaagtcagcacattttctggccatcagaaaaaccgatggagcggcggtgttggctaagaaatatgtgagcgagatcgtgaagttgcatggagtacctgtgagtattgtgtcagacagggattccaagtttacttctgcattttggagagcctttcaggcagagatgggtactaaggtgcagatgagcacgacttatcatccacagacagatgggcaatctgagaggactattcagacgcttgaggatatgttgcggatgtgtgtcttggattggggaggtcattgggcggatcacttgagtctggtagagtttgcttataacaatagctatcaggcgagtattgggatggctccttttgaggcgttgtacggtaggccaggtaggacaccgttatgctggacccaagtgggggagaggagcatatatggtgcagattatgttcaggagaacacggagaggatccgggttcttaagctgaacatgaaggaagctcaggatcgacaacggagttatgctgacaagaggaggagagagcttgagtttgaggttggggacagggtgtatcttaagatggccatgttgcgaggtccgaacaggtctatctcagagactaagttgagtctgaggtatacaggttagagttgtctgatgttatgcgtgcgtttcacaaggtctttcatgtgtcgatgctgaggaagtgtcttcacaaggatgatgaggtgttggctaagattccagaggatcttcagcccaacatgactttggaggcgagaccagtgagggttctcgagaggaggatcaaggaacttcggcggaagaagattcctttgatcaaagtcctgtgggactgcgatggtgtgacagaggagacttgggagccagaggcgaggatgaaggcaaggttcaagaagtggttcgagaagcaggttactgcatgagtttgcctttccttggtttccagtttcagtgttgttgagtttttgagcttttgagttgttgttcttatttctctttcatttgtattttcgttggagttgtaacgatcataacagttgatgattaataagatgagtattttttttcttggatttgacttgagttgtcttatttaagaatgtgttgtgcggtttccaaaaatggaaagtttcctagaaaggacttgtctatttttggaaagtttgagtaaacaacctaagagaaacgtgtgtttacgagatggccgggagttggtcataaggatattctcgaggggatatgatggatggtgaggcatagaggtgtcttacgcgaatccatgagagagtctggagatatgctcgaaagcgtttagtattgttgctcgagggatatgaaggtcccaacgactcgtgaggagcggggtatgctcctgaggtaccggtaacttgagggacatggtgtctttaaagtacgaggggtacggtggcttcgggtgacgatccgagagcacgctttagggtgacgacccgagagcgagttttgtggtattattttctccaagtgtcgtaactcgatgactttgtggctgagagggagcctacacaactcagggtttgactttgagtggggaagataatatgtgcgatacccgagataccgtaggccgaggcctgagagtgacggtttatgctcgaagattgcggtctgagagtggagagtgagttgtgagcaacaatgactagtaaatcgtgagtatatcgactggatagagagacctagaaggggtctggttggagggagtgcggactgtagtgatggttgcacggagttcctcggagtggaagggtgaagctagattcgaggacgaatctatgttagtgggggagaattgtaacgcccgtgaaccggaaaatcagttagagtttgtttttaaatcatccggtttaattggttgggttaattggaaactctagagtatgcctataaaagaaggaaactcgaaattagggctttggttagccacttttcagtttataaaggagaaaaagagagaaaaggagaaggagcagaatcgttagggtttgggagaaatcagtttcgtcatatcaaatcgtggtaaaaggtaaagaaatttggtagagttattcccaaatccgttatcgttattctctaatttacagaattggatttggattaaaattggttgagttattggcagtttcgtgagacacgttttctcagacgcgaattgggaccagcagagattgaaactgagatcgtggtctcgtctgttttccgatcggcacgagattttgtgggcagcattgtgacgtctgcatctaggatttcaccggagcgattgaatagttaacggttagtttgtatttgagggtttcgtctttgagactgcttgtttctggtttttcctgtccagtttgcttcaaggttgcttttggttgtggactttttgtaggatgtttctggactgtttcagacgcaaggagagtctttcctgggtttaattgctattagaatcaatttgttaaggtgagtgcgtgaccatgagcttatctgagcgatagggttgtgtgatttgttttgtgtgatgatatgtaggtgtggtgaatgtgttttgggtgaattgttcaatgactggtttgtttgtattgtattcgtgattatacctttttatttgcttgtgtgtatagctcgtagatgggaggatcgcctcactaagtatttatgataatacttacgcatctcattgtgttgttgatgcaggtaaagataaagtgtgatcgtggaatcatggcaaggaagagaggatgatctaggaactcgtttgttttatttttggtgtttttggttattggaacccggttagaattgttagttattcttggttttgttggtcgaattatttatttattcattaaatagtatttttgacttgcggtttaattgttattctattggttggtttaattagatgtttatggaaatatttaattattttttaaaaaacaaaatgggtcgggttgtttcactcttcaagaacattgacttgaaaatccaactgttctatctcattcgtaaaagcaccatctacccacttaaacacatggttgatgttcataagctacatttgtgaaattattagagtttataagcttttacccgttcataaattgtataaagcataaaaaataaaaccggtaataatgacggtaaggatttggatttgatcgaaatttttttctcaacgattccatcgccacaccaacactgctttggaattccaagaacctttagtcttggtcgggcaacagatttttacacgagttcgcagctcccgagaggtggctcataattttctgaattttggatcttcaaattcatgaaatttttttttacagttaaaccagtttgtactatatagatcttgaattttaaaatcgtgaatagtcaattgaatatcaaatatctataattgaaataataattgaatgtaaaatatacctagaaatcgaaatacttatctgaaatcgtctcctaatatttcctcttttctcttttctttttccttcttctcattcaattaattttgttttatgttgcaacaggaatgaacaacaaataaaatattttatttgtaatcataaagattaaaattcaaatttaaatttaggggaaatgggagaaaattattttaaaatattttaaattttattgaaaaaatcttttaaacatcaaagaatattgtgttgtcattaatttcttgggtacacatggcgccacaaaaagtcatatatcatacatatacaacatatgtggtacatatataccgtgggtcccctaataaaaaattgcataaagattttcctagtttctaagttgtacccttatatacacacagtttgacttttgggaggttttggtgtttatttagatatacttagattaaaaccaaacatatttatttaaaccaaagattgttgatgttttaggtatattccccatagtgttgacaatgtattagatgaacaattctacttgtaattgaattgcacctccactattatataaagcttttacggttctaacaacagacacaacccaacatgtagcgacagtacatgaacaaaaataatggaaatcaagaaaagcttgataacaatatatcaaatgatcacatgagtcagaaaacaaaatatgaccacatgaaaagctttataaaagtttgtgacatcatttattagttaacaatacctcagtacccaatatcaatatcaatatcattatgattagtttactaaaaacaatgtttagccaatatcaatatcaatattataacagtttgtgacatcgtttattaattaacaatacattagtacccaatatcaataacaatatcattacaattagtcaactaaaaataatgtttagtgtgtactatgtagattaaatggtttattttctttttcataaatggtaaagaataaagcttttgagtttggtatgaataatggaaatattgaagtaaattgaaaatccttttaattgatgatattctttggttttgttatcaatggaaaaaattgatatacaatgattttatggttaaaatagacataataattaaatgataaaatacttgcagtttgaagcataactaattaccttgaaatccttgattcaccacatatccgataacaccagggtaatccctccaatcccgaaacccatcctaagtatataaaaaaactagtcttattattataaagagaaactaaaattcttaagagaaactaaataaattcgatcctaagttgtctcctcctccagcaagtagtatatgttcttgaaccaaattggatctgcaataacagcttcaagcttaaatcaaagtcactatataagggtttttatgacatgttggcgattccttctatgttgcctccatctccaatgatgatgtaaccagagcattttgatctttcattggagtactcattccatcagtgatattgtactgaatgttggacacacgctctgatcgctcgtaggcattaacatgaccagcaaagatcatatcgactttgtttttgatgaaccatggctcgaacttaactctcatgctctcaccttccatatagtaataattgttgttgttgtaccatggaacgtgaaccagaacaatcagccacgaagtctctgatcggttaactttctcgagctcatccaagagccaggagttctacggtgtgtatttgtctatggtaaagtgtcacaaaagaaaaacattaacattgtaatatagagtaaaatataataaagtgtgagtcttagatcgtaccataagctgagtaagaggagagtacgatgatgcaagtcgaggcttgtttgattgagtaccaaagtggagatgtactctatgaggctctgtaaggaacgtggtagcggttcttgtacgacttgaagggttgagtctccccctacaagcggatttaatgttttaacactaaacctaaaaaagtttgaaaataaatatacagagtggatcttactatgctctaagcgtaatgcaactcgtggttccctgcagcccaaatccaaggctgatgctcggcgcttggttccacaaacctgccgtgattaccattttatttggtcttggttaggatggtcatcaacataagacaaatctccaccaaaaagcaccactaggccttttggattcgacatgtagttgtacaatttatggtttagagacatagatttgtccaagatcacctaaaaaaaaagttaaggttactgatattaggttcaaaacatttaaatcatagttgaaacttgaaactcaaagcctattcactaaaataaaaaacactcttctacgacctctaatatatcaaatatagcaagtcatatttgttaatacataatagtataatcgtgaagtaataacgttcatattgatttttacaagtttagaaatatatgcagtcctggaataaattggagtagtagaacgagaaacattaaagcacttattgaagacgagtctttaatatctcttaataactcttagaaaatctttgtaattttttaatcttaaaataattaaattatatttaattttcaacataaatccttaaaatccctaacatgactctgttgaaactatgaatctgtggactatatacctataacaccaaatgtgtaggaaacatctggaccaacttttggaggagtcatgaagttgaattgtctagtggagctaccagttccaactttatggaaatatttagttttttacttagaaggaaaaagagaggttactttacttacaaatttatatatatatacatatatatatatatattacttgggatatagtcaaataaatttataataactcaagcccttttattgtggcatgatgaagataaccatatgtgtaatcaaagtatctataggacaaagttgtcgctataacattcttattatcactacaatcactactggcaattcaatatgtaatgacattagaacaatatttatttaatggcgttacccacgagatgatcacaccttgaccatcatgatctccttacattatgtgaacatgagaaagaaccaagaatgaaagctccaagtgatgaaagaaacaaataatatgtaaacgtgattttataaagaaaaactggaatcacttgctctggagcgttatagtggtaggaggggaaaatgttttgagtggcatttcttcagatggttccgatactcggacataggcactgtgactccagcttggctaacgacaaaaatgcttaataatgcaaccacaaagcatacaagtgctaagtgattcaaccccatttcgtgtttagaaaattctaatagattctgctttgtaaatgataatttttacgacgggatcgatgtgaaatgcaaggtatatgcttttgacgatgattttatttgaaagaaaataagttagaaaagtattctaagaattattcctctttttcattttcaaacaaaaaaaatcagagagaatcatacagttttttaattttttctcccaacaactattcttattataattttatgaaaactaattaaaaaatatttgaagagcctcaaagagaatatatattcatagaaacaaaaaaggagataagatcatgtccagaaaattttataccccgttaggatatcaaatatttatactgtttttaatgatttcccattatattggtttatttgttttcataacttcttatacttcttatattagttgttagcccacgcgacgtgtgagttgttatgtataatttgtgattatattttttaagtattaaaattgacgcgtgggttgtttagtataatttgtgattatacttttctaagtattaatattaatgttggttgttttttttggtaagtaaactatatgtgatagtatctatttttaaaatattgttgtttttattattgggtcgaatacctacattaagtattgcttcagtgattctttctaatggttccacgccaattccatctatttttcctataacacaatttctatataattttattttatttggttttgtattccactctaactttttcagctattggaccttttcctctatgtttctgttggctatcaatataattgcatacatatatgttgcttctttgtgtgatgaatttgttgttttacgcatcttctccattcctgagtttatgttgaattttaagaaatatttaatcatactttggaagtatagtgcttctgtgtttccgtgttttgcacattcttctataagatttgaataaagttgctaggcttgccttggtaaaggcgatattggatgcaagtgtaattgtttttacacgtctggtgtttttgacgctttgtaaaacagaggtgcagaaatgattgcatcaccaaaatcgtgatgtgaagattcaccaacttttgctaagatttcacttattagttcaatcagtaagttgtccatccttgaaagaacggtatttggtagtgccatatcttctaaacatggaataaaatatactttttgattactttgcgattatgaaattgtgtaaattgactgatggaacaaaagtaaataattaactctattttaaggaaatacatgtatacaagtaattcaaaggacgaaattgaaatttttcttgcaacacgttttgtacatgtttttattcttactaacactaatatttatatgggtaggtgtatgcttgttgtaagtaatttttatatgggtatcatataggctttttgttagggatatatttgttatatacgttgatatttgtttaaataatattttgtgtatattcttcttaatttagttgatatctgttaataaatactggtacaaccctatttttattgtttttactatgttttagatctaagtttttgaatctttctgttatttctaaagtcatgttatcaagttcttttctagcaaccaagtcttttccagagcactttcataatctattcatcctctgttttctgaggttcatcagagattttcaataacagtgatgagatattttctaacttttttctctattgatttgtttatgctttcttactcatacatgttgtttattttattcatcatgtctgagtagtctgcttgttagggttagggtttctcactagggattcatatgatttggtagattacccctttgctatgttatatataggattcttcatctttagttgttcttaatgttagttctagagtaattaactagaacttgattccaaataatagatatacccaccataggtatctgttaccataactactatttgatgagcctggtatataggtgtctaataagaaccggcctatctactaaggtgaacttatcgaactcgtttagcatgcatgtttaggtataagatttcacggcacatcaccggaaatcttagctctaggcataatgagtttcacggaacatcaccggttattttgtaattagagtttgagtttaagaccatctccaatggtcacctctataatttctctattttagaggtgactctattagaggcattgtgctccaatagtcacctctaaaatagaggaaaaatagagatgaatagtagacatctctatttataaagacaaaaagtaaacatctctatttttgaggaaactctattttagaggtgaccattggagcacaataactctaaaatagagtcacctctaaaaatagaagaaaatataggggagaccattggagatgccctaagaacgtttcgataacaacctagctatatctagatctactaatcatttgttttttgagaataccctaaatctgacgttttattatcttgaattacaatcaaccaacctactatttgcttatttactttttatttttattttcttatactcttctaacttaatcttgacacttaggcttattgtgtgaacaaaaaaactttgtggaattcgacccttaagtactatcgacgatctcttatttgagagagtggtcttaaggcaatttgacctatatcaaattttgcgccgttgctaaagttcttccgaatcacctttaagcttagtttagagatttcgtctagtttttatttttctattgatactcacgcgtttcttgtttttcttcttttatgtgtttcaggtgtatgtctaggctcatacgaagcactaaacagaaggacctgatcaacttatctgtacttgatttgggaatactcgaatacaccaaccaaaaaactcagaaattagcaatggttgacagagtcatcagagctgatgagcaaagagttttacgggatggagatgggcaagcctacaatgtggctggtcagagattggatgaccatggactcatcacccttgagaacatcaatgaggaacaagcgcgcctcaacgcgcagttggctgctagaaacgcagcagggctcagtgtcaagggacactaattgggtgtcgatcgacacctacgggatcagaacgaagaagagctcggtgtcgagcgacaccacctaggtgtcgatcgacaccaaccaaaggttcctgccgcagctaatccactagctgttgaaccacgtcgtactcttggggatttcaacaagcttgacctgttctatgccaaccgctcagcgatcgtacccccacccttctagaggaacgactatgagctgaagcctgactactttgcactagtaggccaacaccctttccatggtttatctcacgaacagccaatggaccacatcgagcgttttgaggacctcgttctgagcattaaggctaatggagtctctaaagactacttactgtgcaagcttttataatacccgtctctctcaaccttgagacggcgtactttcatcttttccattcatttattcaacttcttcaaatcaagtcttgaaataatatatcataatttcgggaaactttcttttattaagaatcagaaataaattgtttcaaaataatagcataattaaattaaaatcgttggataaaaatgtatgaagaaaccgtgtttagaaatataagaaataacgataaatcaaataagaacccaaagtccccgaaataacaccaagcgagcagctactcaacattctcttcctcacctgagggaaaagaaaaggggtgagtaattaactactcagtgtagacagtcaaaactgtccaccgaaacacaataacaagattatactttcacacaatatccatttcataaacatagacccaaacaacaagcatatagcttaaactttcgtagtaagctataacagacaagcttctgtcttccttaccgcaagatcttttactttctttttttagtttttaaaatattttaacttatggctcctcaagcctatttatggaagaccacggcccgtacctcgatccttcctctcattgctcgtcagcgattaatgacctgtaatgaacccgtaggttccattacagtccaacatcctcaatcttatcatttcttttaatatcattattctcttttatttacttttttctatttttatttaaaaatacgtccttaaagacgtcaagcaaatcaatacgcatatcacgctaacaacctaacgcataatatcacacaatacatattataatattttatcaattaatttctaacatttaacaatcagcacccaatgtctaaacctatacaaatgaacttcaaaagtacaaaagtagaaaggtgatactatattttcacagatcccgccctcaccttagcaactcggttggataacacaatttaggactagcaacaacagaaccggctcaataacgatctcaatctgcagcggtttagataaccgatcagagattatttttcattaataatcttgattaaaattaataaccaaatcagattctaaatcttaaattgattcggtatagctttaattaaactaattagaagtgatttactaaattatcaaccaaaactaataatttaataatgctcaacggacgacgtacgtaacaccacggtccacactttcctcccatgcacgttacttccggtttagcaacaattaaccaacactctaatagctaaaccaatgaaccaagtcatcttcttcttcctcacaacacaatttcacgtaacctctaactcaacaaaagattaattggttttaactggtttagatcatggtttaataatcaaggcaaacataacaacaacaacagatacgagacaaggttgatgagttaccttcctcaacaagctttctcgtcggcttcacgtgacgggacgaacagcgaagtggagggtttgttatcacagatctgtgatggttaaatccatgattagatttgttcaataatcccaaagaaactaagagatcaaaaccagaattgattctcgtgcgttacctctccggtgaggatgattcacgcggtgactccggctcaacacaacaactatctccggtggtctgagtggtgctacgatggttcacaaaggagagttaggttagggaagagccaaatcaattcccaaaagaagaggcttgaactaaatgaggtgagacttaccgaggttgccggcttagggttctgacttgatttggagtttgcgttctccttttataatcacgtgaggacaatgaagttttacttgtgtttaaatagctagcgggattggtttgggctttattgtctaattgtaaaataggggtgttacaattctcccccactacaatcattctttctgattcccatgacaactcttgaattccatccctttcccagcaaatttgaatcgacttagctttctttcctctcgtgaaccatttcctctatgactcacaattgataccgtttttccttttatcgataagtccaactcaagatcctctggtggctgtgaaatgataagctctggttctgtgacaacttttctaagcaccgatatgtgaaatacatcatgaaatgctgccaaatctgccgctaggtccaaacggtaaggtacagctccaactctctctatgatagggtaaggacccatgtatctcagcttaagttttcctctcttagcccaacggttcagtcctttgaacaatctcattttaagatacaccaagtcaccaatttcaaattccagatcttttcattttaagatatttttcccaacgtcctccccaatccagcatacaagctttaagcatgtcctccaaagtctgaatcgtccgctgagattgatcatctgtctgagggtgatatgatgtactcaagtgcaccttggttcccaaagctttctgaaatgctttccaaaacaacgatgtgaacttcgaatctctgtcagaaacaatgcttaccggtactccatggcgtctcactatctcatccatatacttttgagctaagcggtcagctgtgtcctttttattgactgctagaaaatgagctgagttagtaagtcgatctacaattacccaaattgcatcctgcttacttgctgttctcgggagtccagtaacaaaatccatagtcaccatatcccatttccattctggcaatggtagaccttgtaaaagtccacttggagacttgtgttctgcttttaccaactgacaagtcgttcactttgctcccagtcagcaacctctcgcttcattttaacccaatgatagtaccttttcaagtccctgtacattttggtagaccccggatgaatagcaaaacgtgactgatgcgcttgtcgcaagatctcttccttctgatctttatcatctggggcgcatactcggcctttaaaaacaaaggtcccattcttcgtaatatggtaaccttcaacttcactttccactgatttctttaatacaacatcttctttctgtgcctcacgaattctccagagtaagtcaacttggtttatcgctttcaagccaactacttcatcatccactgaagcttcacagatattgagacttgtcaaagctgaaacaagctcttcaacctctttggttgcattcacatcatgtctccttctgcttagtgcatttgccaccagatttgcttttcctggatgataagcaatattcaaatcatagtctgcaagaaactccgtccatctcctgtcttagattcaaatctgcttgggtgaagatatacttcagactcttatgatcagtaaatattattgagtgtatttcgtatagttgattaatagattatgtacttgaggttacggttgtaatatgtgttttcttagtatgttagttggccttacagttaaatttatatattatttagtgtacaattactatgtatgatttttactatttaaaaatataggaataataacatatagtttattaagttaaaatttagattataactaaataatttaaatttaaatttgatttgttttattaatattatttattttgtttagtgtttaagataatataattgtattttgattgttatatctatgaattcactcctgatataccgtctcgtactatcgacccaaacctgtcctaccatcaaactttgtttagtaaaattaaacatatctaatggatttcacctgtggtataccgtctcatattactatcgactcatattcgtcttaccatctaaccctgttcattgaaattaaacattattttgttatttttgttttaataatactttaatttaaaaaatatataattcaaatcaatttaaaagtttctgtcaaatagttatttaattattttaaagtttatatattataatattttaaatacgtcctaccatctaatcccgtttagtgaaattaaacattattttattttaataatacttttattaaattttttataattcaaatcaatttaaaagtgttctttcaaagggttatttaatttttatagatttcacaaattataaatattctataacatttttttgttaaatatactaaacgtttaataaactttaaataaatataatatttaccttttagtaaaataaaatattaataatatcctaaaatttctccttttttaaagtaattagaattgatggagatatattagataatgaaatgctagtaattagaaccattaattaattgataataatttagtccaatggcattcctcgtaaataagtttcatcttgaggatttatttcataaaagcagtacaccgcggaactatattgttttgaaagaaaatcaaaatataatttttttaataaattatctagaattataacttattgttttttattttgatttagttctaaaattgtttcatgatactaatatatacctaaaccccttagacccaataacccagtccaacaaaaagaataaaagatacttttattcctttttaataatacttgatatagtctcgcggtgtattacgggttaaattatttttctttttagtaatacttttatttaaaagaatataaatcaactcaatttagtattagttagttgtgattagctagatctgtatcataaaatctaaaataacaacaataatatttgagaataaatttgttgcaaacacatactgtatataggatcgttagtaacgttaaatgaatagtttcatgcgtaaacacattctgctaatgtacattggttaattttaatagaaagatagaacaaataacatactatgaattaaaactgatgtagttataacacaacccatcaaattatatgcagactatgaaactaaactgaaaatctagttcatgatgcaatttccacaacacatatagtaacaaagtgcgtcaattaccaggtttgatctatgaactccatttctcttctaccagttaaacaccaaaaaaaacgaatacgattttctgaaataaacctgatgaactttgataaaacaactggatcataaaatagatgtgccaaaaaattagctcttaaattcaacaaccacggaaaaaatcaaaagaatagaaaccaaagaaatacagaaaacaaaagtagtgcattgagtgatggtaaataaggtaaatgtaaatgctaaagaattttgtagctttgtgttgggtgatggtaaatggcgtggtagtgcattgtatatgtaggaaaactaatttggttattaatttgtagcaattaaaggaaaatattctttgaagcaagaaatttggaagcaaatctttgaaatcgtttggtttttaggaatatgctattattatgcgttttgatgtggcattaatatgtttctttaaattgtttttgtaccgatatagagggaaagaatatataatcggatgtggtgagatattacttgattatactaagaaacaaaatcgattaatatggtatatggagaagagtcatgaataagttcaaaattattttggtagaagtaaatgatatcgaaaattatggattgcatttttttaagtaatcgtggagttaatatagagagattttaggcaatattttggttaggtaaatatttgatttaaaatgtcgtttgaaaataaatgccaataacattgaatagtaaataagtgtcaagtacatgatttatttgctaaaatagctgcaaaaatgtatatatagataataaccagaataactctttatttgattagagaactaaattgacataaattttgtgtataatgaccaaaactcttgatctattttttctggaattttaacatttgaaatcaagaaaataaattaaaaacaaatacaataaaaaatgaggcccaaaaacactgagttcatcagtctcatattttttaatctcaaaatcgtgattaacgccgacgataagagaagaaccctagtcttctcgatttgaaaggagcatccaaaaggaagaaaaccaaaaaaatgtcccacggttgcaaaagagaaaggaggccacgtttttttgtaaggaggccatgtttttttaaccaaaaccttagtggtatcttgatattaatttatttgagagttaaatatggtaactgattttaaaaactctgtcataacaaactaaaacaaaacaaaaaactgtcacaatagtttgtattattttattactaaaaataatagaacaccaaaactacaaatcggttactattaggatttcaaattacaaattgtcgtaacataaaatattcttaaggtcattctaacaatttttttcttcttcattaaacctgtcattaaacgataaatttatggtaatataaacttaatttgtcacaacataaaacaactttgtcataaaacaaaacattatattttaaaaactaaatttgccatcaaacgacatatatcttttataattagaaaaatctgtcataacatgaaatttgtcataacatttaaaaaatttggttatcgttagacgtcattctagtagttaattttttgtcaacaaatctgtaacaatatgacagattgtttgtacaaaattataaatctgtcatcacttacagtaaaaaaacatctataaaaaaacatgtctgtcaaattaaatgaaaaatctgtcaaacaaatttaatctgctataatttataaatttgacataactatcttttaataaatttgtcaaccaaataagtcggccaaaaaaatctgttacaataaaaaagtctgcgaaataaaaataaatatgccataactaaacaatatattttataaaatggatgagatgtttttaaaaggtatttttgtatttattttattttttacacatgagaaaagggtattttagacatgaaaaaaactatttaaccccaatattttttaagataatctagtaattaatctcattatttggattaatctagttttttcccttgttttaatttgccataaatatttactctatatttctataacatgtatttatttttaagattattatagaaattggaacagagaaaaatatttctttcttgtgaacgagagaatctcagcatatatctcatttttttcgctgggtatgtacagaataatacatatgttgcataaacaaaatcaagatcacacgactgaattaataattaccatatttttgccttaacaaacattgattagttttcttaagatcattaggagttaacacagttcctaaaatatgtctaatgtaaagaaagtgatcaattattgatgcgttctagactttcatcttctatgtaaatttgttcttctagtaaacattttctgaataacttacatatggagataaagcatgaatcagtccgtggatgtccactaaattaaatgacaagttgttgaagtttagttcgaaagtctttgtattgagatgtaccaattaaaagaatttaaataatgccatctcaaactgtatagtatttcttaggccttgtttgtttgatcatttggcatttacatccaaatgatccatttacatgatccatttggatgatgcatttgaatgatgtttgtttgatcatttagtattttatctaaatgatgcatttaaataaatatttctttgtttgatcattttgtaattcatatacgttctcattctaataaaaatgactaaaatacccatgctataattttaacaaatgaaaaatatttaacatcattaccaaatataattttaatgaagaaatgattttaaagttttggcgggaaatgtgattttgcggttttggcagaaaatataattttacggttttagcgagaaatatgattttgtggttttggcgggaaaatatgattttacggttttggcgagaaaatataataatacggttttggtaggaaaatatgattttaacgttttggcgggaaaacatgattttatggttttggcgggaaaactataaagtaaaagaattacatgtttcgaaaatattcttattttggaatgttccttaaaatggttaaagaaatactttattactagattttaacccgtcatatatcgcggggctatatatttttttaaaaataacaatttcatttgttaaataaatttaaaatacatatgatttaattttctgtattttctaaatgtacaactcttatatctacatattatttagtgtacaattactatgtttaagtttgactgtttaaaaatatagaaagaataacatacagttcattaagttaaaatctagattataactaaataattcaaatttcaattatatttgttttattaatattctttttttgtttaatgtttaagataatataattgtattttgatttttatatctagtatttcaccaatggtatcccgtctcgtattactaacgactcaaacccgtcatattatctaatcttgttcagtgaaattaaacatatctaatggatttcacccgtggtaaaacgtctcgtattttatcgactcaaactcgtcttaccatctaaccccattcaataaaattaaacattcttttgttattttttttgttttaataatactttaattgaaaagatatataatttaaatcaatttttttttacttcaaatggtaatttaattgtttaaaagtttatatattataaatattataaacccatcctaccatctaatcccgttcggtaaaattaaacattattttttctttttgtataaataatacttttattaaaaaaattataattcaaatcaatttaaaagtttttttcaaattattatttattttttttagatttcacatattgtaaatattctaaacgtttattccgttaaatattctaaatgtttaattaactataatattttatcttttaatcaaatatatattagtaatgtcttaagatttctcatttttaattaattagaattgatggagatatattagataaagaaatgctactaattaggaatattaattaattaaaaataaataatgtcaatggtatttcttgtaaataagttccaacttaaggatttattttataaaatacctgcaaaaaagtatatgtaaataatttatatgtttaagtataaaaaaagattaactagtataactaagtttctttacttctcgcaactcagattcctctagttaaggttttcatctcactccttttctgtagctttatttttttttaattaatatatttgaatatcaaaacaagtatgtactagtactcttttgggctgatgtttcaaatttttatcataattttctttctaatatgctctcaaataccgttgttgcagagacaacttttgggttctttattgcgaatctataatgccaccccaattttaaccatcaaggtaaacctttttaattcttcatatttctgtttaatcttttttcagatctataattaatgatgtaggtcaaattgccctaataccattctctcaaaataagagatcaattgtcgtatttatgggttgaattccacaaatctctcggataacacaatagactaaaatttcgaattaagctaaacaaaagataagacaataaaaacaaagcaaagtaagaaaataacagatgatgggggttgtaagacaagataataaaacataaggtttaaggtattctcaggaaaaaatgattagtagatctagtaatagctaggttgttatcgaaccattcttaaacccaaactctaatattagaataatgataacactgtattttactcattttaggcatgtgtttttcatcatttagcttagtgatcactcattgtttcatatcattttgcatcacatttagcttattttgcatacttaggcatttacgatcatcttacatacacattgcatgttttggtgtgttttcaggttcataaaaagtttacaaggattctacttaaccctctactctatccaacccagagggaagcagcagagcattctactcgaccagttcactcgatccagacagccacagaggaggctgcaattcactcgacccctttactcgatcaaggcagcctcagtggaagcagcaaattgatcttcggatcctcctcattccccactcaaccagacatctgagcatacagataggagaggaagaaacatctactcgaccaattgatcactcggagcataaacacaaaggcgcaaactttacagcaccctccttactcgatccccaagatctagcactcgcccaaaccacctcaagtctcttgtcttctagtgaatctagggttttcaacatttcactataaatagatcactttgggatttgtccaaaggatctagctttaatcctttagtttttctttgtgttcttgaatcttcaaaacttaattactcttcatctatttcatttttgcacttagttcttttagtaaagttgtttagcttgtttagatcttcattttgatatgatttcagtaatttctgggtttgtgttcttaattgtgttgcttgagtagtgattagggttcttgaggatgaattagattagggtaatctctaggttagtcaggtggttaagattaggttagatcccttctggattcgcgtggaccctatgcgtttttcgctggtaatgtcgagattcgatcatagacgtccagcgtccaaaagatgttcaaatggatgtctgatctacgaattccagagatttgtagacttgaccaagacattggctagtccgcttattgactttggtagattgttgcttaaacccttctctgctatgtttcatcaacgagaggtgagattaggaagtggtagagttatgagggtctctgtcatgacagtggattgacccggtttttgaatctatcgtctagggtatctacctttcacctgttagcctcctgatgaaccctagagttgcccttatcaatgaatccatccttaggacttctattcttcttagatttatttgtattcaccccttgattgcacttttatttaccttttatttgtatcccctgttgattgcattttagttctgcctgttggttctactcgacccaatgatcgagtagggcttttaaaagttctttttttgttgtttgaatcttgacctaggattgttactagaaacccaccatcactataatctggcttgacttagtagcttctgtacacatcttgactggattgacaccccctatacatgcatcgacatcttagtgtttaaggagaattgaactgaacctcacattcagcacacaagtaggcctaaaaacctacttatcaatttggcatcatttccaattcattgttgcattgttacattcaagatatttgaaaaagttaagatcaagttcttttacatttatcaagttactaactcatattttcgtctgcttgtttttgtggtataggtactaatctttgtgcatgcaaactcgatccaaaggttctgcacacctactaccttcagagacagaattgatagaatagctcgtgagttacaagaaaccaaagcaaaggcagcctctgatcagcaaagaccagctgctatggatcaacagaacagaccggttgatgttcaagacccacctaatgttgatcaaccaagaaatattggtgctcgtgatgccccaaggaatcatcaccaaagacaaaggatagtgcctctaccagttcagaacaacaactttgagatcaagagtggtctcatctccatgatccaaggaaacaagtttcatggtttacctatggaagatcccctggaccaccttgacagctttgataggctctgtggcattaccaagatcaatggtgtcactgaagatatgtttaagctcagattatttcccttctctttgggagacaagagacaccattgggagaagactctaccccagactccatcacctcatgggacgattgtaagaaagcttttcctgccaagttcttctctaacgcttgcaccgctagattgaggaacgagatctcaggctttacacagaaaaacaatgaaactttctgtgaagcttgggagaggtttaaaagctacacaactcagtgcccccatcacggtttcaagaaggcttcattattgaccacactctgtagaggagctttatcaaagattagaatgcttctcgacactgcctcaaatggaaactttctgaacaaggatgtagcagacggatgggtgttggtcgaaaatctagcacaatctgatgggtgctacaatgaagactatgatcgctcagtgagaggaactggaggaacagaggataaacagagcaaagatatcaaggctctgaatgaaaagctagacaagctattgctcgctcagaagaagcagatacactacatcactgatgaagagcacttccaaatgcaaaaaggggggaatgatcaaactgaagagctgtgctacatccaaaaccaaggagggttcaacaagggctacaacaactacaagcccaacccaaaccactcctacagaagcactaatgtagctaacccccaagatcaagtgtatccaccacaacagaatcaatctaagccttttgttcagtacaaccaaggttatgtccctaaaaaatagtttaatggaggctaccaacagcagaatcggccaccagggtttattcaacaaccacaacaagcccgagcagctagagatccttaaattaagcaactcattcaacaaatcattcaaggacaagctactggagctatggcttttgacaagaagatagctgaattacacaacaagatcgattgttcttacaacgatctaaacgtcaagttcgaagctctgaattcaaaaatcaagtatgtggagagtcaatttgcatcaacctctgctccgaagcatcctcaacaacttctagggaaagcagttcagaatcctaaggactatgctactgataatgctatcaccatccaccaagaagatgagtctccaccaaatcatcagactcccaatacttaggacaatatgattcaagaaggggggggattcaactcaaattgctgcacctgccacccagcaattcatctggactatagagcacacacctttgctgaatactcaccattatggaaaaaaattcaaaattgaaaaactcaagaaacatgagaatcaagagatgattagcagtgccaccacccaagaaacttccaagaagaaagtcatccaagaaaagcttgatgatcccggttcattcactccgccatgctctctaggaccattgacattcaataggtgcctttattatttgggagcatctgttagccttatgcctctctctacagctaaaaagctagggatcatggaatacaagttctgcaacttagctttactcttagctgatggttctgttgcacatcctcatggtctaatagaaaatctgcctgacaagattggaaatgttgagatacctacagattttgtggtattggacgtagatgaagaaggcaaggatcccctgatcctaggcagaccattcttagcttcagttggaacagtcatagatgtcaggaatggaaaaattaatctgaaccttgaaaaaggcatcaagatgaagtttgacatcagaaaagcttcagggaaatcaacaacaggaggtcagagttttgggattcaggacatggatgttgatgaagaaacataagctggaaccccactaaaagttaactatacttctcaactcagcaagctcaagagaactattgaccacaagaagagagcaatagaagggttagctcagactgaagatcctacaagaagatgactggtatgagatgagaaaataatttaaatggcaaagaagagtcatagagggattatcttcaagggtgatgaagctgaaagatcaactatagatgtttgaaaaaagagttaataagttttcaaatggtattgatacagaaaagatggaaactgcactagctatcaaggaggacgaagatttcacaacagaatggtttgcaccagaacatcagaaaggagtcacttagaggaaaaaagcctagagagcaagttgttgagtgaggaggaaacccctattccgacttattctccaggagtgcctaaatagtccacaaacccctctactgaagaagaacacttgattcatgattctattgctgaaaaactcctggagctctggattggatataaagcttaagaggatacaattggaaagttaactcacaagatggaagagttcaacaacaccattctggaacttcaagaaatggttaaaggctaccccagttttgaatttgaggattggtcaaaggaacctggttcagaagaagaagactactctgctgatcagaaagaagtttattttgaaggaaaatcaaatatgtactcatcataccatatgtccagagaggatgcagagtatgattcgggcactgaaaattcaactactgaagatgaggacttttctgttcctctcttcaaccttttttctaactaagtctgtaagaatcaagcttagtgacttaaaacaagctcacttgggaggaagtcccatgtctatccatgtatataagtatctattttccttgttatttttgatatttgtgtttaagtgtttcaggtttatttctttgaccatgatggagtcaacggtcaagtaaattcaaaccaagtcaagaaaaatctcaaccgttgatcgagtagaatgaggtggagtgttttgagccgtgcgattgaatgactaaacatggaaaatcaccctcaccgtttgatcgagtgaccaagggagaagcattctccaccgtttgatcaagtatttcgcacttcaagaggatgctcaatcctttactcgagcttgaatgattcggcgaccaaggagtgaggtcgagtggcccacatgttccccttcacttcattactcaatggacaaaccatttacccatgcctctcaccatttccaactcgcctttactatccttccaaagagaatccgaaggccatcctcctccacccattgaaatcgccaaaccacttttgaaactctctctttcatcatctcattttcacaaactctatatctctcacaaagcttcaaaattttcaccccaagctctccctatcactcttcaagaattcgttctccccttcaccaatacttcaccaaagtcactgatcactccaaagtttatcctcaagcattcaatcggtataaaactcaaaatttcatcactaaagaaaccaattcccttccactttggtaccgcttcgagagttgttcttgtttgccctgttgaaccttaccaccaatctctatggattcaagaagaaagagttcatctcgagctagaagatcgttcgttgataacgaagaggttgaggcgtttgacatgagtggcatgactgaacgccaaactcgccaagctcgccgtactcaaagatcaagcttgattcaaggtggaagctcaagccgttcagccaggcaaaaagaagaagtagctcggggaaagagggtcgttgaggctgaagaagaacaccatgaagaggcaacctttgaaaaagtggttactgaggaagaggttgagatcatcggggatgatacaccagcccctgttgggagaagaaaccggccaaggaggaagagagagccaaccccgagcgagtactatcaatacttgaagaagttgaagtttgaggaaactagataccctcataaggaaacgatgcaagagcttggtatttgtggtgatgtggaatacttgatggaatttgccaatcttgcaacattcacgagctgccaatgtgggggatataaagaggagagctgccaactccttgcaaccctcaaggttgatttctatgttgacgattcagagaaagaagagagaggaggtcctggttacataactttcaaggttagggatgtcgagtatacacttcatattcgccatcttgataccattttcaggtttccaagtggagaaggaatccgctaagactatgatcaagaagagtcgaaatctctttggaaaacaatcgctggtccgaagcccttctcgccaaccaagagcaagagttcttcaatccgaaatcccgtgattagatatctccaccaatgcatcgccaataccttctttccaaagaagaccaccggatttattggtgaagaggagctatgcatgatagaccaatctttggtcttcattttgagagagacaaaagatgggaggaagatggcgggtgatagagcagacacttcgctgagtgttgttctcttggatcacctattttgctacaaagagtatgctacaaccatccatcgctcgggaattcgcggaagtctttatgttggtggtctcttaatgccaatactgggagctgtggggatggaattcagaacccttgacgtgttgcctaagttcattgacctcgactatctcaaggggaaggattttcttgagaaaacaactccggcggatcgctatctcttcaagttcaaccatccatagcttggaccttctctgttacccctaacatgcgagaaccagacttcggtgaagacaagacgcaaaatcaatttcatgccatctccctctaccttgaacatcgacattggaggagctcgagaagatgaactagaatatagtccaactgactatgagcaacatgagtactttactcaagctgattataagcagcaaatcgagtttgagcaacatattgatcaatcggagcatgggaccagcgaacaagagcaagctcattataaagaaggtgctgaccaaggaggagatgagatagctgtagttcacaagaagctcggtgtgcttgaagagcttaggaaccttcacagcaaaacaatgaagggtttcaagaagaagatgagaacaatgaagaagtcgctgaagagtatggctgctcaactcaaggacttccagagcaagccaaggccaacgtctcccactcccgaagtaagaagaagcggttcaacgagctcaactgcatggagagctgaaaggatcgatcaactctgagctacatcttttgagcctcgggaagtgatctccgagttgagagagccaaggagtaggcagagacgagcttccacacgctcgaccggacaaaacgagcaaaaccctcccgcctcaacttcagcccctgcctatactcaagagagtatggacgattatgtctccatctacttcacctgatcactgaggtaacaccaccgcaaccattgtacataccattggctttttatttttctttgtgtgttttgtgttttggtcttgaatttttcctcagatttttattacacaagggactgtgtaatttaagtttgggggagggttcaagacatgtttaacattgtcttctcttttcttatttcaaattttgcatcaatctaaggcatagaaaaaaaccataaaaaatttgaaaaaaattcagaaaatgatttcacaaaaactgagtgtcatgtagattgcatttcattttaggattgtatatagagtgtttgtattttgaattgctcatttgcataggggaaaatgatgatttcaaaccgataagcatgttttaattcaatgaagtaagttcaatgttcaggttgttcgttctctgttgcataaccgattgtatctctgaagtaagaccgcaccctgctttgaatttacaacttgactatattgctttgattcaaaactcgcttatctgatgccattccctatctattagaacttgaactgaatttgcaattatcatgtctatgcattgtttgtgaagtcatggctaccatatacatacttggattatcttattcacttcaccaccctctgttaatccaagtagctgactctcatttttagagcagtttcccatacccttagcctagccttatttcaaaccaaagatcatttgtgtgtgattgtgaggtctttttcgattgagcttggtataacgtgttaggtatgagccgacaagagcagtctttcatgtagacctagcccacgctttttgggttagctaggactaggtggagacttgtatttgggattgggattgtgtatggattgcatgggaaagagaatgagaatgataagaaaaaaaaaaaaaaaagagaataagagtttagagttctaaagggggatacaaaaaaagtgttagtctaataaagagtttggaattcaaagaagttaggcattgtgattcaaagaaaagggtaaaacgccctctatgctaagattagaagaaaagccttaagtttgtcgaagtataaaaccaaaccgctagactcttaaatcgtttcaaagagaaccccttagaacttgaaccaaaagagagaaagaatgagaaaaagggtagagataggacatctatgggactgggatcatcttctgagctatcatactatatcattgggtagatgagagtctgttcttgtatgtgtccattggcttttacctttagcattctgctgaacgtcaatcttttctctgagagtcccctgttactcgaccaaatcactagagggaccattttttgtctcttagcctaagcccaaaaccaagtgagttcataaccattgcattgcttgatccactgttcgtgcttaaatagattaaggcaggttgttaggttgcattgtgacgagtatggctaacggttttaagtaagggtctatcactttgcaacctagaattagctacctggacattgagcttacctgttctatatgcatgcttcgatttttgaatccccaccttcaaacctctctttcaacttaagattttttgtttactcgagggcaatcaagagataagtttgggggagttgataacactgtattttactcattttaggtgtatatttatcatcatttagctttgcattcgctcattctatcatatcattttgcaccattttagcttattttgcatacttaggcatttaggatcatcttgcatacacattgcattttttggtgtgttttcaggtgcagaaggagctcaaaaggattcaactcgtccctctactctatccaaccaggagggaagcagcagagcattgtactcgacccactcactcgatccaggcagccacatcggaggcagcaattcactcgaccctcttactcgatccttgcagcctcataagaagcagtagatcgatctactcgccccttctactcgttcctatcctcgacccatttactcgatcaagggtgaccaactctacaagacttgttgatctatcaaagcgtcttcggatcctcctcattccccactcaaccagacatctgagcatacagataggagaggaagaagcatctactcgactaattgatcactcggagcatagacacaaaggcgtagactttacagcaccctccttactcgatccccaagatcgagcactcacccaaaccgcctcaagtctcttgtcttctagtgaatctagggttttcaacatttcactatacatagatcacttggggattcgtccaaaggatctagctttaatccttcagtttttctttgtgttcttgaatcttcaaaagttaattattcttaatctattttgtttttgcacttagttattttagtaaagttgtttagcttgtttagatctacattttgatatgatttcagtaatttatgggtttgtgttcttagttatgttgcttgagtagtgattagggttcttaagaatgaattagattagggtaatctctaggttagtcaggtggttaagattaggttagatcccttctggattcgcttgacccctatgcggttttcgctggctaatgtggagatttgatcatagacgtccagcgtccaaaagacgttcaaatggatgtgttatctacgaattccagagatttgtagacttgaccaagacattggctagtccgcttattggctttggtagattgttgcttaaaccctgctctgctatgtttcatcaacgagagttgagattaggaagtggtagagttatgggggtctctgtcacgagagtggattgacctggtttttgaatctatcgtctaaggtatatgtctttcacttgttagccacctgatgaaccctagagttgtccttatcaatgaatcaatccttaggacttctattcttcttagatttatttgtattcaccccctgattatactttatttacatgttatttgtatcccatgttgattgcattttagttctgcatgttggttctactcgacctaatgatcgagtaaggttcttaagttctcatttttacctgtttgaatcctgacctaggattgttactagaaacccaccatcattataatctggcttaacttagttgtttctgtacacatcttgattgctagcaataacagtggactggattgacaccccctatagctgcatcgacatgttagtgtttaaggggaattgaactgaacctcacattcagcaaaataagtaggcctaagaacctacttatcaaataatcggtggtgttccgtgaaattcactatgcctagagctaagattcccgttgaagctgtgaaatcttatacttaaacatacattattatcattagttcacctaagtatataaacccgagcccttctatgagcctacctgttttttcttaaatactaaggcttatctatgatagttttggtaacaagtacctatggtgggtatacctattatctaaaataaagttctaggtgatcaatctagaattagcattaagaacaatcaagatgaagaatcctacagatcaccgagctagggagcaacctactaaatcatctaaatccctgatgagaaaccctaaccctaacaagaaagctactcaaacatgatcatataacacaaatcatagtctgagtaagaaatcaatagtcaatatatcaagaaaaagagtaagaaagatcttgtctaaagggagtctccacaggggctgtactcaagttcgcgcctcttcccggccgaacctcttaatttttcgcgattcaacataaaatttcctttacgaggctaaattctataatcgctctcttattacacagcggaagtctttctaactttgatttaattctaaccaactcttgtaccggtttcatcgtctttgtcccttagacttagatcgatcctttactcggtcaagacatgcatattgttcgctaaccattctaggcctaacaatcgcatattcctttatcctattttcacggtcaattcccaaacgtctatcctaactagtaagctagatcgttacatacattggccaatatgcggatttgattccttagcccgtttgtcgccttattctattcattcaacgattcgtatgcgatcgtgtattgatggaccaatccctatcgttacttagccatacaaccaaccaaccccactggtctaagtacaacgatagagattggggatagtacgattcccttggttcacgatggccgaatcaagccaattggtccatccgttctccaaacgtacgtccctccggctacatggtgaacgattgagccctcggcttatcgaactatccatgtttccgatccggtcgtttaacactacgaccgctcacggtttactaaccgtttacccgtccggtccatggtggtcgataaagctttcggcttaatgatccatccatgcggtccgaatgatatccttatcacacccaagggtccgtggattcatccaccggatcatcgtaggctagcccatgaaatccttcctccgtcggccttaggtttgctcgcaggtccaacatccgttttgtccatcgaatcccaccgtggactttcccgttggttatccgtcgagtcaccatttggtcttaccgatctccgatcggtttcaccatggctgaggagatagatacatgaagtcagccgcgatattggtcctatatggtgaatcacgttccttacccattcttggtgctttctccctttaccggtaagattgcatccatgggcgacccttgggtgtgttcggatgcacttatccttgtgcttcctcgaacacttttctcgatccatcccatccgacgatcgatcggtctgtccgacccattccgtctgacgatcggcctgtcccttcggacccgtccgacgatcggtctctccgatccgatccgtctggccgatctgatccgtcccacgatcggtctggctgatccaatccgacgatcggtctaccagatccgattcgtctctaagacgaatggtctaccctctccatcctctacactccgttgaaccgttggaacgggaggtagcatgcacatcagttcggtcgagttatactcgccgagccgcaccccctttccgaccaacaacttcaggatgtgttgggactgttttaagaatgttttgtggtgtctggatgttgtgagatgatgtgagatgatgccttgggggtcctcccttatatagggggcgaatggatgcttcccgaagcatcatatccgttccttgcacccttccgaaaggtcacatccgttccttgcatccttccaaaaggtcacatccgttccttgcatcctttgggcgatgcaaccgttcattggtacccgctcgaccttacaccttttgaccgagacacctcttcacccgtgagctaccacagtctactagctcgagtgtcagctgaccggaccacccaactaggtaagtacacgatcagctcactgagctcaattgagttgtcggtcagctcaccttgctgagctagctagtcttccagctggtttagctcacctagcttagctagctagttcatcctagcttgtccagctcacctagctggttcagcttgaactttctcgttcttccgactaagtattttagtccgtttcttgaccatggtctagttttctcctaaaacaacctggcctctttatgaacgcgggacgcggtcgttacaagtttgctcctagggaataaaagaaataaggagattagcctctcccagcttaagtctaaacaatgacctttatatatatatatgacctaaaacgtgatgggtcttctttaaaaataagggtcaaatttagaaatctttaaaacgtcaatatgttgcgtctttgaatagccgtaaggtattggtgtcgctcgataccagggatggtgtcgttcgacaactacgcgatttttagtcttcagatttctttctgcaacataagttctctgttttactccagaatgctccattatctccaaatgcatctgaaacatgtaaagacctgaaaagactagtccattatctccaaatgcatctgaaacatgtaaaaactagaaaagactctagaaataacaaatagactctaaaacctatacctaaatcattgctaaaaccgataaaaattgggatatatcatctcccctagacttagcttttgcttgccctcaagtaaaacataaaagccgaacccgtggaagaggtttgaaaacacaggaactcctaacattctctagtctattgccatgatcatactaaccaaatccatatgcctagtagttctaatcatatcctaaccaatatgtacttctctacaagcttacaacattctagattccatacctaagttccaccactatatccaccaggttttcatcgttgggtctcatcaagcaagctaatattaaagaaccttctagactcattcatgtactataccatgataaaacgaccattctttatattttattttcttggtattctttctctcccctaaacttattctttttgaagagtaaacaaaggggaactcgaatgctggattgacaccctcgacatatttacatcctttgtaattgattattcctaataatgtacaataatggggtcatgagaaacattcctacccttatacactaccgaaaatcatatcaatctcttgtttttttttttaataaggggagagaaatacttttctttttcacattggtctcaatagcaggtatgaacaaggagtcaaattctatgaacactaaccgttttgatgaggtaaaaggaagagcagtgagattagctccagccttaatagattgtgttggaaaccaggatatcctcaagtctattggtttgccatctggattttccaatagtcggattgagtcgaacgacctgcaacattaatcaaccagcaataaactaaagaatagagatcagaattccaaacaaaattttgactcaataaaacgactcgaaaaagaaaagaagaataagaagaagactcgtaaagaaaaacgtagttcgtaagcgcatcccccaaaattaaacgtcactgttcccagtagcattcaaattcggagtaaacaaaataaataaaagaaaaaacgaaaaataaaagaaaaataaataaaaaatcataccagtgggttgcctcctactaaacgcttagtttcagtcattagcttgactttaaaggatttctagaatctggtggttcaaaaggtggaagtaaataccgtggagaaagacctctcatcatccatgttggtgtataagctgttagcgcattaggtctatctaggacgagaggagcatcagcagggtgggagtcaggtatgggaggaacactcctttttcctgcacaatcataaaaagaacgaacaagcactcgacgaaaaactcgtagcttgcataactgtaaaacagtttttgaaaattttaaactcttattgatgacatatggaggttaaagaggaggagatgagtaccttggtcgtttaggaggtggatgaaggagtagaggtatagtgggtgacatgacagtagtgggtgacatgacagtagttcctagacttatagaagtgattcgaccttgaaaagtacctatattaaatgattctctctcaaccagtgatgggtgtcgatcgacactcgtggtgtgttggtcgacactcgtgctacaacttgtcttcccttaacatgtcgataatttagctctgaaatctgttctgagacgacaattatcttccttatgtctccttgattctatggagccttgcagtgctcctcctgaatatgttgcgtatactgttgaggcataggacaagaaatttcaggtgtgtagactagttcaacaacaggtggaaagtcaaggatgattggtgcaatcagcatccatgtcaatcggcattaggtgagtgtcggtcgacactactatctggtatcgatccttctctgtcaatctcatttgattcttctccgtcgaacgtcgacattggctctatttggtactggtgtcaatcgacacccaagtggtatctgtcgacactatagatgggtgtcgagtgattctaaagttcaatgtcgagcttgatcgattttgcttcgtcacagcttgatgtctcatatatatgtgatggtgtcaatcgacaccatgggttagtgtgggtcgacactacctctacaacgtcaaattcgtcactctcctcaactttcaggaactcatcttcactttccatcaaagcaacatgccaagaaggcgtgagtcttctctcagtccatctagggatatatctctctaatatcttcttctggccttccagaatctgttcgggcaatgattctatcttgcttctttgtgcgggtggagggggggcttggtaagaagcaagatcgtagtttcttgtgaagctgaaactactgctatactgaaaaggttgctggaactgagacttgtgagtgtagttaggttgaccattcccatagacacctatattgcctcgttggtgttctagtctctgattctgataacctcttccaccaacataattgacatcttccacaaatagattgtggactacgtcaagcttagccatgaatccaacaatcttactctcgttcatgttctttggttgttttcgcttctgcgattagacaaacacatgaaacacacaagaaaaagaaaagagaaagactaagtaaataaattactacaagaatatggagtatttatagcactataatatagcagttaaccatgttctgctataatttatcacccggctaaacttttatagcgtttggtaatttcaaaacgctataatctcgtacccgggaaataaaaaatgacgcgggccatgtttttggatttagggttattgttctatagcgttaccattaattaaacgctacctaatgtaatagcgcggattaattttgttgcccgccgaaacaaaaaaattagcctcaaaataatcctaagtactgaaaaaactattcctactctttgttctttctcgactctttctcttcctcgactctttctcttcctattcgtgttcttccctattctcgtcttctgctctaattgattcttcttctctctatctctctttgtgttcgtgttcttgctcactgactctgttcaatctctctcatagacgctcgctactcctcagcctctccgtcacagacctgtttctaatttgagaaggttatgtgccttttctaatcgatttagggattgcatgtcccattaaacttgtttgagcatcgatttggggttttaatcagttttagggtttcgcttttaggttctcagaagcttttggtagccgtgtctcgaagatttcagtggtaaccgccttgtctctatttgacaggtatgttattttgacttagtttgaatcgatttctgtagttcttagtttgcatatatcgatttgagtattcacttgaacttgaggattcacttgtattgatttgagtttctaatagaactgaacttgagtattcacttagcttgtatcgattttcaatgtcatatagctttgaacttgagtattcacttgtatcgatttgtgtttcttatagaattgaacttgagaccattcacttgtttcgattttgaacttgagtattgattttaagatttgaacttgagtaataacacagaacttgaattgatagtgaacttgagtttatgaaatttctttgtggaggcctacaccatctgtttacacacttggtgaagctttggggaacaagattgcttggccttttgataagatcatcttggacagtgatgtagcttccccttctgagaatcagactgcaggatcttcggtaatcttcttcccatgtcacttgtcaattatctagtaagatcactcactgctcacttattatttatgcaccattctttaggctaaagatgcaacaccagttaagatcaagataatggattggaatattgctgattctgttgttggtgagggtcgattgtgttcaacagacagacacgaacttgtgaacaatatgcctcttggtccttctgctgcaattgttaaggttaagaaggtgttaaacaaagcagcatatttgtggagaccaagtccaggaaagtttgtaatgggagatgtactacataagaacattgcgtggccacttcatagtatacaacatgtgaatatatctcctatactggatgaaacagcatcagcaaatagaagaccatcacctccattggtaactttctgcactttaacttacatgcatatgaaagaccatcgcttgaatattgcactttaacttggtattatttgcactttctgcactttaacttggtattattttgattcatgtagagcttgagtaacagtactgctagcaccagcaaatctgcgaagaagaaatgcatcatgttagattacaagaacgggagagaaagagtagcagaaggaagagtatgtacctctaacccttcagacacagtccatcatatgcccctaggtccaaatgcgagcaaggtatgtgtagaagtttcaaagattggagatgctgctgtgtggagaccaaactctgaaattcaaacaattgcagatgcagtaggtagtattgtggcttggcctactgataaaatcatgtttgtgtaaacattatgttgtttttgttgtttttgtttgttaagtactttgacaattcaatgtaatttgggatcttgaattttatataatatgaatttatgaatttctttctgaattttgttatgatttccaaataatatgaatttctttctgaatttgggattaaaatataatttatgaactggaattaattggagaaatattgcataattaaaatgccataatatataaatattgcaattaactaaatgctattgtctaattatatgtagcaaattcaatatgctatgtataacagttatttatatcagaaactaatcgctattaaataattaaagattacagcagaaaaagcgctgtaataaaggaaataatgatagcagaacaaaaaagcgctacaatatgtctccgacctattatgacggacgatgatagagcgcttttaataacgctatggtataattaaatagcgtttttcgggcgctacaaatgctccatattcttgtagtgaaaagaaacacaaaaacaaaagctaagacaaaattctaatcctaatctaatggtgaatcgtacagaacttcgggaactgtgccaaattagatgtaggtcaaattgccttaagaccactctctcaaataagaaattgattgtagtacttaagggtcaaatttcaaaaacctctcggatcacacaatagattaaggtttcaaattaatctaaacaaaagataagaaaataaaaagaaagcaaagtaagcaaatagtagatgatggaggttgtaagtcaagataataaaacgtcaggtttagggtattctcaggaaacaaatgattagtagatctagtaatagctaggttttatcgaaacattcttaaactcaaactctaatattagaataacaagtggtgttccgcgaaactcacattgcgtagatctagtaatagctaggttgttccgcgaaactcactatacttaaacatgcattataatcaagtttgattagttcacctaagtatataaaccagagctcttctatgagcctacctgttctttcttaaatacttaggcccatctatgatagttctgataacaggtacctatggtgggtatacatattatctaagatcaagttctaggtgatcaatctagaactagcattaagatcaattaaaatgaagaatcctaaagataacctagcaatggggaaaccaactaaatcatctaaatccctaatgaggaaccctaaccctaacaagaaagcttctcaaacatgaacatagaaacacaaatcatagtctgaataagaaatcattaatttgaataagaaatcaatagtccatatatcaagagaaagagtaagaaagatcttctctaaaaagagtctccacatggttttgctcccaagaacaaaagagataaggagattagcctctccaaccttagatctaaacaatgacctttaaaactatatatatatatatatatatatatatatatatatatatatatatgtgacctaacacgtgatgggccttctttagaaataagggaaagttctgggccgaatttgaaaatcttcaaaactttaataagttgcgtcttgaattgccgttaggtattggtatcgctcgacaccaggggtggtgttgttcgacacctacgcgatttttagtcttcgaaattctttctgcagcatatgttctctgttttcctccagaatgctccattatctccaaatgcattccaaacgtgtaaagacatgaaaaggactagaaaagactctaaaaataacaaatacactctaaaacctatacctaaatcataactaaaaccggtaaaaatagggatataacaattaaccttaaagaattcatttaagccctgacggtgatctaatacaataatgtaataattcgaaaagtggtgatgtaatcattgaaaaacaagaatttataagtctggtgttgttgaggtatgtgtacctggtctgtatgagaagtatgatccatttgttttgacaatgcaagtaaatttttttttcgtatctattgatatatccctatttttactgtttttaactacgatttagatataggctttagagtctttttgttatttctagagtccttttagagtctttttaggtacttaatggaagaatgacgataataagacattttggagcaaaacctgaagagaataagccaatggacgaattcagtttcagatcaagtcgagagtgtcgatcgacaccagttgcggctcagtaaagtccaagacggtttagattttaagaatttgaaatttgccccagaagactttcctatatatatagttttaaatgtcattgtttagacctaaggagtttttagcaaccttttattctagatttttatactttcgagataagctattcataaattggatccctgtttccagagttcattatagattttaatatagtgaagagatcttttctaactcttttcttcttattgattttttttatgctttcttattcaaacatgtcttgttattcaatgatcatgtatgagtagtctgcttgttagggttagggtttctaaatagggttatagatgatttagtagatcgcccatctattaggatatctgtaagattttttatctttggttattctaagtgctagttctagagtacctaactagaacttgataaataataggtctgcccaaaaaggcatctattaccagaactactatttgatgagccgagtttataggtgtgtaaacccgattagcatgcatgtttaggattagggatttgccaagcaaacgctgagaatctttagctttattcatagggagtaatgccaagttaatgctgggatattctataatagttgtttgagattaagaacggttcgataacatcctagcaactattagatctactaatcatctgttttctgagaataccctaagcctaacgttttaattatcttattttagaaccccataatctactatcgcttgttgctttctttaattatcttacctttgtctagcttgatctcgatacttatgtctattttgtgaacaaaagagctttgtcgaattcgacccttaaaaactaacgatctctttttttgagggagtaagcttaaggtcaatttgatccatatcatcttcgtataaaatgacgtactaaataatggttggtagtagtgaaagactatccaagaaatcattcaaaattccgcgatagtcattccattgaatgtaagttcactaattttacatagaggacatcttgaagacattcccgaaaatccaccatgtgaagattctgaagatcatgataccgatcttgagatgacggattcaaaaagttccaaagaagaataagaccattacagagaggattattctcttgggaatttatgttttactagattgataacccgtgcttcgctcgggtgttggtaccggatcccgcaccgatagtccaggacaaaccaaagattgccatgtaagaagaaaagggacccacatgaagcacaacttggaatgagtcccgaagttgggtgaagaatgttgtgaggtgatcacgtcgcgagatagagacgaggccgatatgagagcagtttggtttagatatgttggggcgagtgttaaagcccatgaacgtcaaagtcaattcaaattcaaacattgaggcattaagtctgaagcagaagcattaagattagataccacattcttgtataaataatgaaggtcttgaaccatgtaatatacacacgcaattctcctagcaattatactatagccattttttatatcaatccaaaagctctttacatccgatttttgtcctcaagattaacccttctcaaaaattaagtaaatatttgagtgtgtgaatccgacatccattttttttattacaagtaaacatgcaatttgagactcttttttgtgactctttttatggtcgcaactatttgcgacgttgtaaatactactttgtgactatataacgaccgacacgacatcaacgcaaaatcgtcgcaaatgtacgactccattatatagtcgaagaatggtcataaataagcgacgtttgtacgattcatttgcaacgtagtagaaatacaatttgtttttttttgaagtttcacaattgtcacaaaagagttttaaagttgtggctgttttgcctcgttttagccactctttgagaaattgcaatataagaatctagaatgattaatatgttaagtaaccatattttaccaattatttgaggtaatatacgtatagattctttctatttattttttattttacatgttttaaagcaaatctttttgaacaccaaatcatatacaagatatgttacataagcttttcaaagaaaggttaataccttatatatgttggaaaacaaacttatgaaataatctttgtatctcctacaaagaatgatatacatcataattggactgtaactgattcaaaatactcattattaatgtaattagatcttaaaattaagaaatcttaaatcttggcttgtgactcctatgcttacgtcgcaacgaagtggctcttttgcgacgactttgccattctttagcgactcctcgagatttaaattttacagtttgataatttagaatgattaatgttaactagcaaccattttggcattgatttgagctaataaattgatagattcttctttaatatattagttttacatgttttagactaaatctttgtaaaagccaaatcatgtagaagatgttacataagtttttaaaataaatgtttctaatctatgtaagtttcaaaacaaacttaaccaatgattattttcctcttaaaacggaatctatacttcagaaatggtctgttagtgatcataaacacttataactaatgtatttacatcttaaccttcagaaatgttaaataattgtttgtgactcatatcggtggtcacaaaatagcgacgtgtttgccactaccttacgacgaatttggtgacaaacattgagaccaaattgcgactattgtatttacgcgaaaatatttttagggttttgattaggcggtaaattatccctcgtgttttttcgtttgtgactaagttaagactaatgttttttgctttgtgacgactttgcgactccttttattttattactaaccactgaaaagtcactttcctcattttctctatctcgaattctcgacactaagaatttctctggggtttctctcctcaaactcgatctgattcttttgttctagggttttcactcaattggatctttctcaatctcctctctctcaatttgattattttgttctccgtgatggttgctggaaaggggaaatcaagtagaggccatggtgggagaaccgaaggaggtgagagaactggtgggagaaccggaggaggtgagagaaccgaatgaggatcgtcatctcatgcctccaacccttattcttcgaacgcgactaattcagtgactcaatcatctagagcaacgcttccttctcagtacccagcgaggtcacaaacaccgactcctatttctttgccatcaccgcaagtcgctcaacaacatcctcttaattatcaacagccgcctccttatcaacatctgcatccttatcaagtatgattgattaccaacttgttttatgtttggtctttgtttctaaagggattttatctaagcttaactttcttatcagattcctcagcatcaaattcctccttatcatattccccaacctcaaatgcctcctcatgaaaaccctaatgttgactctgatgctgacaacgaaccaccgatggactatgacgagatggtcgagtatatgttgggtctgcctggccgagagcatcttccacgtcttagtcggacccaaattccaggcgttgagactatatggtatgagatgtagttgcttagattatgaagcttttgttgtgttgagagcatctctaaatgttatatcgtcattattttaggttctagcttgataaatttgatggaccttactatcattaatgtatatttgttttgatgtaataggtttggcagagacaaagggaaattgtctaggactattgctggaatatttcgggccaaatttgatggaccttactttagttggaaggtgactcctataagcattcaacagcgatatttcaaagcatttgcggtaatgttgattcagctttgaatctttgatagttatgctgaattgaatcagcatctgttatactaattcatacaaatatgtgtaggggaagttcaactgggatatcggacttaccgagctagtgagagaaggattcttggtgatcgcaaagaaaaggcttaaagggattgttagccaagcaaaaaaatagtggtgtaaggccgtattggattgtcaaggaactgtggacagagatgtggatttactggaacactccggctgctatgggaaaaagctcaaatgcatcacagtgtagaaacagtgatcgtggtggccttggagtccacaaacacgtatcaggacaaaaatcattcatgcaagttcaccaagagctggtatagtctttcacttttatttcaaattttgcacttagaacactgatgttgttatctctcatcagtgattttaatgatgtctatgtatcattataggaggaagaattggggcgtcgtgtgtcttatggagaagtgtttatgaaaacacatacaagggcagatggttcttttgtcgatgctaaagccaaataagtagctgaggtctatgggaagagcatagaagagagaatttctttaatggaagaggatggtgtagcaaattcagataattccaatcagtagtcaactcagcgggaactcaacattgacgaaatgattgacatctttctcaaggtaattttgagtaagattttgtcttttaataatataatcagtccatgtttgatgattagtacttgaattattctatctttgatgaacatgattattacttgaatgattctatttgctaatatggactccatatacttgatgttgcttgaatgatttccatagtcagtcttttgtttcatatacttaatgttgcttgaatttgtcatttttgtatgtgtaattcgtcttagattgcttatgtatctatttgatggtttgtgaatcattactttttgctgaacatgattatgtatttgatctctttctgtttgtgagcatgattttgttttgtttttcttaagtgtactgaaacagatgataaaggaaactattttggcatcagatctcttgtggtgacccttaacaaagggaaaagaaaagaaagctatgcaaacatctcttcttcctcacttacagagcttcatgatcaacttcgtcaaaagatggcagagcatgacgaagaaaatgctcgacgtgatgcagagcaacaacaatctcaaactcggatcgcaaacttggagatgcttgtatcgtattggaaacagagtgatcctgcgtttgcagcttttgttgcatctcagccacatccaactgcaccagccaccacaccagccaccacaccagccgctagtgcaacaaccacaacacaacctgatacattcctggacgtggatgtatgctccaaggactcactttgttggttttgaattgaaaatgatgtacttgatggtgaataatagatggatttggaacaaagcggtggaaagacgataaaccgggatgaagacgagattgagtggatgcagcagaatgaaaggggaacgaattgtacttccaagagtgatgaaagactcttagactactagcttggatccaacttagatattacacactaagaataaaacaagttgaaaagatattatgatcaaactagtaaaagagaaggtttttgattaaaatgtttgcaaatgagaaatacaatgagtttatataggagaggaggaagaaggggaagaggtgagagaagaaagacatgcaagagcatgcacaagtccacactcatgcaagctcatgcaaagagttttggaaataacaaaagcaataaatgcagagtttgaatagaaaagagagaatgggccaaggcattgtgagtgggccttggaccacaaattgggctgataaagggaggcttgaaaatgttacttaggcctcattaaaaaccttgtcaagaaaacccattgggacaaaacttgacaagggaaaaagagtgcataagcaacacttaaccctttaccgagcctcttgagccgtgatcactatgaaggaggattgagccacgtcttcttgattcttctttagctccctgagtagtccattgatagcttggttgaacttcttggatattgatcttgttagaggacccgccggaacgattaatgcttcctccggtacaagctgctcctcgtcttcttgtggttcaagtggtttggttgcattggtcatgttctcatcatcctctcccacttgaaaaggatttgttctcaaatctgaagtatctgcaaaaaatggttgaagatcagaaacgttgaaactaccattcacattatacttaccttggagatcgagtttgtaggcgttgttgttgatccgtttgagcactttgaatggtccatcgattcttggcattagcttggatgatcgcacttccggaaaacgttttttcctaagatgaacccacacttgatcgccttcgttgaagatgacttcttttcgacctttgtttgcatacttcttgtattgcttcgttcgagcctcaagatttagtacctgttgtactaaatcgtctttcttcttaccatcaagacttgatctttcactcaaaggtaaaggaattagatccaaaggagatgtgggtttgaacccataaacgatttcaaaaggagaaaacttagtcgcggaatgtctcattaagccacctccatgagcttcccttagaaacaattctcgcaaagaagagtgaggcacacaaagtctattttcaaagaataaatacccatcatgtcgataatattttccaaaggtaaacttctcacaagattgaaatattttgctaaaatcagaatcattagcatacaagtcttttatttgcccaaaacccaacaatcttgcatccaaagaagtaagcaaaacatacctccgagataatgcattggctacaacattatctttacctttttttgtacttaatcacgtatggaaaggtttctatgaattcgacccaccgagcatgacgtttgttgagcttttgttgaccctttaagtgcttgagagactcgtggtcggtatgaatgacaaactttttcggccatagatagtgttgccacgtttgtagtgcgcggaccaatgcgtaaagctccttgtcgtaggtcggataattgagagtcgctcctcctaacttctcactaaagtaagcaatgggcttgtgatcctgcatcaaaacagctccaatacctaacccggaggcgtcacactcaatctcaaaacttttcataaaattaggaagaattggaacggaagaattagtaagcttctctttcaaggcttggaaggcgttttcttgtgcatcttcccatttgaatccaatgtccttcttgataacttccataagcggggcgacaatggtgctgaaatctttgacaaatcgtcagtaaaatcccgctagaccgtgaaagctcctcacctcgctcacattcttagggttcggccattctcgaatcgccttgaccttttcttcatcaaccttgattccatctgcacttacaacaaagcctagaaaaacaagattatccgtgcaaaaggtgcacttcttcaagttcgcataaagtttttcttttcgaagcaagtccaaaacgagtttaagatgcatgacatgatattccaagtttttgctataaaccaagatgtcatcaaaataaacaataacaaatactccaatatgcttcctaaggacatgattcatcaatctcatgaaagtgttaggtgcatttgttaacccaaacggcataactaaccattcatataatctttgtttagttttgatagccgttttccattcatcaccttccttcatccgggtttgatgataaccacttttaagatcaatttttgaaaagatgctagaaccatgcaatttatcaagcgtatcatctaatcgagggatagggtggcgatacttaaccgtgatattgttgatggctcgacaatcccatctttctttggtactagtaagaccagaacggcacacagactcatgctttcacgaatatgacctttgtccataagctcattcacttgtctctcgagttcctttgtttcggtcgggttgatgcgataagctggtcagtttggtagagcggctaccgaaacgaagtcgatttgatgctcgatcccactgatgggtggtaaacctatgggattgtcttctagaaacacgtccttatactcttgcaaaatcaactcgatcttactcggtagcaccggtacgggattaattgaacaaataagtgtttctttgaaaacaaagagtaaactatttttacttaccttgttcttgccctttgtatcgattggttcggttggtttgatggcccgttgtttcatacttagctggtctagatacacttcgtgcagagtcatcgggatgagagttgtctttcggccattgtgttcgaaggtttgtcggttggtgaagccatcttgaagaactttccgatccgattgccatggtcgtccgagaaggatgtgactagcgtccatatgtagaatatcgcacatgatctcatcatgatacttcccaattgatagtggtaccttgacttgttctttgacggacatctcacccgtttcattacgccattggagcgaatacggtctcgggtgtttaagcacttctaaaccaagtttctcgaccatgttcctactcgcaatgttagtacaacttccaccatcaataattaaactacataccttatctttgaccaagcaacgtgtatgaaacaagttttccctttacgcttgttcctcggcctttgttagaacactcaacgatcttctcgcaaactctcctctagcgggggattccacatcttcttccattgagtcttcttccgcactctcatctttggattctacttcgccattgtctctatggaccatgatccttttgttggaacacttgctcgcataatgccgaagtccttgagacttaaagcatcgtatatctctagccctcgtgattacttccttaccctttccttttggatctaaatcgaccggttttggcttgacgaacggcttggaatcgttttgataaccaaacttctcttccttttgataacttggctttcccgagctgtagttggtcttggtgtgacttgatcgggcgttctttctcttgatttgctgttcgaacatgaccgctttgtgaagcatctcctcaagctccacatagtgttgagtttctagacggtcttggatttctcggttaagacctcccatgaatcgggacatgaccgcttctccatcttcttgaagatcagctcttaacataagggtttccatttccagaaagtattcttcaacggttttgcttccttgaaccaaatttctcaaccgctgatgtagttcacgatgatagtaactcggcacaaatctctttcgcatgacgaatttcagctggttccatgttttgatcggatagtctcgggtacgtcttcggctagtaacaagttgatcccaccaacttaaggcatagttgtaaaacttagtagccgcaattttaaccttgttggactgaagacattcttgacaaagaaagactaactcaattttttgctcccattccaagtaagtatccggattgtcggttccatggaatgcaggaattttgagttttaggcctcccaagggatctctaggtggtggtctctctcgtcgatgcctacgttggctactgtgagaggaggcgtgactatagtaatttcttgcctcttcatcttcccttggttcttcttgtcttagacatggatttgcgtccgggttgacttgatgtaagtttagagcactaagcttttcatcgattaatgttgccatagctgatgtgactgttttcaaaatcctcctttccaagctagaggcagatgacgcttcatcttcttcacttgtcaccattgtacctgaaaaattaaaaatttaacaagtaaaacagtccaaaaacaggcaaataaaaacggatctgaaaaattatcaaaacaactccaagaatactagactcgtaaacggttcgaatgcaattggtttcacaatttttgaatgagccaaatattttataaaattcacgcaagattgaacggagatctgaaagaagaaaaacagaagtttagggttggaacttcaaaacctgataacaaagtggctctgataccacatgatacattcctggacgtggatgtatgctccaaggactcactttgttgattttgaattgaaaatgatgtacttgatggtgaataatagatggatttgggacaaagcggtggaaagacgataaaccgggatgaagacgagattgagtggatgcagcggaatgaaaggggaacgaattgtacttccaagagtgatgaaagactcttagactactagcttggatccaacttagatattacacactaagaaaaaaacaagttgaaaagatattacacaattttcggatcaaacaagtaaagggaataggtgagagaagaaagacatgcaagagcaagcacaagtccacactcatgcaagctcatgcaaagagttttggaaataacaaaagcaataaatgcaaagtttgaatagaaaagagagaatggccaaggcattgtgactgggccttggaccacaaattgggctaataaagggaggcttgaaagtgttacttaggcctcattaaaaaccttgttaagaaaactcactgggacaaaacttgacaagggaaaaagagtgcataagcaacacttaaccctttaccgagcctcttgagccgtgatcactatgaaggaggattgagccacgtcttcttgattcttctttagctccttgagtagtccattgatagcttggttgaacttcttggattttgattttgttagaggacccgccggaacgatgaatgcttcctccggtacaagctgctcctcggcttaaagctgctcctcgtcttcttgtggttcaagtggtttggttgcattggtcatgttctcatcagaacccaacacaggagaaaccatcccacccacaaccaccacaccatcaggaaccgtcgcagccacagaacctacttcactttctccatctttttaaaaactttaaaccttctcttatgaacatgtaaggcattgtggttagcaacattagagctttgggtagcaacattttggctaatcaaatttatatgagtttggttttttgttattagcttttcaacaaaaaaaggtaatttaaaatagattagcaaattaatttacctaatttactgattaggtaacgaattagcataataaaaaagaacttaagcgtcacaatttggtctctgttcaaagcctgcaaaactggtaacaaattggtcgcaaattaatctgtgtccctaagtcgtcgtaaatatacgacaattaaccactgtcgcaaaactgtcgcttatatacgaccgaatatatatgtctcaaaggcgtcacaaattgacgacgcaatagtgaccgttttaattagcgaccgttttatagcgactaacatgtatcgtctcacattagtcgcaaagtaacgatttgcgacggtttaaggattcttttgggggttgcaaaagacatgttttcttgtagcgcgccgcctgtggggaccgaggattattgagttgtcagatctcttctcaccacatttttgaggcaagcatcaatggccgaagaaagttccatgaatgcatcatttgccgaaacgctcaaaaatattcaggaaaggatttcggacatgacgcaaaagttctcggatgtggagaaagttgttaacacactgcaaacaagccagatatctcttagccaaaacgttagtactatacaatctcgtgttcggtctttgagtacaagaaaccctctaggagtccgaaggagcatgttcagtttgccggggtctcgtaccaagaatggaaccagtggccagactactcctgatgctacaaatatagtaactcaatcggaggactcggaaacacaattcggagatgatgtcgactagtagatcaacttgagcaagagaaccctgagcagttcgaagctatgaaaaaggttagccgcaaattcaaagaaatgagatcgaagttccactaggccaccagtttggagccaaacatcgatcgagttattgaagaaactaggcgaacccctttcacccctcaaattccaagcttgaaaatcagagattctcgaaagctcaatcttgaaccatacaatggactggaagatcctaagagttatctcgcagctttccttattgctgccaaacgggttgatctggatgaagacgaggagtatgcgggattttgcaaactcttctctcgaaaatctgtgtggacaagcattgatatggttcatccagttgaagcaagggtcgatcagtaattttaacgagctgccagctgtgttcctaaggcagtactccatacttatggataaaagcacctcagacactgacctatggaatctattgcaaggaccaaacgagtcacttcgtgctttcattacaaagttcaagggcatgctttccaagctcccaagggtaccataacagtcagctttatccgctcttcggaaaggtttgtggcacgactcaaggttcaaggaagatctaatacttcacaaaccggatatgatccaagatgccttgttccgcgccaacaactggatggaagtagaagataaaaagaaagctttgcaaaaaggaatcaacaagcaaaacctgcgatcaccttccctacaaagaagttcgagcctagagaataccagggacccaaaaatttcggagtgcacacctccaacaacaacgtcgggaagcaattccaaaggaaagggaagtctaacacgtaggtccaagatgaagaaaatcaaggggatcaaacacgtttgagtctaagacgaaggccaataaaatttgaagcaaggtagtacacaacgagaagactgatgaaacactcgaaggaagcaaagagccaattatctcggttgaggaagtaattcccgaagaaacattagaaactgagccccttgttgaagatgaagttcttgaacccaacgagcatctcgaaccaaagccactgatattttaccagatagatgataagtaggtttttacgcctacttatgtgctgaagtgtgatgtgttcagttcaattccccttaaatactaacatgtcgatgcagctatagggggtgtcaaaccagtccactgttattgctagcaatcaagatgtgtacagaagaaactaagtcaagccagattatagacatggttggtttctagtaacaatcctaggtcatgattcaaacaacaaaaataagaacttaaaagccctactcgatcattgggccgagtagaactaacaggcaacaaattgaagaactaaaatgcaatcaaaagttgacacaaataacagataaataaaagtgcaatcagggggtgaatacaaataaatctaagaagaatagaagtcctaaggatggattcattgataagggcaactctagggttcatcaggtggctaacaggtgaaagggagataccttagatgatagattcaaaaaccgaatcaatccactctcgtggcagaaacccccataactctaccacttcctaatctcaactctcgttgatgaaacatagcagagcagggtttaagcaacaatctacccaagtcaataagcagtctagccaatctcttggtctagagtccataaatctctggaattcgtagatcaggtgatatgtctataatttgcatgatttaggcattcattcttcaccactttgtcattgtttcatccacatttcatctcattaggagtcgttttagtgtgttttgcacacttaggacgattttgcattaggattgcatgtgcattgcatatttggttgttttcaggtactttggatgcttttggagttcaaacagaggagaaatagaacagaaagtcagaatgcccaatgacgccttcagcaaaagtactctatcgcagcctcggagccctgccagggcaaatcactctatcgcaaccccaaagaagctagaagctaagtttcactcaatcgcgaagccggaggaatcaccccataagaaccactcaatcaccaggaggcctatctgctcgttctgcactcaaccagacaagctgagaacaaagaagagaagagaagccgaagaaaccactcgatcaccacctcatgacatccactcgatcgcactcgatgacagggtcgctggaccattcaatctcgactttactacatctcactcgatcgcaaggcggagctcctgaagcccagtttgatcaaagacatactcgatcacagggaagctcatttcagcccattagatgccaatgacacattcgatcgcagggtcatgacgtgaagattcgctatatatctagtttccttatttgtttcatttctcgcttatataaactgcctcttagggttttccctagggcatcctttgttattccgtttttcattcacttttacatttttgcaactttcatagccgcagtgtttctcctgcgactctgtatttttactttcaagtatttgatatttagttttcgtataagtcttacgtcatttatgttatcatgttttcaatcgttactttgctattgtctttgattatgtctgagtagtgaaccgtatttctgaggatgggatagattagttgtggtttacttggtcgttttaggtggttgagtttagaatactagaatcccttctggattagttgcgcttattgcttgtttcactggttaatgtggaatatgagtccagacgtccagcgctcagaaggcgtttaatgggcgttggatcctataaattccagagatatctgactctaccccaagagattggctgtagagagggtattggctttaacatgttgattcgataatgcctgcttagttagagatcgctaatgggaattaggttagtgtctagctttgtttgaggatttctatcacgggagtgaattaatctgttgaacttgttgtctagggatagcttctttgaagatttgtcaaccacctgaatagattaaggagaccacactattcgattaccccatccttaggaatcgtttatccatttgattgcctgttatcatttttgctttgttattcacctgcctgttattgctatttctgcttttattttcatttcctttctgttattgaatactaggactgttaggaccaaccaactctctgcttggcttgacttagagctttctaatcatatctcatatgtttgcatcacaccagattggattgacacctaaaatactacaacgacaggatagttgtttgagctggattcccctccaggaatccacctgcgaaaataccaagccagccaacaaaagcccaccaatcccactaagtagaggacctacgcagctcacgagcccacatacgcgaatgggtatttgggccagataacccagtcagctgatgaagggagataagcgaataatgacctaggaactgacgaggagatattcacggagcggacctgatatctcaaaactgacctaccgaatatccaggaggatctccgcagatcccggacagagctaccacgtgcgtagacctatataagggagcaaggacgacttggaagagacattcaatctagcttacattcacacacacacttttacacttgtaatctcttttctcattgtaaaagctttgtcaaaatcaatacaaaagtccattcgttcttagcaatataactctcaaggtttcagtgaagatctagccctcctttctcataatcttaaatacaaatctctaatgtggatttcagaacccacatttggcgccgtctgtggggacggaaatagatcattctaacaccgaaactaacacatcaattgtgaccaacgatcatggatcccaattcatccaacacatcgggatctggcttaccagttcagatcccaaacgatgacgttacggacgggcacctcccaacggatctccctcccggagcccaggttgatgctatccataacactgacacagagaacatctcccaaaactcgaattcttctggatctgaccaaatcactctccctccgcaaacaaggggcggagaacgaaacgtcacgatacaacctccaaacggagataactcggccaacctatctaatcaggtcccctcgcgacctgccagcgaattggccgagctccgcgcaatgatcatgaacttgatcaacttaacaaaaaaccaagaaattgcgcatcgcaatctcgtcgcaattatgggtcagcagagacgcgattccactcgcatggcacatgaggtagagcgcgatatcgcgggtaaggagattccccccccccccccccgcgaaactgggattcctgcccaggtccccatagatctgacaggtaccgtctccccggccgatcctactctgagaactcgtttggatttcgcctcgatagacgtctcacctcctatcaaccggcaggtcgcctttttacagggacctacgaacgctctagtcgaaaacctggcaacagtaaacaaaacaagcacaacgcctgccttcccaaggctaccggccccacctctattactgatggtctgttcaccccctaggtacacgtggagtagaaaccaaacaaccgcatccagttcccgcattcccggaaactcaacgcaacaacggacctctatcgctaatccgccatccgttccccggataccaggaagcgacctccttaatagtccccaagcaccggtcgatccgcgtaacgtcgtggatatggaaacattccgcaattacgcagctcaaacaaacgtgaacatggctcaaatgcattctcgaatgcacttagcagtgagcgatgccgttcacggataggatcgctcgctttagcctccgagacgtcgagcgaccaataggctcatttgagatccttccgtttcgctataacacgagcgtacctgacagacgaagaaaacgaagcaggtcattgccgtttcttcgcagaaaacctcgtaggtcacgccctcaaattatttgctagcctcgaaagggactccattgataccttcgaccagctcaccgccgctttcttaaaacagtattcggtacttatcgaacacaggacgtctgaagccgacctctggagtctcggtcaacttcagaacgaatccctgcgatcttacgtcaaaaaattcaaagcaatcaagtcaaaaattgcaaacctaaacaaagaggtagccatagcagcccttcgtaacggcctttggttctcctctaggttccgtgaggaactcactgttaggcaaccagtctctttagacgatgcccttcacaaagctctccacttcgccaaagccgcaggagctcaccgtgctggccttacgattcaaagaatctaaaatgcaaaacgctccccttgcaattcagaaacccttcaaaaaggaaaaccaaacgcaggggcaacataccttattcgcaatagacgaggcagctgaggacgagagtccagaacttgacctcggaaaatattgcaagtaccacaagaaaagaggacattccaccgaggagtgtcgcgccgttaaaaagttaattgcagctgcgggaaagactaaaaaaggttcaaaccccaaagttgaaacccctcctcccgacaaacaggaggaggagcaaactcccaagcaaaagaaacgggaacgaacaccggagggaagtgactctcccccacctgctaggagagaacgcatagacgtagtctttgcagaactcgatctaggtggtgagacaggaaggtcagtcaccacacctccccccgccccgcataagaaaaacatgaggtttccattacgcctctcaaaattctgctgaagcgcaaccgaggaataagcctcgaggtaacctcacacgaactcaacgtcgatccgacctaccgacctataaagcagaaacgtcgcaagctaggtcccgagagggctaaagctgtgcacgatgaggtcgatcgattgctcaagatcggatcgataagagaagtaaaataccctgactggctcgccaacccggtcgtcgttaaaaagaaaaacgagaagtggagagtatgcattgactttacggacctgaataaggcatgtcctaaagacagtttcccactcccacatatcgaccgactggttgaggccactgcgggacacgaactattgtccttcatggatgcattctccgggtacaaccaaatacttatgcgctcagatgaccaagaaaaaacagcttttataactgaccgaggcacctactgttataaagtaatgccctttggtttaaaaaacgctggagctacttaccaaagattggtgaacagaatgttcgccgaccagcttcgtaaaacgatggtggtctatatcgacgacatgctggtcaagtcagctcgcgaaaaagactacgtcccgcagttaagagaatgcttcaaaatcctcaacaaattcgaaatgaagctaaaccccgagaaatgctctttcggagttccctcaggttaattcctcggatacctagtaaccgaaagaggcatcaaggccaatcctaagcagattgcagccttcatcgacatgccatcgccaaaaacggcacggaggtccaacgactaaccggctgtatcgccgcccccaacaggttcatatccaggtccaccgataaatgcgtccctttatatcagctcctccgaaaggataaaaagtttgattggaacgaggactgcgagcaagccttcaaacaattgaaagcgtacctgtccgaaacacccatactcacaaaacctgaagaaggagaaccgttgtacctgtacacggcagtctcccgaaccgcgataagcggcgtcctggtgagagaagatcacgaaggacagaaactgatctattacgttagtaaaacgttgatagacgctgaaactcattatccagcaatggaaaaactggcgctggccgtaatcatgtccgctcgaaaactgagaccatattttcaatcacatcccatcgtagtgatgacgtctcaaccaatcagaactattctgcacagtctgactcaatcaggtcgacttgcaaaatgggctatagaactaagtgagtacgatatagaatatcgcaccagaactagcctgaaagcacaggtcctagccgactttgtaatcgagctcccgttagcggacctggatggaaccaattccaataaaaaatggctcctccacgtcgatggctcctacaaccgacatggatccggagtaggaatacaactcacctcccccaccggggaagtcatcgaacaatcgttctgactcggattcaacgcatcaaataacgagtctgagtacaaagccctcattgctggcattaggctagctcaaggaatgggaatctgcgatatacacgcccatagcgactcccaactcgtcaccagccagttccacggggaatatgaagctaaagacgagcgcatggaagcgtacctcgaactagtcaaaaccttgacccaacagttcgagtcttttgaactgaccaggatccccagaggtgaaaacacctctgcagatgccttggcagctctcgcctccacgtcagatcctttcgtcaaaagaattatcccagttgaaggaatagaacacccgagcatcgacctaacggtcaaacacgctgaaatggaaacctcggcaacttgcaactttacgcgagtaacccgaagcaccaccgccgcggctagaaccattgcagcagccgcggaggcagatgcagcggaggaagagccggagctcggaacccccgaacaacttgcctcgtacgaacctgaaccgtacaacaactggagaatcccaatcatcgattacatcaaacgagggatcacacctcccgacaagtgggagaccagaaaactcaaagcctagagcgcaaggtactgcatcatggaagggagactgatgaaacgcagcgtcataggtccctacatggtgtgtacctatgggcaacaaacgaaagatctcatgaaaagcatgcacgaggggcaatgtggtagccattgtagtggacgtaccctcgccctcagaattaaaaagcaaggttacttctggccaacaatgctagccgattgcgtagctcattcactcaggtgcgataaatgccaacgacaagcacctactcttcatcaacctcccgaggaaatgtcgtaggtcccatggaagcctccggtgggaagaagagactaaaaaacctgctggtcctcaccgactattctaccaaatggattgaggctaaagccttccaacaggtaaccgagaaacaagtcgaggacttcctatgggaaaacctcgtatgccgacacggcataccttatgagatcgtcaccgataacgggactaacctcacctcgggaaaaatcaaagcattttgcgacaagtggaagatccgtcttaccacatccatcccctgttacccacaaggtaacggacaggcagaagccgccaacaaagctatacttagcaacatcaagaaaagacttgattcaaaaaaatcaatgtggtccgacgtgctccacggagttctctgcgcctaccgaactacacctcgcaaatcaacgcaagaaacaccgttctccctcccttatggtttagaagcagtaatccctgtcgaaaccatagtaccaagcgtgagaaggaccgccagtcctgctaattcggacctgaacacgcaaattttacaggacaacatggacttcatcgatgaacgcagagatcaggtaatgatccgagttcaaaactatcaacaagctgccgcccgctactataactccaatatcaaaattcggagattcgaagtgggagagctcgtcttacgaaaagtgttcagcaacacgagagagctaaacgctggaaaactgggaactaactgggaaggtccctatcgaatcaccgaggtggtacgtgacggtgtctataagctcgtaaaagttatcaacggagtacctgagttacggccttggaatgccatgcatctcaagaaataccacgaataagtactcaaaaacaatcgaactacgataaggcttgatcccttggcagggtacgtaggcagctcctcccaagagcgcagccaccaattcaatcaaatcaaaagagcttaatcccctaaccaggtattcaggcagtcacctccgcaaacgcaattaccatctcaacccttctatctgtaagacaaaacttcaacaagggaaatggacatcgcatctctcatcaacgaagatcagctgctcacctgacagttcaatctcccttcagtattgagcaggtccctgctcgatgaccaaacgccagatcgtcgcttgctttacctccttttgtacttaacgatttcgagataagaataaaaggaaattttgatactcattatcatatttcgcaaaaaaaaaaatcatttacactatgatttaaaactcattcgtaatcttacgatacctaaagcccaacacccgaacgttggcggatccattttgtgatctcgcttccaaaaagttgacagtgaactaaaacttataagaacacatcactgcggcttcattggagctcatctactacaaccaaatctaactctttcgctatcaacgcataacatagtaaacaaggaagaaacgaaggtttcattcgcgacctggcgataccacaagcccagctcccaaaatctggcaggtcccttgtgtgacctcacttcaacaggttcccaagataaaacaactcaaactcattcaaagttttaaccttcgaggaacataccatatcacgtccaaaatgatttggacgtgaaacaagtccaatcattatccggaacatggacaaagcgaggtggtctcgcaccaaaatcaacgaagtgtcaacactcgaacgaaagacagaaaatacttgttaaaaagggtaaaagccttcccaggcattcgagtacttaaacgaacaatggataaaagccttcccaggcaccaagttcaaaaggaaataaacgaaaggataaaagccttcccaggcattaagtctgaaacaaaacacgaaatcctaaaacaaacaaggagcgaaagtgatcactccctcgattctccggctggtgtagcgaagacagtaccagaaccctctgcgagacctctcggaaacgcgtctttgttgctcccgaactcatccaagccaattggcgtcccttgctcgtcgacgtccatcggacgtaccaccgaaatctctgaaacttgcgggagatccaacttgcttagagtaaaatctgatacctccttcgacttgcaccgcgcctctaggtcatccttctctgcttgcagtcgaggtctctccatgttcagatcaatagcagccttagtgatctggtcgatcaaagccaggttcgattccacctcagccgtttgcccctccagtacagtgcattcctttttggcgacccacttctccttgatcccagccagcagcttcgaatacgcagcagccagctcaaccttagcatcgtgaaccgccttcttctccccttgtgcaaccgaagtcaggtccaccacctttttggagagctcttccctcttctactccaagcgatggatctggctcctcgtggtctgcttgtcggcttgcaaccccctgatctccatctccatgaacccgatcttctcagcaaaacctttctcgaggtcttttgaagtggacagctccattttcagcctctcgatctccgcctgaaataacaatcaggtcagaatcatcaaatcatcgacgaattatttataaacaagtcaaaaccgaggtgtacctggaacgagactttgcgatcttgaccagccttcacacttgacgtcagctcccggatgagggcctttccttcttcaagctcattcgccgaggggacctggcttagacgctgctcatagagagcaaccagcttgtttgtggcagctatcgcctaccaaaagcaaaacagaaagtcacaactagcgaaaaaatataaattagaaggagacagttatcgataattacctggccctccttcgccatcatgtcagcataggccgccgcctcggctatgtttttcactccaggaacctgacagttcctccctatgatgtggcgaagcaggttcgctaacccagcctcgtcctcaacgatcgggtgatcacggtcgtgattgtaagaccagtggaaaggcctgcttcccgcggatcctccgccggagttggatgtctgcctcacttcctgagaccggtttgaagaccggcccccacctctggagcctcgtcctccgccatgggacctgcccgaggatcgcctagccgcagacgcagctgcctccggagtagcagccgcaggttccatcctctcctctctaggagaggcgaccctctggtcgctcacgaccaactcagccgccggattcacctccggctgggtccgagccctcttcggagaggacggtgcaccatcaggacgaacaacttcagatggcctagatacatgagcgacctgattgttatccggttgacctgctgcagctgaggtcccgatgttgacctcaggaagcgagggatgagatgctaaggcagatgcgctggaaacagctagagtgtttcgagccgcggtcaccgcggcagacagatcaccagcacgagcaggagccccggcgttggctccttgaacacgaaggcttgggcgcctcattcttctgacgagcgggagttctgaagtggagttggaatcaggaggaactgaacaaatagagcacgacatttgttagttagcaattcgagttgcacagttgtctcgataactcgttcatttttaaaaaccaaagaaaatataacggaactcgtacctataggcagatcagcctcgggaacaggttcaatacgcgggacctctttgatcagatctagcggtgctgctggaggaacgattgcgggaactgctggagctacaggaactgctggagctacgacaagagcagctatgatgcgatttctgctgaaagtggaccagttagtctgaccacgttggagaagggttaacagctcaagttccgtctccgagagagtaacttccttggtccttgctgcaaatcataaacaacaagcaattagtttcagtactaacgattagcaaaagcagtcaaggattcaacataaacaacaaggaaaaatcaagaggctgaggtctccatctcacccaggttggtagaccaggtccttgttatcctcgcgggatcaaaattgccaactgaatgacgatctactctgaaaaataaatacttggatcgccaattggtgtctcgacaggctttcaaaaccgccgaggaccagagatccgggacgtgcactgatgtagtacgtcccttggtcactcctagcattggtcttgacctggcagagctgaagcaggtcatggcagctgaattttctgtttacttcccgagcccgggtgaataacgccagcacatggcagacgaagttcggacacatctggggaaaggcgaggccgagacagtagagcatctcgagaatacatgccggaattgggaagaataggccgtatttctcgaagaaattggcataagcgcagcaccacccgaccggcacgttctcaggatgtagcggtggccttgggagtatcatatgtacctccaccggaacctggcatctcctccagaggtcgaccaggtcgttgttcatcatcggcgtgcctcccccttgcttggcaacctttttcttcttcggtttgtcggctctggttgacggcggacgaattagacccattccgcctagggttaaggcgcgtctctgtactcgcggcggtgacgccgccgaccttgtctcggatgaactcgaatcatcgctgtaacagtggttgctcttgttctgagaatcttcgaagtcgctcatctttgggtttcgacggagaagggcgagagagatgaaagaaaaaagcaaaggaggcagatcgggaaggagggaatagcagagaaacgaaggagatagcaaaaaaataaaaacgagatttttctacttctacaaaacaaagcgcagtaaataataaaggaggagagaagttaccttgagagttgtgtgagttgacgtgacgtcaagtggagaggtggaaagttatttaaagccatcatcaccacgattttcgagattgcagaaatctattatccgcgcctgatctggaccgtcagatgcggtgcgctgaagagacgctccagctcggccgtccacatcagcagcgacttatctcgcgtatcttctcgaaagtttttggttaaaggaatctgaaatgaaaacgaaattgttgagtttatcctcaaaaccgactgatctaaccacatttatcctctcgtcaagaatattttcgcaatcttacttgacctatatgtccgctcatcgagttcgcctactcactcaatgggctggggggcaaatgttggagctggattcccctccaggaatccacgtgcgaaaatacaaagtcagcccacaaaagcccaccaagcccactaagtagaggacctacgcagctgacgagcccacatacgcgaatgggtatttgggccaaataagcccagtcacctgatgaagggagataagcgaataatgacctaggaactgacgaggagatactcgcggagaggacctgatatctcggaactgacctgccgaatattcaggaggatctccgcagatcccggacaaggctaccacgtgcgtagacctatataagggagcaaggacgacttagaagagacattcaatctagcttacattcacacccacacttttacacttgtaatctcttttctcattgtaaaagctttgtcaaaatcaatacaaaagtccattcgttcttagcaatataactctcaaggtttcagtgaagatctagccctcctttctcataatcttaaatacaaatctctagtgtggatttcagaacccacaatagtgttttaggattaatggactaaaatcctattatcaatttggcgccgttgccagtttggtgtttgtttgctatatttgagatcattagaaacgttaagatcaagttcatttttgttacacaagttactaacattgtgcttcttctgtctttgtgtttcaggtaccttgcaacctgctttacagacgcatctctatttcgtctgttatagcccagctgctatctgttgcatgcatacacggtcacaaggaaattagaacctcctattcaacgataacatcgaccgtattgctcgccaacttagagaacagacagaaacagacacaatggctgacattgtagatgagcaagagcaacctaccaacattggtgctggtgacttccctcacaaccacaaccggcgtcatggaattgttccacctccagtacagaacaacaactttgagatcaaaagtggtttcattgcaatggttcaggggaacaagtttcatggcctgccaatggaggatccgctagatcatcttgatgagtttgaaatgctatgtggccttactaaaatcaatggagttagtaaagatggtttcaagcttcgcttgtttccattctcacttcgagataaagcccatctttgggaaaagacggtaccccagaattcaatcacgacctgggatgactgcaaaaaggctttcttaacaaaattcttctccaactccagaactgcaagactccggaatgagatattcggatttattcagaagcaaaatgaaagcttctgtgaagcttgagagcgatttaagggttatcaaaccaaatgccctcatcacggatttaagcaagcttctcttctcagcacactctacagaggcgtcttgcctaagataaggatgttgcttgacatcgctttaaatgggaatttcctgaagaaggatgttgaacacgggtgggagctagttgaaaactttactcagtcagatggcaattacaatgaagactatgacagaagcatccacaccagttctgactttgattacaagcaccatagagagatgagagctctcaatgacaaactagacaaaattgtccaaatgtagcagaaacatgttcacttcatctctgaagatgaatcattccaagtacaagagggggagaatgatcagtgtgctgaaatcagctatgttcagaataaaggtggctacaacaagggtacaataattacagacccaaccctaatctgtcatatagaagcaccagtgtcgccaaccctcaggaccaagtctaccctcatcagcagcagcagcagaaccaacccaaaccgtttgttacttacaaccaaagccaagggttcattccaaagcagcagtttcagggaggatatcaacaacaacagccaccacctggtttcacaccacaacaacaacaagcaccttggcctcagaatttagacataatgactatgctccagcaactcattcaaggacaagccacatgagcaatggaaatcgctaagaacctggctgaattaaacaacaaagtcgaccgacaaggtgtcaaactgaacagtaagtttgaatcactaggcactaggatgagatatgtggaaggcatcctcgcttcaccatctgttaacaacaacccatgccagcttccagggaaagcaatccggaatccaaaggagtatgccactgcccatgccatcactatcagaaatgatcgagagctgccaactcgacatgtccctacattaaacactgaggacagtgtgattctagagggggaggatttttatcaagatgatgttttggctgagaaaacaatcgaagaggccatccttgacagtcaaagcactcgaccacaagctcctccagctactaccttcgttgcaaaaccgacagcagcaaaagaccaaagatacagtcttcgtgccaccaccttacaaacctccgcttccattccctggtcgatttaagaaagttctggttgcgaaatatcgagacctcctggaaaaacagataaaggatatgcctttagtggactgtctcgcgctagtacctaacaagcacaagtacgtgaaagacctgattacagaaaggatcaaagaagtccaaggaatggtggtattaagtcataagtgtagtgcaatcactcaaaagaagattgttcaagaaaagttggaagatccaggatcttttactctaccatcctccattagacaattgcctttcaacaattgtctatgtgatctaggagcctcagtcagcataatgccgctctttgtggcaaggaagctaggattcgttcagtacaagccttgtgacctaaccttgattcttgctgataggacttcaaggagaccttttggcctgttagagggtgtgtcagtaatgattaatggagtagaggtctctactgattttgttgtgcttgagatggatgaagaatctaaggatcctctgatcttaggaagacctttcttagcttcaggtggagcagtcatagatgttaagaaaggaaaaattaatcttaatctgggggaggatttcaaaatgaagtttgaaatcagggacactatgaagaagccaacaatagaaggacaaaccttcttagttgaagaaatgggtcagctagctaatgaactgttagaggaacttactgacaaagatcaccttcaaactgctttgaccaaaagtagtgaagctggatttctctccagtgagaccttgagctatgagatgtcattagactcacacaacagagtaccaggatcagagatctttaaaggtgtcattgtgttagaaagagaggatgttgcattgaacgaggaaggctcaattgatactcgactagagtgctcaaccaaacagctaaagtcaagcatgaggacatcatatgattggttagaactcaaggagagatctaaatggcataatagagctataagagagctaacacacactgtgaaagagctgaaagatcaagtcaaggagctccatgggaaagccaacaaagcaccactcgacatcaaggacttcccaaatgatgaagttattcctatggttagaaaagaaggatgtgaattc
